United States Patent Application Publication US 2026/0258383 A1 - sequence listing, part 3

SEQ ID NO: 2048 - protein, 2096 aa, synthetic construct
MPAAKRVKLDGGDKKYSIGLDIGTNSVGWAVITDEYKVPSKKFKVLGNTDRHSIKKNLIGALLFDSGETAEATRLKRTARRRYTRRKNRICYLQEIFSNEMAKVDDSFFHRLEESFLVEEDKKHERHPIFGNIVDEVAYHEKYPTIYHLRKKLVDSTDKADLRLIYLALAHMIKFRGHFLIEGDLNPDNSDVDKLFIQLVQTYNQLFEENPINASGVDAKAILSARLSKSRRLENLIAQLPGEKKNGLFGNLIALSLGLTPNFKSNFDLAEDAKLQLSKDTYDDDLDNLLAQIGDQYADLFLAAKNLSDAILLSDILRVNTEITKAPLSASMIKRYDEHHQDLTLLKALVRQQLPEKYKEIFFDQSKNGYAGYIDGGASQEEFYKFIKPILEKMDGTEELLVKLNREDLLRKQRTFDNGSIPHQIHLGELHAILRRQEDFYPFLKDNREKIEKILTFRIPYYVGPLARGNSRFAWMTRKSEETITPWNFEEVVDKGASAQSFIERMTNFDKNLPNEKVLPKHSLLYEYFTVYNELTKVKYVTEGMRKPAFLSGEQKKAIVDLLFKTNRKVTVKQLKEDYFKKIECFDSVEISGVEDRFNASLGTYHDLLKIIKDKDFLDNEENEDILEDIVLTLTLFEDREMIEERLKTYAHLFDDKVMKQLKRRRYTGWGRLSRKLINGIRDKQSGKTILDFLKSDGFANRNFMQLIHDDSLTFKEDIQKAQVSGQGDSLHEHIANLAGSPAIKKGILQTVKVVDELVKVMGRHKPENIVIEMARENQTTQKGQKNSRERMKRIEEGIKELGSQILKEHPVENTQLQNEKLYLYYLQNGRDMYVDQELDINRLSDYDVDHIVPQSFLKDDSIDNKVLTRSDKARGKSDNVPSEEVVKKMKNYWRQLLNAKLITQRKFDNLTKAERGGLSELDKAGFIKRQLVETRQITKHVAQILDSRMNTKYDENDKLIREVKVITLKSKLVSDFRKDFQFYKVREINNYHHAHDAYLNAVVGTALIKKYPKLESEFVYGDYKVYDVRKMIAKSEQEIGKATAKYFFYSNIMNFFKTEITLANGEIRKRPLIETNGETGEIVWDKGRDFATVRKVLSMPQVNIVKKTEVQTGGFSKESILPKRNSDKLIARKKDWDPKKYGGFDSPTVAYSVLVVAKVEKGKSKKLKSVKELLGITIMERSSFEKNPIDFLEAKGYKEVKKDLIIKLPKYSLFELENGRKRMLASAGELQKGNELALPSKYVNFLYLASHYEKLKGSPEDNEQKQLFVEQHKHYLDEIIEQISEFSKRVILADANLDKVLSAYNKHRDKPIREQAENIIHLFTLTNLGAPAAFKYFDTTIDRKRYTSTKEVLDATLIHQSITGLYETRIDLSQLGGDGGPAPGGSEAAAKGGLGIEDEYRLHETSTEPDVSLGSTWLSDFPQAWAETGGMGLAVRQAPLIIPLKATSTPVSIQQYPMSHEARLGIKPHIQRLLDQGILVPCQSPWNTPLLPVKKPGTNDYRPVQDLREVNKRVEDIHPTVPNPYNLLSGLPPSHQWYTVLDLKDAFFCLRLHPTSQPLFAFEWRDPGMGISGQLTWTRLPQGFKNSPTLFNEALHRDLADFRIQHPDLILLQYVDDILLAATSELDCQQGTRALLQTLGDLGYRASAKKAQICQKQVKYLGYLLREGQRWLTEARKETVMGQPVPKTPRQLREFLGKAGFCRLFIPGFAEMAAPLYPLTKPGTLFSWGPDQQKAYQEIKQALLTAPALGLPDLTKPFELFVDEKQGYAKGVLTQKLGPWRRPVAYLSKKLDPVAAGWPPCLRMVAAIAVLTKDAGKLTMGQPLVILAPHAVEALVKQPPDRWLSNARMTHYQAMLLDTDRVQFGPVVALNPATLLPLPEEGAPHDCLEILAETHGTRPDLTDQPIPDADHTWYTDGSSFLQEGQRKAGAAVTTETEVIWAGALPAGTSAQRAELIALTQALKMAEGKRLNVYTDSRYAFATAHIHGEIYRRRGWLTSEGREIKNKSEILALLKALFLPKRLSIIHCLGHQKGDSAEARGNRLADQAAREAAIKTPPDTSTLLIAGKRTADGSEFEKRTADGSEFESPKKKAKVE

SEQ ID NO: 2049 - protein, 2100 aa, synthetic construct
MPAAKRVKLDGGDKKYSIGLDIGTNSVGWAVITDEYKVPSKKFKVLGNTDRHSIKKNLIGALLFDSGETAEATRLKRTARRRYTRRKNRICYLQEIFSNEMAKVDDSFFHRLEESFLVEEDKKHERHPIFGNIVDEVAYHEKYPTIYHLRKKLVDSTDKADLRLIYLALAHMIKFRGHFLIEGDLNPDNSDVDKLFIQLVQTYNQLFEENPINASGVDAKAILSARLSKSRRLENLIAQLPGEKKNGLFGNLIALSLGLTPNFKSNFDLAEDAKLQLSKDTYDDDLDNLLAQIGDQYADLFLAAKNLSDAILLSDILRVNTEITKAPLSASMIKRYDEHHQDLTLLKALVRQQLPEKYKEIFFDQSKNGYAGYIDGGASQEEFYKFIKPILEKMDGTEELLVKLNREDLLRKQRTFDNGSIPHQIHLGELHAILRRQEDFYPFLKDNREKIEKILTFRIPYYVGPLARGNSRFAWMTRKSEETITPWNFEEVVDKGASAQSFIERMTNFDKNLPNEKVLPKHSLLYEYFTVYNELTKVKYVTEGMRKPAFLSGEQKKAIVDLLFKTNRKVTVKQLKEDYFKKIECFDSVEISGVEDRFNASLGTYHDLLKIIKDKDFLDNEENEDILEDIVLTLTLFEDREMIEERLKTYAHLFDDKVMKQLKRRRYTGWGRLSRKLINGIRDKQSGKTILDFLKSDGFANRNFMQLIHDDSLTFKEDIQKAQVSGQGDSLHEHIANLAGSPAIKKGILQTVKVVDELVKVMGRHKPENIVIEMARENQTTQKGQKNSRERMKRIEEGIKELGSQILKEHPVENTQLQNEKLYLYYLQNGRDMYVDQELDINRLSDYDVDHIVPQSFLKDDSIDNKVLTRSDKARGKSDNVPSEEVVKKMKNYWRQLLNAKLITQRKFDNLTKAERGGLSELDKAGFIKRQLVETRQITKHVAQILDSRMNTKYDENDKLIREVKVITLKSKLVSDFRKDFQFYKVREINNYHHAHDAYLNAVVGTALIKKYPKLESEFVYGDYKVYDVRKMIAKSEQEIGKATAKYFFYSNIMNFFKTEITLANGEIRKRPLIETNGETGEIVWDKGRDFATVRKVLSMPQVNIVKKTEVQTGGFSKESILPKRNSDKLIARKKDWDPKKYGGFDSPTVAYSVLVVAKVEKGKSKKLKSVKELLGITIMERSSFEKNPIDFLEAKGYKEVKKDLIIKLPKYSLFELENGRKRMLASAGELQKGNELALPSKYVNFLYLASHYEKLKGSPEDNEQKQLFVEQHKHYLDEIIEQISEFSKRVILADANLDKVLSAYNKHRDKPIREQAENIIHLFTLTNLGAPAAFKYFDTTIDRKRYTSTKEVLDATLIHQSITGLYETRIDLSQLGGDGGEAAAKGGGGSEAAAKGGLGIEDEYRLHETSTEPDVSLGSTWLSDFPQAWAETGGMGLAVRQAPLIIPLKATSTPVSIQQYPMSHEARLGIKPHIQRLLDQGILVPCQSPWNTPLLPVKKPGTNDYRPVQDLREVNKRVEDIHPTVPNPYNLLSGLPPSHQWYTVLDLKDAFFCLRLHPTSQPLFAFEWRDPGMGISGQLTWTRLPQGFKNSPTLFNEALHRDLADFRIQHPDLILLQYVDDILLAATSELDCQQGTRALLQTLGDLGYRASAKKAQICQKQVKYLGYLLREGQRWLTEARKETVMGQPVPKTPRQLREFLGKAGFCRLFIPGFAEMAAPLYPLTKPGTLFSWGPDQQKAYQEIKQALLTAPALGLPDLTKPFELFVDEKQGYAKGVLTQKLGPWRRPVAYLSKKLDPVAAGWPPCLRMVAAIAVLTKDAGKLTMGQPLVILAPHAVEALVKQPPDRWLSNARMTHYQAMLLDTDRVQFGPVVALNPATLLPLPEEGAPHDCLEILAETHGTRPDLTDQPIPDADHTWYTDGSSFLQEGQRKAGAAVTTETEVIWAGALPAGTSAQRAELIALTQALKMAEGKRLNVYTDSRYAFATAHIHGEIYRRRGWLTSEGREIKNKSEILALLKALFLPKRLSIIHCLGHQKGDSAEARGNRLADQAAREAAIKTPPDTSTLLIAGKRTADGSEFEKRTADGSEFESPKKKAKVE

SEQ ID NO: 2050 - protein, 2096 aa, synthetic construct
MPAAKRVKLDGGDKKYSIGLDIGTNSVGWAVITDEYKVPSKKFKVLGNTDRHSIKKNLIGALLFDSGETAEATRLKRTARRRYTRRKNRICYLQEIFSNEMAKVDDSFFHRLEESFLVEEDKKHERHPIFGNIVDEVAYHEKYPTIYHLRKKLVDSTDKADLRLIYLALAHMIKFRGHFLIEGDLNPDNSDVDKLFIQLVQTYNQLFEENPINASGVDAKAILSARLSKSRRLENLIAQLPGEKKNGLFGNLIALSLGLTPNFKSNFDLAEDAKLQLSKDTYDDDLDNLLAQIGDQYADLFLAAKNLSDAILLSDILRVNTEITKAPLSASMIKRYDEHHQDLTLLKALVRQQLPEKYKEIFFDQSKNGYAGYIDGGASQEEFYKFIKPILEKMDGTEELLVKLNREDLLRKQRTFDNGSIPHQIHLGELHAILRRQEDFYPFLKDNREKIEKILTFRIPYYVGPLARGNSRFAWMTRKSEETITPWNFEEVVDKGASAQSFIERMTNFDKNLPNEKVLPKHSLLYEYFTVYNELTKVKYVTEGMRKPAFLSGEQKKAIVDLLFKTNRKVTVKQLKEDYFKKIECFDSVEISGVEDRFNASLGTYHDLLKIIKDKDFLDNEENEDILEDIVLTLTLFEDREMIEERLKTYAHLFDDKVMKQLKRRRYTGWGRLSRKLINGIRDKQSGKTILDFLKSDGFANRNFMQLIHDDSLTFKEDIQKAQVSGQGDSLHEHIANLAGSPAIKKGILQTVKVVDELVKVMGRHKPENIVIEMARENQTTQKGQKNSRERMKRIEEGIKELGSQILKEHPVENTQLQNEKLYLYYLQNGRDMYVDQELDINRLSDYDVDHIVPQSFLKDDSIDNKVLTRSDKARGKSDNVPSEEVVKKMKNYWRQLLNAKLITQRKFDNLTKAERGGLSELDKAGFIKRQLVETRQITKHVAQILDSRMNTKYDENDKLIREVKVITLKSKLVSDFRKDFQFYKVREINNYHHAHDAYLNAVVGTALIKKYPKLESEFVYGDYKVYDVRKMIAKSEQEIGKATAKYFFYSNIMNFFKTEITLANGEIRKRPLIETNGETGEIVWDKGRDFATVRKVLSMPQVNIVKKTEVQTGGFSKESILPKRNSDKLIARKKDWDPKKYGGFDSPTVAYSVLVVAKVEKGKSKKLKSVKELLGITIMERSSFEKNPIDFLEAKGYKEVKKDLIIKLPKYSLFELENGRKRMLASAGELQKGNELALPSKYVNFLYLASHYEKLKGSPEDNEQKQLFVEQHKHYLDEIIEQISEFSKRVILADANLDKVLSAYNKHRDKPIREQAENIIHLFTLTNLGAPAAFKYFDTTIDRKRYTSTKEVLDATLIHQSITGLYETRIDLSQLGGDGGPAPGSSEAAAKGGLGIEDEYRLHETSTEPDVSLGSTWLSDFPQAWAETGGMGLAVRQAPLIIPLKATSTPVSIQQYPMSHEARLGIKPHIQRLLDQGILVPCQSPWNTPLLPVKKPGTNDYRPVQDLREVNKRVEDIHPTVPNPYNLLSGLPPSHQWYTVLDLKDAFFCLRLHPTSQPLFAFEWRDPGMGISGQLTWTRLPQGFKNSPTLFNEALHRDLADFRIQHPDLILLQYVDDILLAATSELDCQQGTRALLQTLGDLGYRASAKKAQICQKQVKYLGYLLREGQRWLTEARKETVMGQPVPKTPRQLREFLGKAGFCRLFIPGFAEMAAPLYPLTKPGTLFSWGPDQQKAYQEIKQALLTAPALGLPDLTKPFELFVDEKQGYAKGVLTQKLGPWRRPVAYLSKKLDPVAAGWPPCLRMVAAIAVLTKDAGKLTMGQPLVILAPHAVEALVKQPPDRWLSNARMTHYQAMLLDTDRVQFGPVVALNPATLLPLPEEGAPHDCLEILAETHGTRPDLTDQPIPDADHTWYTDGSSFLQEGQRKAGAAVTTETEVIWAGALPAGTSAQRAELIALTQALKMAEGKRLNVYTDSRYAFATAHIHGEIYRRRGWLTSEGREIKNKSEILALLKALFLPKRLSIIHCLGHQKGDSAEARGNRLADQAAREAAIKTPPDTSTLLIAGKRTADGSEFEKRTADGSEFESPKKKAKVE

SEQ ID NO: 2051 - protein, 2094 aa, synthetic construct
MPAAKRVKLDGGDKKYSIGLDIGTNSVGWAVITDEYKVPSKKFKVLGNTDRHSIKKNLIGALLFDSGETAEATRLKRTARRRYTRRKNRICYLQEIFSNEMAKVDDSFFHRLEESFLVEEDKKHERHPIFGNIVDEVAYHEKYPTIYHLRKKLVDSTDKADLRLIYLALAHMIKFRGHFLIEGDLNPDNSDVDKLFIQLVQTYNQLFEENPINASGVDAKAILSARLSKSRRLENLIAQLPGEKKNGLFGNLIALSLGLTPNFKSNFDLAEDAKLQLSKDTYDDDLDNLLAQIGDQYADLFLAAKNLSDAILLSDILRVNTEITKAPLSASMIKRYDEHHQDLTLLKALVRQQLPEKYKEIFFDQSKNGYAGYIDGGASQEEFYKFIKPILEKMDGTEELLVKLNREDLLRKQRTFDNGSIPHQIHLGELHAILRRQEDFYPFLKDNREKIEKILTFRIPYYVGPLARGNSRFAWMTRKSEETITPWNFEEVVDKGASAQSFIERMTNFDKNLPNEKVLPKHSLLYEYFTVYNELTKVKYVTEGMRKPAFLSGEQKKAIVDLLFKTNRKVTVKQLKEDYFKKIECFDSVEISGVEDRFNASLGTYHDLLKIIKDKDFLDNEENEDILEDIVLTLTLFEDREMIEERLKTYAHLFDDKVMKQLKRRRYTGWGRLSRKLINGIRDKQSGKTILDFLKSDGFANRNFMQLIHDDSLTFKEDIQKAQVSGQGDSLHEHIANLAGSPAIKKGILQTVKVVDELVKVMGRHKPENIVIEMARENQTTQKGQKNSRERMKRIEEGIKELGSQILKEHPVENTQLQNEKLYLYYLQNGRDMYVDQELDINRLSDYDVDHIVPQSFLKDDSIDNKVLTRSDKARGKSDNVPSEEVVKKMKNYWRQLLNAKLITQRKFDNLTKAERGGLSELDKAGFIKRQLVETRQITKHVAQILDSRMNTKYDENDKLIREVKVITLKSKLVSDFRKDFQFYKVREINNYHHAHDAYLNAVVGTALIKKYPKLESEFVYGDYKVYDVRKMIAKSEQEIGKATAKYFFYSNIMNFFKTEITLANGEIRKRPLIETNGETGEIVWDKGRDFATVRKVLSMPQVNIVKKTEVQTGGFSKESILPKRNSDKLIARKKDWDPKKYGGFDSPTVAYSVLVVAKVEKGKSKKLKSVKELLGITIMERSSFEKNPIDFLEAKGYKEVKKDLIIKLPKYSLFELENGRKRMLASAGELQKGNELALPSKYVNFLYLASHYEKLKGSPEDNEQKQLFVEQHKHYLDEIIEQISEFSKRVILADANLDKVLSAYNKHRDKPIREQAENIIHLFTLTNLGAPAAFKYFDTTIDRKRYTSTKEVLDATLIHQSITGLYETRIDLSQLGGDGGGGSPAPGSSGGLGIEDEYRLHETSTEPDVSLGSTWLSDFPQAWAETGGMGLAVRQAPLIIPLKATSTPVSIQQYPMSHEARLGIKPHIQRLLDQGILVPCQSPWNTPLLPVKKPGTNDYRPVQDLREVNKRVEDIHPTVPNPYNLLSGLPPSHQWYTVLDLKDAFFCLRLHPTSQPLFAFEWRDPGMGISGQLTWTRLPQGFKNSPTLFNEALHRDLADFRIQHPDLILLQYVDDILLAATSELDCQQGTRALLQTLGDLGYRASAKKAQICQKQVKYLGYLLREGQRWLTEARKETVMGQPVPKTPRQLREFLGKAGFCRLFIPGFAEMAAPLYPLTKPGTLFSWGPDQQKAYQEIKQALLTAPALGLPDLTKPFELFVDEKQGYAKGVLTQKLGPWRRPVAYLSKKLDPVAAGWPPCLRMVAAIAVLTKDAGKLTMGQPLVILAPHAVEALVKQPPDRWLSNARMTHYQAMLLDTDRVQFGPVVALNPATLLPLPEEGAPHDCLEILAETHGTRPDLTDQPIPDADHTWYTDGSSFLQEGQRKAGAAVTTETEVIWAGALPAGTSAQRAELIALTQALKMAEGKRLNVYTDSRYAFATAHIHGEIYRRRGWLTSEGREIKNKSEILALLKALFLPKRLSIIHCLGHQKGDSAEARGNRLADQAAREAAIKTPPDTSTLLIAGKRTADGSEFEKRTADGSEFESPKKKAKVE

SEQ ID NO: 2052 - protein, 2096 aa, synthetic construct
MPAAKRVKLDGGDKKYSIGLDIGTNSVGWAVITDEYKVPSKKFKVLGNTDRHSIKKNLIGALLFDSGETAEATRLKRTARRRYTRRKNRICYLQEIFSNEMAKVDDSFFHRLEESFLVEEDKKHERHPIFGNIVDEVAYHEKYPTIYHLRKKLVDSTDKADLRLIYLALAHMIKFRGHFLIEGDLNPDNSDVDKLFIQLVQTYNQLFEENPINASGVDAKAILSARLSKSRRLENLIAQLPGEKKNGLFGNLIALSLGLTPNFKSNFDLAEDAKLQLSKDTYDDDLDNLLAQIGDQYADLFLAAKNLSDAILLSDILRVNTEITKAPLSASMIKRYDEHHQDLTLLKALVRQQLPEKYKEIFFDQSKNGYAGYIDGGASQEEFYKFIKPILEKMDGTEELLVKLNREDLLRKQRTFDNGSIPHQIHLGELHAILRRQEDFYPFLKDNREKIEKILTFRIPYYVGPLARGNSRFAWMTRKSEETITPWNFEEVVDKGASAQSFIERMTNFDKNLPNEKVLPKHSLLYEYFTVYNELTKVKYVTEGMRKPAFLSGEQKKAIVDLLFKTNRKVTVKQLKEDYFKKIECFDSVEISGVEDRFNASLGTYHDLLKIIKDKDFLDNEENEDILEDIVLTLTLFEDREMIEERLKTYAHLFDDKVMKQLKRRRYTGWGRLSRKLINGIRDKQSGKTILDFLKSDGFANRNFMQLIHDDSLTFKEDIQKAQVSGQGDSLHEHIANLAGSPAIKKGILQTVKVVDELVKVMGRHKPENIVIEMARENQTTQKGQKNSRERMKRIEEGIKELGSQILKEHPVENTQLQNEKLYLYYLQNGRDMYVDQELDINRLSDYDVDHIVPQSFLKDDSIDNKVLTRSDKARGKSDNVPSEEVVKKMKNYWRQLLNAKLITQRKFDNLTKAERGGLSELDKAGFIKRQLVETRQITKHVAQILDSRMNTKYDENDKLIREVKVITLKSKLVSDFRKDFQFYKVREINNYHHAHDAYLNAVVGTALIKKYPKLESEFVYGDYKVYDVRKMIAKSEQEIGKATAKYFFYSNIMNFFKTEITLANGEIRKRPLIETNGETGEIVWDKGRDFATVRKVLSMPQVNIVKKTEVQTGGFSKESILPKRNSDKLIARKKDWDPKKYGGFDSPTVAYSVLVVAKVEKGKSKKLKSVKELLGITIMERSSFEKNPIDFLEAKGYKEVKKDLIIKLPKYSLFELENGRKRMLASAGELQKGNELALPSKYVNFLYLASHYEKLKGSPEDNEQKQLFVEQHKHYLDEIIEQISEFSKRVILADANLDKVLSAYNKHRDKPIREQAENIIHLFTLTNLGAPAAFKYFDTTIDRKRYTSTKEVLDATLIHQSITGLYETRIDLSQLGGDGGEAAAKGSSPAPGGLGIEDEYRLHETSTEPDVSLGSTWLSDFPQAWAETGGMGLAVRQAPLIIPLKATSTPVSIQQYPMSHEARLGIKPHIQRLLDQGILVPCQSPWNTPLLPVKKPGTNDYRPVQDLREVNKRVEDIHPTVPNPYNLLSGLPPSHQWYTVLDLKDAFFCLRLHPTSQPLFAFEWRDPGMGISGQLTWTRLPQGFKNSPTLFNEALHRDLADFRIQHPDLILLQYVDDILLAATSELDCQQGTRALLQTLGDLGYRASAKKAQICQKQVKYLGYLLREGQRWLTEARKETVMGQPVPKTPRQLREFLGKAGFCRLFIPGFAEMAAPLYPLTKPGTLFSWGPDQQKAYQEIKQALLTAPALGLPDLTKPFELFVDEKQGYAKGVLTQKLGPWRRPVAYLSKKLDPVAAGWPPCLRMVAAIAVLTKDAGKLTMGQPLVILAPHAVEALVKQPPDRWLSNARMTHYQAMLLDTDRVQFGPVVALNPATLLPLPEEGAPHDCLEILAETHGTRPDLTDQPIPDADHTWYTDGSSFLQEGQRKAGAAVTTETEVIWAGALPAGTSAQRAELIALTQALKMAEGKRLNVYTDSRYAFATAHIHGEIYRRRGWLTSEGREIKNKSEILALLKALFLPKRLSIIHCLGHQKGDSAEARGNRLADQAAREAAIKTPPDTSTLLIAGKRTADGSEFEKRTADGSEFESPKKKAKVE

SEQ ID NO: 2053 - protein, 2088 aa, synthetic construct
MPAAKRVKLDGGDKKYSIGLDIGTNSVGWAVITDEYKVPSKKFKVLGNTDRHSIKKNLIGALLFDSGETAEATRLKRTARRRYTRRKNRICYLQEIFSNEMAKVDDSFFHRLEESFLVEEDKKHERHPIFGNIVDEVAYHEKYPTIYHLRKKLVDSTDKADLRLIYLALAHMIKFRGHFLIEGDLNPDNSDVDKLFIQLVQTYNQLFEENPINASGVDAKAILSARLSKSRRLENLIAQLPGEKKNGLFGNLIALSLGLTPNFKSNFDLAEDAKLQLSKDTYDDDLDNLLAQIGDQYADLFLAAKNLSDAILLSDILRVNTEITKAPLSASMIKRYDEHHQDLTLLKALVRQQLPEKYKEIFFDQSKNGYAGYIDGGASQEEFYKFIKPILEKMDGTEELLVKLNREDLLRKQRTFDNGSIPHQIHLGELHAILRRQEDFYPFLKDNREKIEKILTFRIPYYVGPLARGNSRFAWMTRKSEETITPWNFEEVVDKGASAQSFIERMTNFDKNLPNEKVLPKHSLLYEYFTVYNELTKVKYVTEGMRKPAFLSGEQKKAIVDLLFKTNRKVTVKQLKEDYFKKIECFDSVEISGVEDRFNASLGTYHDLLKIIKDKDFLDNEENEDILEDIVLTLTLFEDREMIEERLKTYAHLFDDKVMKQLKRRRYTGWGRLSRKLINGIRDKQSGKTILDFLKSDGFANRNFMQLIHDDSLTFKEDIQKAQVSGQGDSLHEHIANLAGSPAIKKGILQTVKVVDELVKVMGRHKPENIVIEMARENQTTQKGQKNSRERMKRIEEGIKELGSQILKEHPVENTQLQNEKLYLYYLQNGRDMYVDQELDINRLSDYDVDHIVPQSFLKDDSIDNKVLTRSDKARGKSDNVPSEEVVKKMKNYWRQLLNAKLITQRKFDNLTKAERGGLSELDKAGFIKRQLVETRQITKHVAQILDSRMNTKYDENDKLIREVKVITLKSKLVSDFRKDFQFYKVREINNYHHAHDAYLNAVVGTALIKKYPKLESEFVYGDYKVYDVRKMIAKSEQEIGKATAKYFFYSNIMNFFKTEITLANGEIRKRPLIETNGETGEIVWDKGRDFATVRKVLSMPQVNIVKKTEVQTGGFSKESILPKRNSDKLIARKKDWDPKKYGGFDSPTVAYSVLVVAKVEKGKSKKLKSVKELLGITIMERSSFEKNPIDFLEAKGYKEVKKDLIIKLPKYSLFELENGRKRMLASAGELQKGNELALPSKYVNFLYLASHYEKLKGSPEDNEQKQLFVEQHKHYLDEIIEQISEFSKRVILADANLDKVLSAYNKHRDKPIREQAENIIHLFTLTNLGAPAAFKYFDTTIDRKRYTSTKEVLDATLIHQSITGLYETRIDLSQLGGDGGGSSGGLGIEDEYRLHETSTEPDVSLGSTWLSDFPQAWAETGGMGLAVRQAPLIIPLKATSTPVSIQQYPMSHEARLGIKPHIQRLLDQGILVPCQSPWNTPLLPVKKPGTNDYRPVQDLREVNKRVEDIHPTVPNPYNLLSGLPPSHQWYTVLDLKDAFFCLRLHPTSQPLFAFEWRDPGMGISGQLTWTRLPQGFKNSPTLFNEALHRDLADFRIQHPDLILLQYVDDILLAATSELDCQQGTRALLQTLGDLGYRASAKKAQICQKQVKYLGYLLREGQRWLTEARKETVMGQPVPKTPRQLREFLGKAGFCRLFIPGFAEMAAPLYPLTKPGTLFSWGPDQQKAYQEIKQALLTAPALGLPDLTKPFELFVDEKQGYAKGVLTQKLGPWRRPVAYLSKKLDPVAAGWPPCLRMVAAIAVLTKDAGKLTMGQPLVILAPHAVEALVKQPPDRWLSNARMTHYQAMLLDTDRVQFGPVVALNPATLLPLPEEGAPHDCLEILAETHGTRPDLTDQPIPDADHTWYTDGSSFLQEGQRKAGAAVTTETEVIWAGALPAGTSAQRAELIALTQALKMAEGKRLNVYTDSRYAFATAHIHGEIYRRRGWLTSEGREIKNKSEILALLKALFLPKRLSIIHCLGHQKGDSAEARGNRLADQAAREAAIKTPPDTSTLLIAGKRTADGSEFEKRTADGSEFESPKKKAKVE

SEQ ID NO: 2054 - protein, 2096 aa, synthetic construct
MPAAKRVKLDGGDKKYSIGLDIGTNSVGWAVITDEYKVPSKKFKVLGNTDRHSIKKNLIGALLFDSGETAEATRLKRTARRRYTRRKNRICYLQEIFSNEMAKVDDSFFHRLEESFLVEEDKKHERHPIFGNIVDEVAYHEKYPTIYHLRKKLVDSTDKADLRLIYLALAHMIKFRGHFLIEGDLNPDNSDVDKLFIQLVQTYNQLFEENPINASGVDAKAILSARLSKSRRLENLIAQLPGEKKNGLFGNLIALSLGLTPNFKSNFDLAEDAKLQLSKDTYDDDLDNLLAQIGDQYADLFLAAKNLSDAILLSDILRVNTEITKAPLSASMIKRYDEHHQDLTLLKALVRQQLPEKYKEIFFDQSKNGYAGYIDGGASQEEFYKFIKPILEKMDGTEELLVKLNREDLLRKQRTFDNGSIPHQIHLGELHAILRRQEDFYPFLKDNREKIEKILTFRIPYYVGPLARGNSRFAWMTRKSEETITPWNFEEVVDKGASAQSFIERMTNFDKNLPNEKVLPKHSLLYEYFTVYNELTKVKYVTEGMRKPAFLSGEQKKAIVDLLFKTNRKVTVKQLKEDYFKKIECFDSVEISGVEDRFNASLGTYHDLLKIIKDKDFLDNEENEDILEDIVLTLTLFEDREMIEERLKTYAHLFDDKVMKQLKRRRYTGWGRLSRKLINGIRDKQSGKTILDFLKSDGFANRNFMQLIHDDSLTFKEDIQKAQVSGQGDSLHEHIANLAGSPAIKKGILQTVKVVDELVKVMGRHKPENIVIEMARENQTTQKGQKNSRERMKRIEEGIKELGSQILKEHPVENTQLQNEKLYLYYLQNGRDMYVDQELDINRLSDYDVDHIVPQSFLKDDSIDNKVLTRSDKARGKSDNVPSEEVVKKMKNYWRQLLNAKLITQRKFDNLTKAERGGLSELDKAGFIKRQLVETRQITKHVAQILDSRMNTKYDENDKLIREVKVITLKSKLVSDFRKDFQFYKVREINNYHHAHDAYLNAVVGTALIKKYPKLESEFVYGDYKVYDVRKMIAKSEQEIGKATAKYFFYSNIMNFFKTEITLANGEIRKRPLIETNGETGEIVWDKGRDFATVRKVLSMPQVNIVKKTEVQTGGFSKESILPKRNSDKLIARKKDWDPKKYGGFDSPTVAYSVLVVAKVEKGKSKKLKSVKELLGITIMERSSFEKNPIDFLEAKGYKEVKKDLIIKLPKYSLFELENGRKRMLASAGELQKGNELALPSKYVNFLYLASHYEKLKGSPEDNEQKQLFVEQHKHYLDEIIEQISEFSKRVILADANLDKVLSAYNKHRDKPIREQAENIIHLFTLTNLGAPAAFKYFDTTIDRKRYTSTKEVLDATLIHQSITGLYETRIDLSQLGGDGGEAAAKGGGPAPGGLGIEDEYRLHETSTEPDVSLGSTWLSDFPQAWAETGGMGLAVRQAPLIIPLKATSTPVSIQQYPMSHEARLGIKPHIQRLLDQGILVPCQSPWNTPLLPVKKPGTNDYRPVQDLREVNKRVEDIHPTVPNPYNLLSGLPPSHQWYTVLDLKDAFFCLRLHPTSQPLFAFEWRDPGMGISGQLTWTRLPQGFKNSPTLFNEALHRDLADFRIQHPDLILLQYVDDILLAATSELDCQQGTRALLQTLGDLGYRASAKKAQICQKQVKYLGYLLREGQRWLTEARKETVMGQPVPKTPRQLREFLGKAGFCRLFIPGFAEMAAPLYPLTKPGTLFSWGPDQQKAYQEIKQALLTAPALGLPDLTKPFELFVDEKQGYAKGVLTQKLGPWRRPVAYLSKKLDPVAAGWPPCLRMVAAIAVLTKDAGKLTMGQPLVILAPHAVEALVKQPPDRWLSNARMTHYQAMLLDTDRVQFGPVVALNPATLLPLPEEGAPHDCLEILAETHGTRPDLTDQPIPDADHTWYTDGSSFLQEGQRKAGAAVTTETEVIWAGALPAGTSAQRAELIALTQALKMAEGKRLNVYTDSRYAFATAHIHGEIYRRRGWLTSEGREIKNKSEILALLKALFLPKRLSIIHCLGHQKGDSAEARGNRLADQAAREAAIKTPPDTSTLLIAGKRTADGSEFEKRTADGSEFESPKKKAKVE

SEQ ID NO: 2055 - protein, 2096 aa, synthetic construct
MPAAKRVKLDGGDKKYSIGLDIGTNSVGWAVITDEYKVPSKKFKVLGNTDRHSIKKNLIGALLFDSGETAEATRLKRTARRRYTRRKNRICYLQEIFSNEMAKVDDSFFHRLEESFLVEEDKKHERHPIFGNIVDEVAYHEKYPTIYHLRKKLVDSTDKADLRLIYLALAHMIKFRGHFLIEGDLNPDNSDVDKLFIQLVQTYNQLFEENPINASGVDAKAILSARLSKSRRLENLIAQLPGEKKNGLFGNLIALSLGLTPNFKSNFDLAEDAKLQLSKDTYDDDLDNLLAQIGDQYADLFLAAKNLSDAILLSDILRVNTEITKAPLSASMIKRYDEHHQDLTLLKALVRQQLPEKYKEIFFDQSKNGYAGYIDGGASQEEFYKFIKPILEKMDGTEELLVKLNREDLLRKQRTFDNGSIPHQIHLGELHAILRRQEDFYPFLKDNREKIEKILTFRIPYYVGPLARGNSRFAWMTRKSEETITPWNFEEVVDKGASAQSFIERMTNFDKNLPNEKVLPKHSLLYEYFTVYNELTKVKYVTEGMRKPAFLSGEQKKAIVDLLFKTNRKVTVKQLKEDYFKKIECFDSVEISGVEDRFNASLGTYHDLLKIIKDKDFLDNEENEDILEDIVLTLTLFEDREMIEERLKTYAHLFDDKVMKQLKRRRYTGWGRLSRKLINGIRDKQSGKTILDFLKSDGFANRNFMQLIHDDSLTFKEDIQKAQVSGQGDSLHEHIANLAGSPAIKKGILQTVKVVDELVKVMGRHKPENIVIEMARENQTTQKGQKNSRERMKRIEEGIKELGSQILKEHPVENTQLQNEKLYLYYLQNGRDMYVDQELDINRLSDYDVDHIVPQSFLKDDSIDNKVLTRSDKARGKSDNVPSEEVVKKMKNYWRQLLNAKLITQRKFDNLTKAERGGLSELDKAGFIKRQLVETRQITKHVAQILDSRMNTKYDENDKLIREVKVITLKSKLVSDFRKDFQFYKVREINNYHHAHDAYLNAVVGTALIKKYPKLESEFVYGDYKVYDVRKMIAKSEQEIGKATAKYFFYSNIMNFFKTEITLANGEIRKRPLIETNGETGEIVWDKGRDFATVRKVLSMPQVNIVKKTEVQTGGFSKESILPKRNSDKLIARKKDWDPKKYGGFDSPTVAYSVLVVAKVEKGKSKKLKSVKELLGITIMERSSFEKNPIDFLEAKGYKEVKKDLIIKLPKYSLFELENGRKRMLASAGELQKGNELALPSKYVNFLYLASHYEKLKGSPEDNEQKQLFVEQHKHYLDEIIEQISEFSKRVILADANLDKVLSAYNKHRDKPIREQAENIIHLFTLTNLGAPAAFKYFDTTIDRKRYTSTKEVLDATLIHQSITGLYETRIDLSQLGGDGGEAAAKGGSGSSGGLGIEDEYRLHETSTEPDVSLGSTWLSDFPQAWAETGGMGLAVRQAPLIIPLKATSTPVSIQQYPMSHEARLGIKPHIQRLLDQGILVPCQSPWNTPLLPVKKPGTNDYRPVQDLREVNKRVEDIHPTVPNPYNLLSGLPPSHQWYTVLDLKDAFFCLRLHPTSQPLFAFEWRDPGMGISGQLTWTRLPQGFKNSPTLFNEALHRDLADFRIQHPDLILLQYVDDILLAATSELDCQQGTRALLQTLGDLGYRASAKKAQICQKQVKYLGYLLREGQRWLTEARKETVMGQPVPKTPRQLREFLGKAGFCRLFIPGFAEMAAPLYPLTKPGTLFSWGPDQQKAYQEIKQALLTAPALGLPDLTKPFELFVDEKQGYAKGVLTQKLGPWRRPVAYLSKKLDPVAAGWPPCLRMVAAIAVLTKDAGKLTMGQPLVILAPHAVEALVKQPPDRWLSNARMTHYQAMLLDTDRVQFGPVVALNPATLLPLPEEGAPHDCLEILAETHGTRPDLTDQPIPDADHTWYTDGSSFLQEGQRKAGAAVTTETEVIWAGALPAGTSAQRAELIALTQALKMAEGKRLNVYTDSRYAFATAHIHGEIYRRRGWLTSEGREIKNKSEILALLKALFLPKRLSIIHCLGHQKGDSAEARGNRLADQAAREAAIKTPPDTSTLLIAGKRTADGSEFEKRTADGSEFESPKKKAKVE

SEQ ID NO: 2056 - protein, 2097 aa, synthetic construct
MPAAKRVKLDGGDKKYSIGLDIGTNSVGWAVITDEYKVPSKKFKVLGNTDRHSIKKNLIGALLFDSGETAEATRLKRTARRRYTRRKNRICYLQEIFSNEMAKVDDSFFHRLEESFLVEEDKKHERHPIFGNIVDEVAYHEKYPTIYHLRKKLVDSTDKADLRLIYLALAHMIKFRGHFLIEGDLNPDNSDVDKLFIQLVQTYNQLFEENPINASGVDAKAILSARLSKSRRLENLIAQLPGEKKNGLFGNLIALSLGLTPNFKSNFDLAEDAKLQLSKDTYDDDLDNLLAQIGDQYADLFLAAKNLSDAILLSDILRVNTEITKAPLSASMIKRYDEHHQDLTLLKALVRQQLPEKYKEIFFDQSKNGYAGYIDGGASQEEFYKFIKPILEKMDGTEELLVKLNREDLLRKQRTFDNGSIPHQIHLGELHAILRRQEDFYPFLKDNREKIEKILTFRIPYYVGPLARGNSRFAWMTRKSEETITPWNFEEVVDKGASAQSFIERMTNFDKNLPNEKVLPKHSLLYEYFTVYNELTKVKYVTEGMRKPAFLSGEQKKAIVDLLFKTNRKVTVKQLKEDYFKKIECFDSVEISGVEDRFNASLGTYHDLLKIIKDKDFLDNEENEDILEDIVLTLTLFEDREMIEERLKTYAHLFDDKVMKQLKRRRYTGWGRLSRKLINGIRDKQSGKTILDFLKSDGFANRNFMQLIHDDSLTFKEDIQKAQVSGQGDSLHEHIANLAGSPAIKKGILQTVKVVDELVKVMGRHKPENIVIEMARENQTTQKGQKNSRERMKRIEEGIKELGSQILKEHPVENTQLQNEKLYLYYLQNGRDMYVDQELDINRLSDYDVDHIVPQSFLKDDSIDNKVLTRSDKARGKSDNVPSEEVVKKMKNYWRQLLNAKLITQRKFDNLTKAERGGLSELDKAGFIKRQLVETRQITKHVAQILDSRMNTKYDENDKLIREVKVITLKSKLVSDFRKDFQFYKVREINNYHHAHDAYLNAVVGTALIKKYPKLESEFVYGDYKVYDVRKMIAKSEQEIGKATAKYFFYSNIMNFFKTEITLANGEIRKRPLIETNGETGEIVWDKGRDFATVRKVLSMPQVNIVKKTEVQTGGFSKESILPKRNSDKLIARKKDWDPKKYGGFDSPTVAYSVLVVAKVEKGKSKKLKSVKELLGITIMERSSFEKNPIDFLEAKGYKEVKKDLIIKLPKYSLFELENGRKRMLASAGELQKGNELALPSKYVNFLYLASHYEKLKGSPEDNEQKQLFVEQHKHYLDEIIEQISEFSKRVILADANLDKVLSAYNKHRDKPIREQAENIIHLFTLTNLGAPAAFKYFDTTIDRKRYTSTKEVLDATLIHQSITGLYETRIDLSQLGGDGGGSAGSAAGSGEFGGLGIEDEYRLHETSTEPDVSLGSTWLSDFPQAWAETGGMGLAVRQAPLIIPLKATSTPVSIQQYPMSHEARLGIKPHIQRLLDQGILVPCQSPWNTPLLPVKKPGTNDYRPVQDLREVNKRVEDIHPTVPNPYNLLSGLPPSHQWYTVLDLKDAFFCLRLHPTSQPLFAFEWRDPGMGISGQLTWTRLPQGFKNSPTLFNEALHRDLADFRIQHPDLILLQYVDDILLAATSELDCQQGTRALLQTLGDLGYRASAKKAQICQKQVKYLGYLLREGQRWLTEARKETVMGQPVPKTPRQLREFLGKAGFCRLFIPGFAEMAAPLYPLTKPGTLFSWGPDQQKAYQEIKQALLTAPALGLPDLTKPFELFVDEKQGYAKGVLTQKLGPWRRPVAYLSKKLDPVAAGWPPCLRMVAAIAVLTKDAGKLTMGQPLVILAPHAVEALVKQPPDRWLSNARMTHYQAMLLDTDRVQFGPVVALNPATLLPLPEEGAPHDCLEILAETHGTRPDLTDQPIPDADHTWYTDGSSFLQEGQRKAGAAVTTETEVIWAGALPAGTSAQRAELIALTQALKMAEGKRLNVYTDSRYAFATAHIHGEIYRRRGWLTSEGREIKNKSEILALLKALFLPKRLSIIHCLGHQKGDSAEARGNRLADQAAREAAIKTPPDTSTLLIAGKRTADGSEFEKRTADGSEFESPKKKAKVE

SEQ ID NO: 2057 - protein, 2091 aa, synthetic construct
MPAAKRVKLDGGDKKYSIGLDIGTNSVGWAVITDEYKVPSKKFKVLGNTDRHSIKKNLIGALLFDSGETAEATRLKRTARRRYTRRKNRICYLQEIFSNEMAKVDDSFFHRLEESFLVEEDKKHERHPIFGNIVDEVAYHEKYPTIYHLRKKLVDSTDKADLRLIYLALAHMIKFRGHFLIEGDLNPDNSDVDKLFIQLVQTYNQLFEENPINASGVDAKAILSARLSKSRRLENLIAQLPGEKKNGLFGNLIALSLGLTPNFKSNFDLAEDAKLQLSKDTYDDDLDNLLAQIGDQYADLFLAAKNLSDAILLSDILRVNTEITKAPLSASMIKRYDEHHQDLTLLKALVRQQLPEKYKEIFFDQSKNGYAGYIDGGASQEEFYKFIKPILEKMDGTEELLVKLNREDLLRKQRTFDNGSIPHQIHLGELHAILRRQEDFYPFLKDNREKIEKILTFRIPYYVGPLARGNSRFAWMTRKSEETITPWNFEEVVDKGASAQSFIERMTNFDKNLPNEKVLPKHSLLYEYFTVYNELTKVKYVTEGMRKPAFLSGEQKKAIVDLLFKTNRKVTVKQLKEDYFKKIECFDSVEISGVEDRFNASLGTYHDLLKIIKDKDFLDNEENEDILEDIVLTLTLFEDREMIEERLKTYAHLFDDKVMKQLKRRRYTGWGRLSRKLINGIRDKQSGKTILDFLKSDGFANRNFMQLIHDDSLTFKEDIQKAQVSGQGDSLHEHIANLAGSPAIKKGILQTVKVVDELVKVMGRHKPENIVIEMARENQTTQKGQKNSRERMKRIEEGIKELGSQILKEHPVENTQLQNEKLYLYYLQNGRDMYVDQELDINRLSDYDVDHIVPQSFLKDDSIDNKVLTRSDKARGKSDNVPSEEVVKKMKNYWRQLLNAKLITQRKFDNLTKAERGGLSELDKAGFIKRQLVETRQITKHVAQILDSRMNTKYDENDKLIREVKVITLKSKLVSDFRKDFQFYKVREINNYHHAHDAYLNAVVGTALIKKYPKLESEFVYGDYKVYDVRKMIAKSEQEIGKATAKYFFYSNIMNFFKTEITLANGEIRKRPLIETNGETGEIVWDKGRDFATVRKVLSMPQVNIVKKTEVQTGGFSKESILPKRNSDKLIARKKDWDPKKYGGFDSPTVAYSVLVVAKVEKGKSKKLKSVKELLGITIMERSSFEKNPIDFLEAKGYKEVKKDLIIKLPKYSLFELENGRKRMLASAGELQKGNELALPSKYVNFLYLASHYEKLKGSPEDNEQKQLFVEQHKHYLDEIIEQISEFSKRVILADANLDKVLSAYNKHRDKPIREQAENIIHLFTLTNLGAPAAFKYFDTTIDRKRYTSTKEVLDATLIHQSITGLYETRIDLSQLGGDGGPAPGSSGGLGIEDEYRLHETSTEPDVSLGSTWLSDFPQAWAETGGMGLAVRQAPLIIPLKATSTPVSIQQYPMSHEARLGIKPHIQRLLDQGILVPCQSPWNTPLLPVKKPGTNDYRPVQDLREVNKRVEDIHPTVPNPYNLLSGLPPSHQWYTVLDLKDAFFCLRLHPTSQPLFAFEWRDPGMGISGQLTWTRLPQGFKNSPTLFNEALHRDLADFRIQHPDLILLQYVDDILLAATSELDCQQGTRALLQTLGDLGYRASAKKAQICQKQVKYLGYLLREGQRWLTEARKETVMGQPVPKTPRQLREFLGKAGFCRLFIPGFAEMAAPLYPLTKPGTLFSWGPDQQKAYQEIKQALLTAPALGLPDLTKPFELFVDEKQGYAKGVLTQKLGPWRRPVAYLSKKLDPVAAGWPPCLRMVAAIAVLTKDAGKLTMGQPLVILAPHAVEALVKQPPDRWLSNARMTHYQAMLLDTDRVQFGPVVALNPATLLPLPEEGAPHDCLEILAETHGTRPDLTDQPIPDADHTWYTDGSSFLQEGQRKAGAAVTTETEVIWAGALPAGTSAQRAELIALTQALKMAEGKRLNVYTDSRYAFATAHIHGEIYRRRGWLTSEGREIKNKSEILALLKALFLPKRLSIIHCLGHQKGDSAEARGNRLADQAAREAAIKTPPDTSTLLIAGKRTADGSEFEKRTADGSEFESPKKKAKVE

SEQ ID NO: 2058 - protein, 2094 aa, synthetic construct
MPAAKRVKLDGGDKKYSIGLDIGTNSVGWAVITDEYKVPSKKFKVLGNTDRHSIKKNLIGALLFDSGETAEATRLKRTARRRYTRRKNRICYLQEIFSNEMAKVDDSFFHRLEESFLVEEDKKHERHPIFGNIVDEVAYHEKYPTIYHLRKKLVDSTDKADLRLIYLALAHMIKFRGHFLIEGDLNPDNSDVDKLFIQLVQTYNQLFEENPINASGVDAKAILSARLSKSRRLENLIAQLPGEKKNGLFGNLIALSLGLTPNFKSNFDLAEDAKLQLSKDTYDDDLDNLLAQIGDQYADLFLAAKNLSDAILLSDILRVNTEITKAPLSASMIKRYDEHHQDLTLLKALVRQQLPEKYKEIFFDQSKNGYAGYIDGGASQEEFYKFIKPILEKMDGTEELLVKLNREDLLRKQRTFDNGSIPHQIHLGELHAILRRQEDFYPFLKDNREKIEKILTFRIPYYVGPLARGNSRFAWMTRKSEETITPWNFEEVVDKGASAQSFIERMTNFDKNLPNEKVLPKHSLLYEYFTVYNELTKVKYVTEGMRKPAFLSGEQKKAIVDLLFKTNRKVTVKQLKEDYFKKIECFDSVEISGVEDRFNASLGTYHDLLKIIKDKDFLDNEENEDILEDIVLTLTLFEDREMIEERLKTYAHLFDDKVMKQLKRRRYTGWGRLSRKLINGIRDKQSGKTILDFLKSDGFANRNFMQLIHDDSLTFKEDIQKAQVSGQGDSLHEHIANLAGSPAIKKGILQTVKVVDELVKVMGRHKPENIVIEMARENQTTQKGQKNSRERMKRIEEGIKELGSQILKEHPVENTQLQNEKLYLYYLQNGRDMYVDQELDINRLSDYDVDHIVPQSFLKDDSIDNKVLTRSDKARGKSDNVPSEEVVKKMKNYWRQLLNAKLITQRKFDNLTKAERGGLSELDKAGFIKRQLVETRQITKHVAQILDSRMNTKYDENDKLIREVKVITLKSKLVSDFRKDFQFYKVREINNYHHAHDAYLNAVVGTALIKKYPKLESEFVYGDYKVYDVRKMIAKSEQEIGKATAKYFFYSNIMNFFKTEITLANGEIRKRPLIETNGETGEIVWDKGRDFATVRKVLSMPQVNIVKKTEVQTGGFSKESILPKRNSDKLIARKKDWDPKKYGGFDSPTVAYSVLVVAKVEKGKSKKLKSVKELLGITIMERSSFEKNPIDFLEAKGYKEVKKDLIIKLPKYSLFELENGRKRMLASAGELQKGNELALPSKYVNFLYLASHYEKLKGSPEDNEQKQLFVEQHKHYLDEIIEQISEFSKRVILADANLDKVLSAYNKHRDKPIREQAENIIHLFTLTNLGAPAAFKYFDTTIDRKRYTSTKEVLDATLIHQSITGLYETRIDLSQLGGDGGGGSPAPGGGGGLGIEDEYRLHETSTEPDVSLGSTWLSDFPQAWAETGGMGLAVRQAPLIIPLKATSTPVSIQQYPMSHEARLGIKPHIQRLLDQGILVPCQSPWNTPLLPVKKPGTNDYRPVQDLREVNKRVEDIHPTVPNPYNLLSGLPPSHQWYTVLDLKDAFFCLRLHPTSQPLFAFEWRDPGMGISGQLTWTRLPQGFKNSPTLFNEALHRDLADFRIQHPDLILLQYVDDILLAATSELDCQQGTRALLQTLGDLGYRASAKKAQICQKQVKYLGYLLREGQRWLTEARKETVMGQPVPKTPRQLREFLGKAGFCRLFIPGFAEMAAPLYPLTKPGTLFSWGPDQQKAYQEIKQALLTAPALGLPDLTKPFELFVDEKQGYAKGVLTQKLGPWRRPVAYLSKKLDPVAAGWPPCLRMVAAIAVLTKDAGKLTMGQPLVILAPHAVEALVKQPPDRWLSNARMTHYQAMLLDTDRVQFGPVVALNPATLLPLPEEGAPHDCLEILAETHGTRPDLTDQPIPDADHTWYTDGSSFLQEGQRKAGAAVTTETEVIWAGALPAGTSAQRAELIALTQALKMAEGKRLNVYTDSRYAFATAHIHGEIYRRRGWLTSEGREIKNKSEILALLKALFLPKRLSIIHCLGHQKGDSAEARGNRLADQAAREAAIKTPPDTSTLLIAGKRTADGSEFEKRTADGSEFESPKKKAKVE

SEQ ID NO: 2059 - protein, 2096 aa, synthetic construct
MPAAKRVKLDGGDKKYSIGLDIGTNSVGWAVITDEYKVPSKKFKVLGNTDRHSIKKNLIGALLFDSGETAEATRLKRTARRRYTRRKNRICYLQEIFSNEMAKVDDSFFHRLEESFLVEEDKKHERHPIFGNIVDEVAYHEKYPTIYHLRKKLVDSTDKADLRLIYLALAHMIKFRGHFLIEGDLNPDNSDVDKLFIQLVQTYNQLFEENPINASGVDAKAILSARLSKSRRLENLIAQLPGEKKNGLFGNLIALSLGLTPNFKSNFDLAEDAKLQLSKDTYDDDLDNLLAQIGDQYADLFLAAKNLSDAILLSDILRVNTEITKAPLSASMIKRYDEHHQDLTLLKALVRQQLPEKYKEIFFDQSKNGYAGYIDGGASQEEFYKFIKPILEKMDGTEELLVKLNREDLLRKQRTFDNGSIPHQIHLGELHAILRRQEDFYPFLKDNREKIEKILTFRIPYYVGPLARGNSRFAWMTRKSEETITPWNFEEVVDKGASAQSFIERMTNFDKNLPNEKVLPKHSLLYEYFTVYNELTKVKYVTEGMRKPAFLSGEQKKAIVDLLFKTNRKVTVKQLKEDYFKKIECFDSVEISGVEDRFNASLGTYHDLLKIIKDKDFLDNEENEDILEDIVLTLTLFEDREMIEERLKTYAHLFDDKVMKQLKRRRYTGWGRLSRKLINGIRDKQSGKTILDFLKSDGFANRNFMQLIHDDSLTFKEDIQKAQVSGQGDSLHEHIANLAGSPAIKKGILQTVKVVDELVKVMGRHKPENIVIEMARENQTTQKGQKNSRERMKRIEEGIKELGSQILKEHPVENTQLQNEKLYLYYLQNGRDMYVDQELDINRLSDYDVDHIVPQSFLKDDSIDNKVLTRSDKARGKSDNVPSEEVVKKMKNYWRQLLNAKLITQRKFDNLTKAERGGLSELDKAGFIKRQLVETRQITKHVAQILDSRMNTKYDENDKLIREVKVITLKSKLVSDFRKDFQFYKVREINNYHHAHDAYLNAVVGTALIKKYPKLESEFVYGDYKVYDVRKMIAKSEQEIGKATAKYFFYSNIMNFFKTEITLANGEIRKRPLIETNGETGEIVWDKGRDFATVRKVLSMPQVNIVKKTEVQTGGFSKESILPKRNSDKLIARKKDWDPKKYGGFDSPTVAYSVLVVAKVEKGKSKKLKSVKELLGITIMERSSFEKNPIDFLEAKGYKEVKKDLIIKLPKYSLFELENGRKRMLASAGELQKGNELALPSKYVNFLYLASHYEKLKGSPEDNEQKQLFVEQHKHYLDEIIEQISEFSKRVILADANLDKVLSAYNKHRDKPIREQAENIIHLFTLTNLGAPAAFKYFDTTIDRKRYTSTKEVLDATLIHQSITGLYETRIDLSQLGGDGGGGGGGSEAAAKGGLGIEDEYRLHETSTEPDVSLGSTWLSDFPQAWAETGGMGLAVRQAPLIIPLKATSTPVSIQQYPMSHEARLGIKPHIQRLLDQGILVPCQSPWNTPLLPVKKPGTNDYRPVQDLREVNKRVEDIHPTVPNPYNLLSGLPPSHQWYTVLDLKDAFFCLRLHPTSQPLFAFEWRDPGMGISGQLTWTRLPQGFKNSPTLFNEALHRDLADFRIQHPDLILLQYVDDILLAATSELDCQQGTRALLQTLGDLGYRASAKKAQICQKQVKYLGYLLREGQRWLTEARKETVMGQPVPKTPRQLREFLGKAGFCRLFIPGFAEMAAPLYPLTKPGTLFSWGPDQQKAYQEIKQALLTAPALGLPDLTKPFELFVDEKQGYAKGVLTQKLGPWRRPVAYLSKKLDPVAAGWPPCLRMVAAIAVLTKDAGKLTMGQPLVILAPHAVEALVKQPPDRWLSNARMTHYQAMLLDTDRVQFGPVVALNPATLLPLPEEGAPHDCLEILAETHGTRPDLTDQPIPDADHTWYTDGSSFLQEGQRKAGAAVTTETEVIWAGALPAGTSAQRAELIALTQALKMAEGKRLNVYTDSRYAFATAHIHGEIYRRRGWLTSEGREIKNKSEILALLKALFLPKRLSIIHCLGHQKGDSAEARGNRLADQAAREAAIKTPPDTSTLLIAGKRTADGSEFEKRTADGSEFESPKKKAKVE

SEQ ID NO: 2060 - protein, 2094 aa, synthetic construct
MPAAKRVKLDGGDKKYSIGLDIGTNSVGWAVITDEYKVPSKKFKVLGNTDRHSIKKNLIGALLFDSGETAEATRLKRTARRRYTRRKNRICYLQEIFSNEMAKVDDSFFHRLEESFLVEEDKKHERHPIFGNIVDEVAYHEKYPTIYHLRKKLVDSTDKADLRLIYLALAHMIKFRGHFLIEGDLNPDNSDVDKLFIQLVQTYNQLFEENPINASGVDAKAILSARLSKSRRLENLIAQLPGEKKNGLFGNLIALSLGLTPNFKSNFDLAEDAKLQLSKDTYDDDLDNLLAQIGDQYADLFLAAKNLSDAILLSDILRVNTEITKAPLSASMIKRYDEHHQDLTLLKALVRQQLPEKYKEIFFDQSKNGYAGYIDGGASQEEFYKFIKPILEKMDGTEELLVKLNREDLLRKQRTFDNGSIPHQIHLGELHAILRRQEDFYPFLKDNREKIEKILTFRIPYYVGPLARGNSRFAWMTRKSEETITPWNFEEVVDKGASAQSFIERMTNFDKNLPNEKVLPKHSLLYEYFTVYNELTKVKYVTEGMRKPAFLSGEQKKAIVDLLFKTNRKVTVKQLKEDYFKKIECFDSVEISGVEDRFNASLGTYHDLLKIIKDKDFLDNEENEDILEDIVLTLTLFEDREMIEERLKTYAHLFDDKVMKQLKRRRYTGWGRLSRKLINGIRDKQSGKTILDFLKSDGFANRNFMQLIHDDSLTFKEDIQKAQVSGQGDSLHEHIANLAGSPAIKKGILQTVKVVDELVKVMGRHKPENIVIEMARENQTTQKGQKNSRERMKRIEEGIKELGSQILKEHPVENTQLQNEKLYLYYLQNGRDMYVDQELDINRLSDYDVDHIVPQSFLKDDSIDNKVLTRSDKARGKSDNVPSEEVVKKMKNYWRQLLNAKLITQRKFDNLTKAERGGLSELDKAGFIKRQLVETRQITKHVAQILDSRMNTKYDENDKLIREVKVITLKSKLVSDFRKDFQFYKVREINNYHHAHDAYLNAVVGTALIKKYPKLESEFVYGDYKVYDVRKMIAKSEQEIGKATAKYFFYSNIMNFFKTEITLANGEIRKRPLIETNGETGEIVWDKGRDFATVRKVLSMPQVNIVKKTEVQTGGFSKESILPKRNSDKLIARKKDWDPKKYGGFDSPTVAYSVLVVAKVEKGKSKKLKSVKELLGITIMERSSFEKNPIDFLEAKGYKEVKKDLIIKLPKYSLFELENGRKRMLASAGELQKGNELALPSKYVNFLYLASHYEKLKGSPEDNEQKQLFVEQHKHYLDEIIEQISEFSKRVILADANLDKVLSAYNKHRDKPIREQAENIIHLFTLTNLGAPAAFKYFDTTIDRKRYTSTKEVLDATLIHQSITGLYETRIDLSQLGGDGGGSSPAPGGGGGLGIEDEYRLHETSTEPDVSLGSTWLSDFPQAWAETGGMGLAVRQAPLIIPLKATSTPVSIQQYPMSHEARLGIKPHIQRLLDQGILVPCQSPWNTPLLPVKKPGTNDYRPVQDLREVNKRVEDIHPTVPNPYNLLSGLPPSHQWYTVLDLKDAFFCLRLHPTSQPLFAFEWRDPGMGISGQLTWTRLPQGFKNSPTLFNEALHRDLADFRIQHPDLILLQYVDDILLAATSELDCQQGTRALLQTLGDLGYRASAKKAQICQKQVKYLGYLLREGQRWLTEARKETVMGQPVPKTPRQLREFLGKAGFCRLFIPGFAEMAAPLYPLTKPGTLFSWGPDQQKAYQEIKQALLTAPALGLPDLTKPFELFVDEKQGYAKGVLTQKLGPWRRPVAYLSKKLDPVAAGWPPCLRMVAAIAVLTKDAGKLTMGQPLVILAPHAVEALVKQPPDRWLSNARMTHYQAMLLDTDRVQFGPVVALNPATLLPLPEEGAPHDCLEILAETHGTRPDLTDQPIPDADHTWYTDGSSFLQEGQRKAGAAVTTETEVIWAGALPAGTSAQRAELIALTQALKMAEGKRLNVYTDSRYAFATAHIHGEIYRRRGWLTSEGREIKNKSEILALLKALFLPKRLSIIHCLGHQKGDSAEARGNRLADQAAREAAIKTPPDTSTLLIAGKRTADGSEFEKRTADGSEFESPKKKAKVE

SEQ ID NO: 2061 - protein, 2094 aa, synthetic construct
MPAAKRVKLDGGDKKYSIGLDIGTNSVGWAVITDEYKVPSKKFKVLGNTDRHSIKKNLIGALLFDSGETAEATRLKRTARRRYTRRKNRICYLQEIFSNEMAKVDDSFFHRLEESFLVEEDKKHERHPIFGNIVDEVAYHEKYPTIYHLRKKLVDSTDKADLRLIYLALAHMIKFRGHFLIEGDLNPDNSDVDKLFIQLVQTYNQLFEENPINASGVDAKAILSARLSKSRRLENLIAQLPGEKKNGLFGNLIALSLGLTPNFKSNFDLAEDAKLQLSKDTYDDDLDNLLAQIGDQYADLFLAAKNLSDAILLSDILRVNTEITKAPLSASMIKRYDEHHQDLTLLKALVRQQLPEKYKEIFFDQSKNGYAGYIDGGASQEEFYKFIKPILEKMDGTEELLVKLNREDLLRKQRTFDNGSIPHQIHLGELHAILRRQEDFYPFLKDNREKIEKILTFRIPYYVGPLARGNSRFAWMTRKSEETITPWNFEEVVDKGASAQSFIERMTNFDKNLPNEKVLPKHSLLYEYFTVYNELTKVKYVTEGMRKPAFLSGEQKKAIVDLLFKTNRKVTVKQLKEDYFKKIECFDSVEISGVEDRFNASLGTYHDLLKIIKDKDFLDNEENEDILEDIVLTLTLFEDREMIEERLKTYAHLFDDKVMKQLKRRRYTGWGRLSRKLINGIRDKQSGKTILDFLKSDGFANRNFMQLIHDDSLTFKEDIQKAQVSGQGDSLHEHIANLAGSPAIKKGILQTVKVVDELVKVMGRHKPENIVIEMARENQTTQKGQKNSRERMKRIEEGIKELGSQILKEHPVENTQLQNEKLYLYYLQNGRDMYVDQELDINRLSDYDVDHIVPQSFLKDDSIDNKVLTRSDKARGKSDNVPSEEVVKKMKNYWRQLLNAKLITQRKFDNLTKAERGGLSELDKAGFIKRQLVETRQITKHVAQILDSRMNTKYDENDKLIREVKVITLKSKLVSDFRKDFQFYKVREINNYHHAHDAYLNAVVGTALIKKYPKLESEFVYGDYKVYDVRKMIAKSEQEIGKATAKYFFYSNIMNFFKTEITLANGEIRKRPLIETNGETGEIVWDKGRDFATVRKVLSMPQVNIVKKTEVQTGGFSKESILPKRNSDKLIARKKDWDPKKYGGFDSPTVAYSVLVVAKVEKGKSKKLKSVKELLGITIMERSSFEKNPIDFLEAKGYKEVKKDLIIKLPKYSLFELENGRKRMLASAGELQKGNELALPSKYVNFLYLASHYEKLKGSPEDNEQKQLFVEQHKHYLDEIIEQISEFSKRVILADANLDKVLSAYNKHRDKPIREQAENIIHLFTLTNLGAPAAFKYFDTTIDRKRYTSTKEVLDATLIHQSITGLYETRIDLSQLGGDGGGGSGGGPAPGGLGIEDEYRLHETSTEPDVSLGSTWLSDFPQAWAETGGMGLAVRQAPLIIPLKATSTPVSIQQYPMSHEARLGIKPHIQRLLDQGILVPCQSPWNTPLLPVKKPGTNDYRPVQDLREVNKRVEDIHPTVPNPYNLLSGLPPSHQWYTVLDLKDAFFCLRLHPTSQPLFAFEWRDPGMGISGQLTWTRLPQGFKNSPTLFNEALHRDLADFRIQHPDLILLQYVDDILLAATSELDCQQGTRALLQTLGDLGYRASAKKAQICQKQVKYLGYLLREGQRWLTEARKETVMGQPVPKTPRQLREFLGKAGFCRLFIPGFAEMAAPLYPLTKPGTLFSWGPDQQKAYQEIKQALLTAPALGLPDLTKPFELFVDEKQGYAKGVLTQKLGPWRRPVAYLSKKLDPVAAGWPPCLRMVAAIAVLTKDAGKLTMGQPLVILAPHAVEALVKQPPDRWLSNARMTHYQAMLLDTDRVQFGPVVALNPATLLPLPEEGAPHDCLEILAETHGTRPDLTDQPIPDADHTWYTDGSSFLQEGQRKAGAAVTTETEVIWAGALPAGTSAQRAELIALTQALKMAEGKRLNVYTDSRYAFATAHIHGEIYRRRGWLTSEGREIKNKSEILALLKALFLPKRLSIIHCLGHQKGDSAEARGNRLADQAAREAAIKTPPDTSTLLIAGKRTADGSEFEKRTADGSEFESPKKKAKVE

SEQ ID NO: 2062 - protein, 2096 aa, synthetic construct
MPAAKRVKLDGGDKKYSIGLDIGTNSVGWAVITDEYKVPSKKFKVLGNTDRHSIKKNLIGALLFDSGETAEATRLKRTARRRYTRRKNRICYLQEIFSNEMAKVDDSFFHRLEESFLVEEDKKHERHPIFGNIVDEVAYHEKYPTIYHLRKKLVDSTDKADLRLIYLALAHMIKFRGHFLIEGDLNPDNSDVDKLFIQLVQTYNQLFEENPINASGVDAKAILSARLSKSRRLENLIAQLPGEKKNGLFGNLIALSLGLTPNFKSNFDLAEDAKLQLSKDTYDDDLDNLLAQIGDQYADLFLAAKNLSDAILLSDILRVNTEITKAPLSASMIKRYDEHHQDLTLLKALVRQQLPEKYKEIFFDQSKNGYAGYIDGGASQEEFYKFIKPILEKMDGTEELLVKLNREDLLRKQRTFDNGSIPHQIHLGELHAILRRQEDFYPFLKDNREKIEKILTFRIPYYVGPLARGNSRFAWMTRKSEETITPWNFEEVVDKGASAQSFIERMTNFDKNLPNEKVLPKHSLLYEYFTVYNELTKVKYVTEGMRKPAFLSGEQKKAIVDLLFKTNRKVTVKQLKEDYFKKIECFDSVEISGVEDRFNASLGTYHDLLKIIKDKDFLDNEENEDILEDIVLTLTLFEDREMIEERLKTYAHLFDDKVMKQLKRRRYTGWGRLSRKLINGIRDKQSGKTILDFLKSDGFANRNFMQLIHDDSLTFKEDIQKAQVSGQGDSLHEHIANLAGSPAIKKGILQTVKVVDELVKVMGRHKPENIVIEMARENQTTQKGQKNSRERMKRIEEGIKELGSQILKEHPVENTQLQNEKLYLYYLQNGRDMYVDQELDINRLSDYDVDHIVPQSFLKDDSIDNKVLTRSDKARGKSDNVPSEEVVKKMKNYWRQLLNAKLITQRKFDNLTKAERGGLSELDKAGFIKRQLVETRQITKHVAQILDSRMNTKYDENDKLIREVKVITLKSKLVSDFRKDFQFYKVREINNYHHAHDAYLNAVVGTALIKKYPKLESEFVYGDYKVYDVRKMIAKSEQEIGKATAKYFFYSNIMNFFKTEITLANGEIRKRPLIETNGETGEIVWDKGRDFATVRKVLSMPQVNIVKKTEVQTGGFSKESILPKRNSDKLIARKKDWDPKKYGGFDSPTVAYSVLVVAKVEKGKSKKLKSVKELLGITIMERSSFEKNPIDFLEAKGYKEVKKDLIIKLPKYSLFELENGRKRMLASAGELQKGNELALPSKYVNFLYLASHYEKLKGSPEDNEQKQLFVEQHKHYLDEIIEQISEFSKRVILADANLDKVLSAYNKHRDKPIREQAENIIHLFTLTNLGAPAAFKYFDTTIDRKRYTSTKEVLDATLIHQSITGLYETRIDLSQLGGDGGGSSPAPEAAAKGGTLGIEDEYRLHETSTEPDVSLGSTWLSDFPQAWAETGGMGLAVRQAPLIIPLKATSTPVSIQQYPMSHEARLGIKPHIQRLLDQGILVPCQSPWNTPLLPVKKPGTNDYRPVQDLREVNKRVEDIHPTVPNPYNLLSGLPPSHQWYTVLDLKDAFFCLRLHPTSQPLFAFEWRDPGMGISGQLTWTRLPQGFKNSPTLFDEALHRDLADFRIQHPDLILLQYVDDILLAATSELDCQQGTRALLQTLGDLGYRASAKKAQICQKQVKYLGYLLREGQRWLTEARKETVMGQPVPKTPRQLREFLGTAGFCRLWIPGFAEMAAPLYPLTKTGTLFSWGPDQQKAYQEIKQALLTAPALGLPDLTKPFELFVDEKQGYAKGVLTQKLGPWRRPVAYLSKKLDPVAAGWPPCLRMVAAIAVLTKDAGKLTMGQPLVILAPHAVEALVKQPPDRWLSNARMTHYQAMLLDTDRVQFGPVVALNPATLLPLPEEGAPHDCLEILAETHGTRPDLTDQPIPDADHTWYTDGSSFLQEGQRKAGAAVTTETEVIWAGALPAGTSAQRAELIALTQALKMAEGKRLNVYTDSRYAFATAHIHGEIYRRRGLLTSEGREIKNKSEILALLKALFLPKRLSIIHCLGHQKGDSAEARGNRLADQAAREAAIKTPPDTSTLLAGKRTADGSEFEKRTADGSEFESPKKKAKVE

SEQ ID NO: 2063 - protein, 2105 aa, synthetic construct
MPAAKRVKLDGGDKKYSIGLDIGTNSVGWAVITDEYKVPSKKFKVLGNTDRHSIKKNLIGALLFDSGETAEATRLKRTARRRYTRRKNRICYLQEIFSNEMAKVDDSFFHRLEESFLVEEDKKHERHPIFGNIVDEVAYHEKYPTIYHLRKKLVDSTDKADLRLIYLALAHMIKFRGHFLIEGDLNPDNSDVDKLFIQLVQTYNQLFEENPINASGVDAKAILSARLSKSRRLENLIAQLPGEKKNGLFGNLIALSLGLTPNFKSNFDLAEDAKLQLSKDTYDDDLDNLLAQIGDQYADLFLAAKNLSDAILLSDILRVNTEITKAPLSASMIKRYDEHHQDLTLLKALVRQQLPEKYKEIFFDQSKNGYAGYIDGGASQEEFYKFIKPILEKMDGTEELLVKLNREDLLRKQRTFDNGSIPHQIHLGELHAILRRQEDFYPFLKDNREKIEKILTFRIPYYVGPLARGNSRFAWMTRKSEETITPWNFEEVVDKGASAQSFIERMTNFDKNLPNEKVLPKHSLLYEYFTVYNELTKVKYVTEGMRKPAFLSGEQKKAIVDLLFKTNRKVTVKQLKEDYFKKIECFDSVEISGVEDRFNASLGTYHDLLKIIKDKDFLDNEENEDILEDIVLTLTLFEDREMIEERLKTYAHLFDDKVMKQLKRRRYTGWGRLSRKLINGIRDKQSGKTILDFLKSDGFANRNFMQLIHDDSLTFKEDIQKAQVSGQGDSLHEHIANLAGSPAIKKGILQTVKVVDELVKVMGRHKPENIVIEMARENQTTQKGQKNSRERMKRIEEGIKELGSQILKEHPVENTQLQNEKLYLYYLQNGRDMYVDQELDINRLSDYDVDHIVPQSFLKDDSIDNKVLTRSDKARGKSDNVPSEEVVKKMKNYWRQLLNAKLITQRKFDNLTKAERGGLSELDKAGFIKRQLVETRQITKHVAQILDSRMNTKYDENDKLIREVKVITLKSKLVSDFRKDFQFYKVREINNYHHAHDAYLNAVVGTALIKKYPKLESEFVYGDYKVYDVRKMIAKSEQEIGKATAKYFFYSNIMNFFKTEITLANGEIRKRPLIETNGETGEIVWDKGRDFATVRKVLSMPQVNIVKKTEVQTGGFSKESILPKRNSDKLIARKKDWDPKKYGGFDSPTVAYSVLVVAKVEKGKSKKLKSVKELLGITIMERSSFEKNPIDFLEAKGYKEVKKDLIIKLPKYSLFELENGRKRMLASAGELQKGNELALPSKYVNFLYLASHYEKLKGSPEDNEQKQLFVEQHKHYLDEIIEQISEFSKRVILADANLDKVLSAYNKHRDKPIREQAENIIHLFTLTNLGAPAAFKYFDTTIDRKRYTSTKEVLDATLIHQSITGLYETRIDLSQLGGDGGGGGGSGGGGSGGGGSGGGGSGGTLGIEDEYRLHETSTEPDVSLGSTWLSDFPQAWAETGGMGLAVRQAPLIIPLKATSTPVSIQQYPMSHEARLGIKPHIQRLLDQGILVPCQSPWNTPLLPVKKPGTNDYRPVQDLREVNKRVEDIHPTVPNPYNLLSGLPPSHQWYTVLDLKDAFFCLRLHPTSQPLFAFEWRDPGMGISGQLTWTRLPQGFKNSPTLFDEALHRDLADFRIQHPDLILLQYVDDILLAATSELDCQQGTRALLQTLGDLGYRASAKKAQICQKQVKYLGYLLREGQRWLTEARKETVMGQPVPKTPRQLREFLGTAGFCRLWIPGFAEMAAPLYPLTKTGTLFSWGPDQQKAYQEIKQALLTAPALGLPDLTKPFELFVDEKQGYAKGVLTQKLGPWRRPVAYLSKKLDPVAAGWPPCLRMVAAIAVLTKDAGKLTMGQPLVILAPHAVEALVKQPPDRWLSNARMTHYQAMLLDTDRVQFGPVVALNPATLLPLPEEGAPHDCLEILAETHGTRPDLTDQPIPDADHTWYTDGSSFLQEGQRKAGAAVTTETEVIWAGALPAGTSAQRAELIALTQALKMAEGKRLNVYTDSRYAFATAHIHGEIYRRRGLLTSEGREIKNKSEILALLKALFLPKRLSIIHCLGHQKGDSAEARGNRLADQAAREAAIKTPPDTSTLLAGKRTADGSEFEKRTADGSEFESPKKKAKVE

SEQ ID NO: 2064 - protein, 2095 aa, synthetic construct
MPAAKRVKLDGGDKKYSIGLDIGTNSVGWAVITDEYKVPSKKFKVLGNTDRHSIKKNLIGALLFDSGETAEATRLKRTARRRYTRRKNRICYLQEIFSNEMAKVDDSFFHRLEESFLVEEDKKHERHPIFGNIVDEVAYHEKYPTIYHLRKKLVDSTDKADLRLIYLALAHMIKFRGHFLIEGDLNPDNSDVDKLFIQLVQTYNQLFEENPINASGVDAKAILSARLSKSRRLENLIAQLPGEKKNGLFGNLIALSLGLTPNFKSNFDLAEDAKLQLSKDTYDDDLDNLLAQIGDQYADLFLAAKNLSDAILLSDILRVNTEITKAPLSASMIKRYDEHHQDLTLLKALVRQQLPEKYKEIFFDQSKNGYAGYIDGGASQEEFYKFIKPILEKMDGTEELLVKLNREDLLRKQRTFDNGSIPHQIHLGELHAILRRQEDFYPFLKDNREKIEKILTFRIPYYVGPLARGNSRFAWMTRKSEETITPWNFEEVVDKGASAQSFIERMTNFDKNLPNEKVLPKHSLLYEYFTVYNELTKVKYVTEGMRKPAFLSGEQKKAIVDLLFKTNRKVTVKQLKEDYFKKIECFDSVEISGVEDRFNASLGTYHDLLKIIKDKDFLDNEENEDILEDIVLTLTLFEDREMIEERLKTYAHLFDDKVMKQLKRRRYTGWGRLSRKLINGIRDKQSGKTILDFLKSDGFANRNFMQLIHDDSLTFKEDIQKAQVSGQGDSLHEHIANLAGSPAIKKGILQTVKVVDELVKVMGRHKPENIVIEMARENQTTQKGQKNSRERMKRIEEGIKELGSQILKEHPVENTQLQNEKLYLYYLQNGRDMYVDQELDINRLSDYDVDHIVPQSFLKDDSIDNKVLTRSDKARGKSDNVPSEEVVKKMKNYWRQLLNAKLITQRKFDNLTKAERGGLSELDKAGFIKRQLVETRQITKHVAQILDSRMNTKYDENDKLIREVKVITLKSKLVSDFRKDFQFYKVREINNYHHAHDAYLNAVVGTALIKKYPKLESEFVYGDYKVYDVRKMIAKSEQEIGKATAKYFFYSNIMNFFKTEITLANGEIRKRPLIETNGETGEIVWDKGRDFATVRKVLSMPQVNIVKKTEVQTGGFSKESILPKRNSDKLIARKKDWDPKKYGGFDSPTVAYSVLVVAKVEKGKSKKLKSVKELLGITIMERSSFEKNPIDFLEAKGYKEVKKDLIIKLPKYSLFELENGRKRMLASAGELQKGNELALPSKYVNFLYLASHYEKLKGSPEDNEQKQLFVEQHKHYLDEIIEQISEFSKRVILADANLDKVLSAYNKHRDKPIREQAENIIHLFTLTNLGAPAAFKYFDTTIDRKRYTSTKEVLDATLIHQSITGLYETRIDLSQLGGDGGEAAAKEAAAKGGTLGIEDEYRLHETSTEPDVSLGSTWLSDFPQAWAETGGMGLAVRQAPLIIPLKATSTPVSIQQYPMSHEARLGIKPHIQRLLDQGILVPCQSPWNTPLLPVKKPGTNDYRPVQDLREVNKRVEDIHPTVPNPYNLLSGLPPSHQWYTVLDLKDAFFCLRLHPTSQPLFAFEWRDPGMGISGQLTWTRLPQGFKNSPTLFDEALHRDLADFRIQHPDLILLQYVDDILLAATSELDCQQGTRALLQTLGDLGYRASAKKAQICQKQVKYLGYLLREGQRWLTEARKETVMGQPVPKTPRQLREFLGTAGFCRLWIPGFAEMAAPLYPLTKTGTLFSWGPDQQKAYQEIKQALLTAPALGLPDLTKPFELFVDEKQGYAKGVLTQKLGPWRRPVAYLSKKLDPVAAGWPPCLRMVAAIAVLTKDAGKLTMGQPLVILAPHAVEALVKQPPDRWLSNARMTHYQAMLLDTDRVQFGPVVALNPATLLPLPEEGAPHDCLEILAETHGTRPDLTDQPIPDADHTWYTDGSSFLQEGQRKAGAAVTTETEVIWAGALPAGTSAQRAELIALTQALKMAEGKRLNVYTDSRYAFATAHIHGEIYRRRGLLTSEGREIKNKSEILALLKALFLPKRLSIIHCLGHQKGDSAEARGNRLADQAAREAAIKTPPDTSTLLAGKRTADGSEFEKRTADGSEFESPKKKAKVE

SEQ ID NO: 2065 - protein, 2096 aa, synthetic construct
MPAAKRVKLDGGDKKYSIGLDIGTNSVGWAVITDEYKVPSKKFKVLGNTDRHSIKKNLIGALLFDSGETAEATRLKRTARRRYTRRKNRICYLQEIFSNEMAKVDDSFFHRLEESFLVEEDKKHERHPIFGNIVDEVAYHEKYPTIYHLRKKLVDSTDKADLRLIYLALAHMIKFRGHFLIEGDLNPDNSDVDKLFIQLVQTYNQLFEENPINASGVDAKAILSARLSKSRRLENLIAQLPGEKKNGLFGNLIALSLGLTPNFKSNFDLAEDAKLQLSKDTYDDDLDNLLAQIGDQYADLFLAAKNLSDAILLSDILRVNTEITKAPLSASMIKRYDEHHQDLTLLKALVRQQLPEKYKEIFFDQSKNGYAGYIDGGASQEEFYKFIKPILEKMDGTEELLVKLNREDLLRKQRTFDNGSIPHQIHLGELHAILRRQEDFYPFLKDNREKIEKILTFRIPYYVGPLARGNSRFAWMTRKSEETITPWNFEEVVDKGASAQSFIERMTNFDKNLPNEKVLPKHSLLYEYFTVYNELTKVKYVTEGMRKPAFLSGEQKKAIVDLLFKTNRKVTVKQLKEDYFKKIECFDSVEISGVEDRFNASLGTYHDLLKIIKDKDFLDNEENEDILEDIVLTLTLFEDREMIEERLKTYAHLFDDKVMKQLKRRRYTGWGRLSRKLINGIRDKQSGKTILDFLKSDGFANRNFMQLIHDDSLTFKEDIQKAQVSGQGDSLHEHIANLAGSPAIKKGILQTVKVVDELVKVMGRHKPENIVIEMARENQTTQKGQKNSRERMKRIEEGIKELGSQILKEHPVENTQLQNEKLYLYYLQNGRDMYVDQELDINRLSDYDVDHIVPQSFLKDDSIDNKVLTRSDKARGKSDNVPSEEVVKKMKNYWRQLLNAKLITQRKFDNLTKAERGGLSELDKAGFIKRQLVETRQITKHVAQILDSRMNTKYDENDKLIREVKVITLKSKLVSDFRKDFQFYKVREINNYHHAHDAYLNAVVGTALIKKYPKLESEFVYGDYKVYDVRKMIAKSEQEIGKATAKYFFYSNIMNFFKTEITLANGEIRKRPLIETNGETGEIVWDKGRDFATVRKVLSMPQVNIVKKTEVQTGGFSKESILPKRNSDKLIARKKDWDPKKYGGFDSPTVAYSVLVVAKVEKGKSKKLKSVKELLGITIMERSSFEKNPIDFLEAKGYKEVKKDLIIKLPKYSLFELENGRKRMLASAGELQKGNELALPSKYVNFLYLASHYEKLKGSPEDNEQKQLFVEQHKHYLDEIIEQISEFSKRVILADANLDKVLSAYNKHRDKPIREQAENIIHLFTLTNLGAPAAFKYFDTTIDRKRYTSTKEVLDATLIHQSITGLYETRIDLSQLGGDGGPAPGSSEAAAKGGTLGIEDEYRLHETSTEPDVSLGSTWLSDFPQAWAETGGMGLAVRQAPLIIPLKATSTPVSIQQYPMSHEARLGIKPHIQRLLDQGILVPCQSPWNTPLLPVKKPGTNDYRPVQDLREVNKRVEDIHPTVPNPYNLLSGLPPSHQWYTVLDLKDAFFCLRLHPTSQPLFAFEWRDPGMGISGQLTWTRLPQGFKNSPTLFDEALHRDLADFRIQHPDLILLQYVDDILLAATSELDCQQGTRALLQTLGDLGYRASAKKAQICQKQVKYLGYLLREGQRWLTEARKETVMGQPVPKTPRQLREFLGTAGFCRLWIPGFAEMAAPLYPLTKTGTLFSWGPDQQKAYQEIKQALLTAPALGLPDLTKPFELFVDEKQGYAKGVLTQKLGPWRRPVAYLSKKLDPVAAGWPPCLRMVAAIAVLTKDAGKLTMGQPLVILAPHAVEALVKQPPDRWLSNARMTHYQAMLLDTDRVQFGPVVALNPATLLPLPEEGAPHDCLEILAETHGTRPDLTDQPIPDADHTWYTDGSSFLQEGQRKAGAAVTTETEVIWAGALPAGTSAQRAELIALTQALKMAEGKRLNVYTDSRYAFATAHIHGEIYRRRGLLTSEGREIKNKSEILALLKALFLPKRLSIIHCLGHQKGDSAEARGNRLADQAAREAAIKTPPDTSTLLAGKRTADGSEFEKRTADGSEFESPKKKAKVE

SEQ ID NO: 2066 - protein, 2115 aa, synthetic construct
MPAAKRVKLDGGDKKYSIGLDIGTNSVGWAVITDEYKVPSKKFKVLGNTDRHSIKKNLIGALLFDSGETAEATRLKRTARRRYTRRKNRICYLQEIFSNEMAKVDDSFFHRLEESFLVEEDKKHERHPIFGNIVDEVAYHEKYPTIYHLRKKLVDSTDKADLRLIYLALAHMIKFRGHFLIEGDLNPDNSDVDKLFIQLVQTYNQLFEENPINASGVDAKAILSARLSKSRRLENLIAQLPGEKKNGLFGNLIALSLGLTPNFKSNFDLAEDAKLQLSKDTYDDDLDNLLAQIGDQYADLFLAAKNLSDAILLSDILRVNTEITKAPLSASMIKRYDEHHQDLTLLKALVRQQLPEKYKEIFFDQSKNGYAGYIDGGASQEEFYKFIKPILEKMDGTEELLVKLNREDLLRKQRTFDNGSIPHQIHLGELHAILRRQEDFYPFLKDNREKIEKILTFRIPYYVGPLARGNSRFAWMTRKSEETITPWNFEEVVDKGASAQSFIERMTNFDKNLPNEKVLPKHSLLYEYFTVYNELTKVKYVTEGMRKPAFLSGEQKKAIVDLLFKTNRKVTVKQLKEDYFKKIECFDSVEISGVEDRFNASLGTYHDLLKIIKDKDFLDNEENEDILEDIVLTLTLFEDREMIEERLKTYAHLFDDKVMKQLKRRRYTGWGRLSRKLINGIRDKQSGKTILDFLKSDGFANRNFMQLIHDDSLTFKEDIQKAQVSGQGDSLHEHIANLAGSPAIKKGILQTVKVVDELVKVMGRHKPENIVIEMARENQTTQKGQKNSRERMKRIEEGIKELGSQILKEHPVENTQLQNEKLYLYYLQNGRDMYVDQELDINRLSDYDVDHIVPQSFLKDDSIDNKVLTRSDKARGKSDNVPSEEVVKKMKNYWRQLLNAKLITQRKFDNLTKAERGGLSELDKAGFIKRQLVETRQITKHVAQILDSRMNTKYDENDKLIREVKVITLKSKLVSDFRKDFQFYKVREINNYHHAHDAYLNAVVGTALIKKYPKLESEFVYGDYKVYDVRKMIAKSEQEIGKATAKYFFYSNIMNFFKTEITLANGEIRKRPLIETNGETGEIVWDKGRDFATVRKVLSMPQVNIVKKTEVQTGGFSKESILPKRNSDKLIARKKDWDPKKYGGFDSPTVAYSVLVVAKVEKGKSKKLKSVKELLGITIMERSSFEKNPIDFLEAKGYKEVKKDLIIKLPKYSLFELENGRKRMLASAGELQKGNELALPSKYVNFLYLASHYEKLKGSPEDNEQKQLFVEQHKHYLDEIIEQISEFSKRVILADANLDKVLSAYNKHRDKPIREQAENIIHLFTLTNLGAPAAFKYFDTTIDRKRYTSTKEVLDATLIHQSITGLYETRIDLSQLGGDGGGGGGSGGGGSGGGGSGGGGSGGGGSGGGGSGGTLGIEDEYRLHETSTEPDVSLGSTWLSDFPQAWAETGGMGLAVRQAPLIIPLKATSTPVSIQQYPMSHEARLGIKPHIQRLLDQGILVPCQSPWNTPLLPVKKPGTNDYRPVQDLREVNKRVEDIHPTVPNPYNLLSGLPPSHQWYTVLDLKDAFFCLRLHPTSQPLFAFEWRDPGMGISGQLTWTRLPQGFKNSPTLFDEALHRDLADFRIQHPDLILLQYVDDILLAATSELDCQQGTRALLQTLGDLGYRASAKKAQICQKQVKYLGYLLREGQRWLTEARKETVMGQPVPKTPRQLREFLGTAGFCRLWIPGFAEMAAPLYPLTKTGTLFSWGPDQQKAYQEIKQALLTAPALGLPDLTKPFELFVDEKQGYAKGVLTQKLGPWRRPVAYLSKKLDPVAAGWPPCLRMVAAIAVLTKDAGKLTMGQPLVILAPHAVEALVKQPPDRWLSNARMTHYQAMLLDTDRVQFGPVVALNPATLLPLPEEGAPHDCLEILAETHGTRPDLTDQPIPDADHTWYTDGSSFLQEGQRKAGAAVTTETEVIWAGALPAGTSAQRAELIALTQALKMAEGKRLNVYTDSRYAFATAHIHGEIYRRRGLLTSEGREIKNKSEILALLKALFLPKRLSIIHCLGHQKGDSAEARGNRLADQAAREAAIKTPPDTSTLLAGKRTADGSEFEKRTADGSEFESPKKKAKVE

SEQ ID NO: 2067 - protein, 2093 aa, synthetic construct
MPAAKRVKLDGGDKKYSIGLDIGTNSVGWAVITDEYKVPSKKFKVLGNTDRHSIKKNLIGALLFDSGETAEATRLKRTARRRYTRRKNRICYLQEIFSNEMAKVDDSFFHRLEESFLVEEDKKHERHPIFGNIVDEVAYHEKYPTIYHLRKKLVDSTDKADLRLIYLALAHMIKFRGHFLIEGDLNPDNSDVDKLFIQLVQTYNQLFEENPINASGVDAKAILSARLSKSRRLENLIAQLPGEKKNGLFGNLIALSLGLTPNFKSNFDLAEDAKLQLSKDTYDDDLDNLLAQIGDQYADLFLAAKNLSDAILLSDILRVNTEITKAPLSASMIKRYDEHHQDLTLLKALVRQQLPEKYKEIFFDQSKNGYAGYIDGGASQEEFYKFIKPILEKMDGTEELLVKLNREDLLRKQRTFDNGSIPHQIHLGELHAILRRQEDFYPFLKDNREKIEKILTFRIPYYVGPLARGNSRFAWMTRKSEETITPWNFEEVVDKGASAQSFIERMTNFDKNLPNEKVLPKHSLLYEYFTVYNELTKVKYVTEGMRKPAFLSGEQKKAIVDLLFKTNRKVTVKQLKEDYFKKIECFDSVEISGVEDRFNASLGTYHDLLKIIKDKDFLDNEENEDILEDIVLTLTLFEDREMIEERLKTYAHLFDDKVMKQLKRRRYTGWGRLSRKLINGIRDKQSGKTILDFLKSDGFANRNFMQLIHDDSLTFKEDIQKAQVSGQGDSLHEHIANLAGSPAIKKGILQTVKVVDELVKVMGRHKPENIVIEMARENQTTQKGQKNSRERMKRIEEGIKELGSQILKEHPVENTQLQNEKLYLYYLQNGRDMYVDQELDINRLSDYDVDHIVPQSFLKDDSIDNKVLTRSDKARGKSDNVPSEEVVKKMKNYWRQLLNAKLITQRKFDNLTKAERGGLSELDKAGFIKRQLVETRQITKHVAQILDSRMNTKYDENDKLIREVKVITLKSKLVSDFRKDFQFYKVREINNYHHAHDAYLNAVVGTALIKKYPKLESEFVYGDYKVYDVRKMIAKSEQEIGKATAKYFFYSNIMNFFKTEITLANGEIRKRPLIETNGETGEIVWDKGRDFATVRKVLSMPQVNIVKKTEVQTGGFSKESILPKRNSDKLIARKKDWDPKKYGGFDSPTVAYSVLVVAKVEKGKSKKLKSVKELLGITIMERSSFEKNPIDFLEAKGYKEVKKDLIIKLPKYSLFELENGRKRMLASAGELQKGNELALPSKYVNFLYLASHYEKLKGSPEDNEQKQLFVEQHKHYLDEIIEQISEFSKRVILADANLDKVLSAYNKHRDKPIREQAENIIHLFTLTNLGAPAAFKYFDTTIDRKRYTSTKEVLDATLIHQSITGLYETRIDLSQLGGDGGEAAAKPAPGGTLGIEDEYRLHETSTEPDVSLGSTWLSDFPQAWAETGGMGLAVRQAPLIIPLKATSTPVSIQQYPMSHEARLGIKPHIQRLLDQGILVPCQSPWNTPLLPVKKPGTNDYRPVQDLREVNKRVEDIHPTVPNPYNLLSGLPPSHQWYTVLDLKDAFFCLRLHPTSQPLFAFEWRDPGMGISGQLTWTRLPQGFKNSPTLFDEALHRDLADFRIQHPDLILLQYVDDILLAATSELDCQQGTRALLQTLGDLGYRASAKKAQICQKQVKYLGYLLREGQRWLTEARKETVMGQPVPKTPRQLREFLGTAGFCRLWIPGFAEMAAPLYPLTKTGTLFSWGPDQQKAYQEIKQALLTAPALGLPDLTKPFELFVDEKQGYAKGVLTQKLGPWRRPVAYLSKKLDPVAAGWPPCLRMVAAIAVLTKDAGKLTMGQPLVILAPHAVEALVKQPPDRWLSNARMTHYQAMLLDTDRVQFGPVVALNPATLLPLPEEGAPHDCLEILAETHGTRPDLTDQPIPDADHTWYTDGSSFLQEGQRKAGAAVTTETEVIWAGALPAGTSAQRAELIALTQALKMAEGKRLNVYTDSRYAFATAHIHGEIYRRRGLLTSEGREIKNKSEILALLKALFLPKRLSIIHCLGHQKGDSAEARGNRLADQAAREAAIKTPPDTSTLLAGKRTADGSEFEKRTADGSEFESPKKKAKVE

SEQ ID NO: 2068 - protein, 2096 aa, synthetic construct
MPAAKRVKLDGGDKKYSIGLDIGTNSVGWAVITDEYKVPSKKFKVLGNTDRHSIKKNLIGALLFDSGETAEATRLKRTARRRYTRRKNRICYLQEIFSNEMAKVDDSFFHRLEESFLVEEDKKHERHPIFGNIVDEVAYHEKYPTIYHLRKKLVDSTDKADLRLIYLALAHMIKFRGHFLIEGDLNPDNSDVDKLFIQLVQTYNQLFEENPINASGVDAKAILSARLSKSRRLENLIAQLPGEKKNGLFGNLIALSLGLTPNFKSNFDLAEDAKLQLSKDTYDDDLDNLLAQIGDQYADLFLAAKNLSDAILLSDILRVNTEITKAPLSASMIKRYDEHHQDLTLLKALVRQQLPEKYKEIFFDQSKNGYAGYIDGGASQEEFYKFIKPILEKMDGTEELLVKLNREDLLRKQRTFDNGSIPHQIHLGELHAILRRQEDFYPFLKDNREKIEKILTFRIPYYVGPLARGNSRFAWMTRKSEETITPWNFEEVVDKGASAQSFIERMTNFDKNLPNEKVLPKHSLLYEYFTVYNELTKVKYVTEGMRKPAFLSGEQKKAIVDLLFKTNRKVTVKQLKEDYFKKIECFDSVEISGVEDRFNASLGTYHDLLKIIKDKDFLDNEENEDILEDIVLTLTLFEDREMIEERLKTYAHLFDDKVMKQLKRRRYTGWGRLSRKLINGIRDKQSGKTILDFLKSDGFANRNFMQLIHDDSLTFKEDIQKAQVSGQGDSLHEHIANLAGSPAIKKGILQTVKVVDELVKVMGRHKPENIVIEMARENQTTQKGQKNSRERMKRIEEGIKELGSQILKEHPVENTQLQNEKLYLYYLQNGRDMYVDQELDINRLSDYDVDHIVPQSFLKDDSIDNKVLTRSDKARGKSDNVPSEEVVKKMKNYWRQLLNAKLITQRKFDNLTKAERGGLSELDKAGFIKRQLVETRQITKHVAQILDSRMNTKYDENDKLIREVKVITLKSKLVSDFRKDFQFYKVREINNYHHAHDAYLNAVVGTALIKKYPKLESEFVYGDYKVYDVRKMIAKSEQEIGKATAKYFFYSNIMNFFKTEITLANGEIRKRPLIETNGETGEIVWDKGRDFATVRKVLSMPQVNIVKKTEVQTGGFSKESILPKRNSDKLIARKKDWDPKKYGGFDSPTVAYSVLVVAKVEKGKSKKLKSVKELLGITIMERSSFEKNPIDFLEAKGYKEVKKDLIIKLPKYSLFELENGRKRMLASAGELQKGNELALPSKYVNFLYLASHYEKLKGSPEDNEQKQLFVEQHKHYLDEIIEQISEFSKRVILADANLDKVLSAYNKHRDKPIREQAENIIHLFTLTNLGAPAAFKYFDTTIDRKRYTSTKEVLDATLIHQSITGLYETRIDLSQLGGDGGGGGGGSEAAAKGGTLGIEDEYRLHETSTEPDVSLGSTWLSDFPQAWAETGGMGLAVRQAPLIIPLKATSTPVSIQQYPMSHEARLGIKPHIQRLLDQGILVPCQSPWNTPLLPVKKPGTNDYRPVQDLREVNKRVEDIHPTVPNPYNLLSGLPPSHQWYTVLDLKDAFFCLRLHPTSQPLFAFEWRDPGMGISGQLTWTRLPQGFKNSPTLFDEALHRDLADFRIQHPDLILLQYVDDILLAATSELDCQQGTRALLQTLGDLGYRASAKKAQICQKQVKYLGYLLREGQRWLTEARKETVMGQPVPKTPRQLREFLGTAGFCRLWIPGFAEMAAPLYPLTKTGTLFSWGPDQQKAYQEIKQALLTAPALGLPDLTKPFELFVDEKQGYAKGVLTQKLGPWRRPVAYLSKKLDPVAAGWPPCLRMVAAIAVLTKDAGKLTMGQPLVILAPHAVEALVKQPPDRWLSNARMTHYQAMLLDTDRVQFGPVVALNPATLLPLPEEGAPHDCLEILAETHGTRPDLTDQPIPDADHTWYTDGSSFLQEGQRKAGAAVTTETEVIWAGALPAGTSAQRAELIALTQALKMAEGKRLNVYTDSRYAFATAHIHGEIYRRRGLLTSEGREIKNKSEILALLKALFLPKRLSIIHCLGHQKGDSAEARGNRLADQAAREAAIKTPPDTSTLLAGKRTADGSEFEKRTADGSEFESPKKKAKVE

SEQ ID NO: 2069 - protein, 2096 aa, synthetic construct
MPAAKRVKLDGGDKKYSIGLDIGTNSVGWAVITDEYKVPSKKFKVLGNTDRHSIKKNLIGALLFDSGETAEATRLKRTARRRYTRRKNRICYLQEIFSNEMAKVDDSFFHRLEESFLVEEDKKHERHPIFGNIVDEVAYHEKYPTIYHLRKKLVDSTDKADLRLIYLALAHMIKFRGHFLIEGDLNPDNSDVDKLFIQLVQTYNQLFEENPINASGVDAKAILSARLSKSRRLENLIAQLPGEKKNGLFGNLIALSLGLTPNFKSNFDLAEDAKLQLSKDTYDDDLDNLLAQIGDQYADLFLAAKNLSDAILLSDILRVNTEITKAPLSASMIKRYDEHHQDLTLLKALVRQQLPEKYKEIFFDQSKNGYAGYIDGGASQEEFYKFIKPILEKMDGTEELLVKLNREDLLRKQRTFDNGSIPHQIHLGELHAILRRQEDFYPFLKDNREKIEKILTFRIPYYVGPLARGNSRFAWMTRKSEETITPWNFEEVVDKGASAQSFIERMTNFDKNLPNEKVLPKHSLLYEYFTVYNELTKVKYVTEGMRKPAFLSGEQKKAIVDLLFKTNRKVTVKQLKEDYFKKIECFDSVEISGVEDRFNASLGTYHDLLKIIKDKDFLDNEENEDILEDIVLTLTLFEDREMIEERLKTYAHLFDDKVMKQLKRRRYTGWGRLSRKLINGIRDKQSGKTILDFLKSDGFANRNFMQLIHDDSLTFKEDIQKAQVSGQGDSLHEHIANLAGSPAIKKGILQTVKVVDELVKVMGRHKPENIVIEMARENQTTQKGQKNSRERMKRIEEGIKELGSQILKEHPVENTQLQNEKLYLYYLQNGRDMYVDQELDINRLSDYDVDHIVPQSFLKDDSIDNKVLTRSDKARGKSDNVPSEEVVKKMKNYWRQLLNAKLITQRKFDNLTKAERGGLSELDKAGFIKRQLVETRQITKHVAQILDSRMNTKYDENDKLIREVKVITLKSKLVSDFRKDFQFYKVREINNYHHAHDAYLNAVVGTALIKKYPKLESEFVYGDYKVYDVRKMIAKSEQEIGKATAKYFFYSNIMNFFKTEITLANGEIRKRPLIETNGETGEIVWDKGRDFATVRKVLSMPQVNIVKKTEVQTGGFSKESILPKRNSDKLIARKKDWDPKKYGGFDSPTVAYSVLVVAKVEKGKSKKLKSVKELLGITIMERSSFEKNPIDFLEAKGYKEVKKDLIIKLPKYSLFELENGRKRMLASAGELQKGNELALPSKYVNFLYLASHYEKLKGSPEDNEQKQLFVEQHKHYLDEIIEQISEFSKRVILADANLDKVLSAYNKHRDKPIREQAENIIHLFTLTNLGAPAAFKYFDTTIDRKRYTSTKEVLDATLIHQSITGLYETRIDLSQLGGDGGGGSEAAAKPAPGGTLGIEDEYRLHETSTEPDVSLGSTWLSDFPQAWAETGGMGLAVRQAPLIIPLKATSTPVSIQQYPMSHEARLGIKPHIQRLLDQGILVPCQSPWNTPLLPVKKPGTNDYRPVQDLREVNKRVEDIHPTVPNPYNLLSGLPPSHQWYTVLDLKDAFFCLRLHPTSQPLFAFEWRDPGMGISGQLTWTRLPQGFKNSPTLFDEALHRDLADFRIQHPDLILLQYVDDILLAATSELDCQQGTRALLQTLGDLGYRASAKKAQICQKQVKYLGYLLREGQRWLTEARKETVMGQPVPKTPRQLREFLGTAGFCRLWIPGFAEMAAPLYPLTKTGTLFSWGPDQQKAYQEIKQALLTAPALGLPDLTKPFELFVDEKQGYAKGVLTQKLGPWRRPVAYLSKKLDPVAAGWPPCLRMVAAIAVLTKDAGKLTMGQPLVILAPHAVEALVKQPPDRWLSNARMTHYQAMLLDTDRVQFGPVVALNPATLLPLPEEGAPHDCLEILAETHGTRPDLTDQPIPDADHTWYTDGSSFLQEGQRKAGAAVTTETEVIWAGALPAGTSAQRAELIALTQALKMAEGKRLNVYTDSRYAFATAHIHGEIYRRRGLLTSEGREIKNKSEILALLKALFLPKRLSIIHCLGHQKGDSAEARGNRLADQAAREAAIKTPPDTSTLLAGKRTADGSEFEKRTADGSEFESPKKKAKVE

SEQ ID NO: 2070 - protein, 2105 aa, synthetic construct
MPAAKRVKLDGGDKKYSIGLDIGTNSVGWAVITDEYKVPSKKFKVLGNTDRHSIKKNLIGALLFDSGETAEATRLKRTARRRYTRRKNRICYLQEIFSNEMAKVDDSFFHRLEESFLVEEDKKHERHPIFGNIVDEVAYHEKYPTIYHLRKKLVDSTDKADLRLIYLALAHMIKFRGHFLIEGDLNPDNSDVDKLFIQLVQTYNQLFEENPINASGVDAKAILSARLSKSRRLENLIAQLPGEKKNGLFGNLIALSLGLTPNFKSNFDLAEDAKLQLSKDTYDDDLDNLLAQIGDQYADLFLAAKNLSDAILLSDILRVNTEITKAPLSASMIKRYDEHHQDLTLLKALVRQQLPEKYKEIFFDQSKNGYAGYIDGGASQEEFYKFIKPILEKMDGTEELLVKLNREDLLRKQRTFDNGSIPHQIHLGELHAILRRQEDFYPFLKDNREKIEKILTFRIPYYVGPLARGNSRFAWMTRKSEETITPWNFEEVVDKGASAQSFIERMTNFDKNLPNEKVLPKHSLLYEYFTVYNELTKVKYVTEGMRKPAFLSGEQKKAIVDLLFKTNRKVTVKQLKEDYFKKIECFDSVEISGVEDRFNASLGTYHDLLKIIKDKDFLDNEENEDILEDIVLTLTLFEDREMIEERLKTYAHLFDDKVMKQLKRRRYTGWGRLSRKLINGIRDKQSGKTILDFLKSDGFANRNFMQLIHDDSLTFKEDIQKAQVSGQGDSLHEHIANLAGSPAIKKGILQTVKVVDELVKVMGRHKPENIVIEMARENQTTQKGQKNSRERMKRIEEGIKELGSQILKEHPVENTQLQNEKLYLYYLQNGRDMYVDQELDINRLSDYDVDHIVPQSFLKDDSIDNKVLTRSDKARGKSDNVPSEEVVKKMKNYWRQLLNAKLITQRKFDNLTKAERGGLSELDKAGFIKRQLVETRQITKHVAQILDSRMNTKYDENDKLIREVKVITLKSKLVSDFRKDFQFYKVREINNYHHAHDAYLNAVVGTALIKKYPKLESEFVYGDYKVYDVRKMIAKSEQEIGKATAKYFFYSNIMNFFKTEITLANGEIRKRPLIETNGETGEIVWDKGRDFATVRKVLSMPQVNIVKKTEVQTGGFSKESILPKRNSDKLIARKKDWDPKKYGGFDSPTVAYSVLVVAKVEKGKSKKLKSVKELLGITIMERSSFEKNPIDFLEAKGYKEVKKDLIIKLPKYSLFELENGRKRMLASAGELQKGNELALPSKYVNFLYLASHYEKLKGSPEDNEQKQLFVEQHKHYLDEIIEQISEFSKRVILADANLDKVLSAYNKHRDKPIREQAENIIHLFTLTNLGAPAAFKYFDTTIDRKRYTSTKEVLDATLIHQSITGLYETRIDLSQLGGDGGEAAAKEAAAKEAAAKEAAAKGGTLGIEDEYRLHETSTEPDVSLGSTWLSDFPQAWAETGGMGLAVRQAPLIIPLKATSTPVSIQQYPMSHEARLGIKPHIQRLLDQGILVPCQSPWNTPLLPVKKPGTNDYRPVQDLREVNKRVEDIHPTVPNPYNLLSGLPPSHQWYTVLDLKDAFFCLRLHPTSQPLFAFEWRDPGMGISGQLTWTRLPQGFKNSPTLFNEALHRDLADFRIQHPDLILLQYVDDILLAATSELDCQQGTRALLQTLGDLGYRASAKKAQICQKQVKYLGYLLREGQRWLTEARKETVMGQPVPKTPRQLREFLGTAGFCRLWIPGFAEMAAPLYPLTKPGTLFSWGPDQQKAYQEIKQALLTAPALGLPDLTKPFELFVDEKQGYAKGVLTQKLGPWRRPVAYLSKKLDPVAAGWPPCLRMVAAIAVLTKDAGKLTMGQPLVILAPHAVEALVKQPPDRWLSNARMTHYQAMLLDTDRVQFGPVVALNPATLLPLPEEGAPHDCLEILAETHGTRPDLTDQPIPDADHTWYTDGSSFLQEGQRKAGAAVTTETEVIWAGALPAGTSAQRAELIALTQALKMAEGKRLNVYTDSRYAFATAHIHGEIYRRRGWLTSEGREIKNKSEILALLKALFLPKRLSIIHCLGHQKGDSAEARGNRLADQAAREAAIKTPPDTSTLLAGKRTADGSEFEKRTADGSEFESPKKKAKVE

SEQ ID NO: 2071 - protein, 2096 aa, synthetic construct
MPAAKRVKLDGGDKKYSIGLDIGTNSVGWAVITDEYKVPSKKFKVLGNTDRHSIKKNLIGALLFDSGETAEATRLKRTARRRYTRRKNRICYLQEIFSNEMAKVDDSFFHRLEESFLVEEDKKHERHPIFGNIVDEVAYHEKYPTIYHLRKKLVDSTDKADLRLIYLALAHMIKFRGHFLIEGDLNPDNSDVDKLFIQLVQTYNQLFEENPINASGVDAKAILSARLSKSRRLENLIAQLPGEKKNGLFGNLIALSLGLTPNFKSNFDLAEDAKLQLSKDTYDDDLDNLLAQIGDQYADLFLAAKNLSDAILLSDILRVNTEITKAPLSASMIKRYDEHHQDLTLLKALVRQQLPEKYKEIFFDQSKNGYAGYIDGGASQEEFYKFIKPILEKMDGTEELLVKLNREDLLRKQRTFDNGSIPHQIHLGELHAILRRQEDFYPFLKDNREKIEKILTFRIPYYVGPLARGNSRFAWMTRKSEETITPWNFEEVVDKGASAQSFIERMTNFDKNLPNEKVLPKHSLLYEYFTVYNELTKVKYVTEGMRKPAFLSGEQKKAIVDLLFKTNRKVTVKQLKEDYFKKIECFDSVEISGVEDRFNASLGTYHDLLKIIKDKDFLDNEENEDILEDIVLTLTLFEDREMIEERLKTYAHLFDDKVMKQLKRRRYTGWGRLSRKLINGIRDKQSGKTILDFLKSDGFANRNFMQLIHDDSLTFKEDIQKAQVSGQGDSLHEHIANLAGSPAIKKGILQTVKVVDELVKVMGRHKPENIVIEMARENQTTQKGQKNSRERMKRIEEGIKELGSQILKEHPVENTQLQNEKLYLYYLQNGRDMYVDQELDINRLSDYDVDHIVPQSFLKDDSIDNKVLTRSDKARGKSDNVPSEEVVKKMKNYWRQLLNAKLITQRKFDNLTKAERGGLSELDKAGFIKRQLVETRQITKHVAQILDSRMNTKYDENDKLIREVKVITLKSKLVSDFRKDFQFYKVREINNYHHAHDAYLNAVVGTALIKKYPKLESEFVYGDYKVYDVRKMIAKSEQEIGKATAKYFFYSNIMNFFKTEITLANGEIRKRPLIETNGETGEIVWDKGRDFATVRKVLSMPQVNIVKKTEVQTGGFSKESILPKRNSDKLIARKKDWDPKKYGGFDSPTVAYSVLVVAKVEKGKSKKLKSVKELLGITIMERSSFEKNPIDFLEAKGYKEVKKDLIIKLPKYSLFELENGRKRMLASAGELQKGNELALPSKYVNFLYLASHYEKLKGSPEDNEQKQLFVEQHKHYLDEIIEQISEFSKRVILADANLDKVLSAYNKHRDKPIREQAENIIHLFTLTNLGAPAAFKYFDTTIDRKRYTSTKEVLDATLIHQSITGLYETRIDLSQLGGDGGGGSEAAAKPAPGGTLGIEDEYRLHETSTEPDVSLGSTWLSDFPQAWAETGGMGLAVRQAPLIIPLKATSTPVSIQQYPMSHEARLGIKPHIQRLLDQGILVPCQSPWNTPLLPVKKPGTNDYRPVQDLREVNKRVEDIHPTVPNPYNLLSGLPPSHQWYTVLDLKDAFFCLRLHPTSQPLFAFEWRDPGMGISGQLTWTRLPQGFKNSPTLFNEALHRDLADFRIQHPDLILLQYVDDILLAATSELDCQQGTRALLQTLGDLGYRASAKKAQICQKQVKYLGYLLREGQRWLTEARKETVMGQPVPKTPRQLREFLGTAGFCRLWIPGFAEMAAPLYPLTKPGTLFSWGPDQQKAYQEIKQALLTAPALGLPDLTKPFELFVDEKQGYAKGVLTQKLGPWRRPVAYLSKKLDPVAAGWPPCLRMVAAIAVLTKDAGKLTMGQPLVILAPHAVEALVKQPPDRWLSNARMTHYQAMLLDTDRVQFGPVVALNPATLLPLPEEGAPHDCLEILAETHGTRPDLTDQPIPDADHTWYTDGSSFLQEGQRKAGAAVTTETEVIWAGALPAGTSAQRAELIALTQALKMAEGKRLNVYTDSRYAFATAHIHGEIYRRRGWLTSEGREIKNKSEILALLKALFLPKRLSIIHCLGHQKGDSAEARGNRLADQAAREAAIKTPPDTSTLLAGKRTADGSEFEKRTADGSEFESPKKKAKVE

SEQ ID NO: 2072 - protein, 2105 aa, synthetic construct
MPAAKRVKLDGGDKKYSIGLDIGTNSVGWAVITDEYKVPSKKFKVLGNTDRHSIKKNLIGALLFDSGETAEATRLKRTARRRYTRRKNRICYLQEIFSNEMAKVDDSFFHRLEESFLVEEDKKHERHPIFGNIVDEVAYHEKYPTIYHLRKKLVDSTDKADLRLIYLALAHMIKFRGHFLIEGDLNPDNSDVDKLFIQLVQTYNQLFEENPINASGVDAKAILSARLSKSRRLENLIAQLPGEKKNGLFGNLIALSLGLTPNFKSNFDLAEDAKLQLSKDTYDDDLDNLLAQIGDQYADLFLAAKNLSDAILLSDILRVNTEITKAPLSASMIKRYDEHHQDLTLLKALVRQQLPEKYKEIFFDQSKNGYAGYIDGGASQEEFYKFIKPILEKMDGTEELLVKLNREDLLRKQRTFDNGSIPHQIHLGELHAILRRQEDFYPFLKDNREKIEKILTFRIPYYVGPLARGNSRFAWMTRKSEETITPWNFEEVVDKGASAQSFIERMTNFDKNLPNEKVLPKHSLLYEYFTVYNELTKVKYVTEGMRKPAFLSGEQKKAIVDLLFKTNRKVTVKQLKEDYFKKIECFDSVEISGVEDRFNASLGTYHDLLKIIKDKDFLDNEENEDILEDIVLTLTLFEDREMIEERLKTYAHLFDDKVMKQLKRRRYTGWGRLSRKLINGIRDKQSGKTILDFLKSDGFANRNFMQLIHDDSLTFKEDIQKAQVSGQGDSLHEHIANLAGSPAIKKGILQTVKVVDELVKVMGRHKPENIVIEMARENQTTQKGQKNSRERMKRIEEGIKELGSQILKEHPVENTQLQNEKLYLYYLQNGRDMYVDQELDINRLSDYDVDHIVPQSFLKDDSIDNKVLTRSDKARGKSDNVPSEEVVKKMKNYWRQLLNAKLITQRKFDNLTKAERGGLSELDKAGFIKRQLVETRQITKHVAQILDSRMNTKYDENDKLIREVKVITLKSKLVSDFRKDFQFYKVREINNYHHAHDAYLNAVVGTALIKKYPKLESEFVYGDYKVYDVRKMIAKSEQEIGKATAKYFFYSNIMNFFKTEITLANGEIRKRPLIETNGETGEIVWDKGRDFATVRKVLSMPQVNIVKKTEVQTGGFSKESILPKRNSDKLIARKKDWDPKKYGGFDSPTVAYSVLVVAKVEKGKSKKLKSVKELLGITIMERSSFEKNPIDFLEAKGYKEVKKDLIIKLPKYSLFELENGRKRMLASAGELQKGNELALPSKYVNFLYLASHYEKLKGSPEDNEQKQLFVEQHKHYLDEIIEQISEFSKRVILADANLDKVLSAYNKHRDKPIREQAENIIHLFTLTNLGAPAAFKYFDTTIDRKRYTSTKEVLDATLIHQSITGLYETRIDLSQLGGDGGGGGGSGGGGSGGGGSGGGGSGGTLGIEDEYRLHETSTEPDVSLGSTWLSDFPQAWAETGGMGLAVRQAPLIIPLKATSTPVSIQQYPMSHEARLGIKPHIQRLLDQGILVPCQSPWNTPLLPVKKPGTNDYRPVQDLREVNKRVEDIHPTVPNPYNLLSGLPPSHQWYTVLDLKDAFFCLRLHPTSQPLFAFEWRDPGMGISGQLTWTRLPQGFKNSPTLFNEALHRDLADFRIQHPDLILLQYVDDILLAATSELDCQQGTRALLQTLGDLGYRASAKKAQICQKQVKYLGYLLREGQRWLTEARKETVMGQPVPKTPRQLREFLGTAGFCRLWIPGFAEMAAPLYPLTKPGTLFSWGPDQQKAYQEIKQALLTAPALGLPDLTKPFELFVDEKQGYAKGVLTQKLGPWRRPVAYLSKKLDPVAAGWPPCLRMVAAIAVLTKDAGKLTMGQPLVILAPHAVEALVKQPPDRWLSNARMTHYQAMLLDTDRVQFGPVVALNPATLLPLPEEGAPHDCLEILAETHGTRPDLTDQPIPDADHTWYTDGSSFLQEGQRKAGAAVTTETEVIWAGALPAGTSAQRAELIALTQALKMAEGKRLNVYTDSRYAFATAHIHGEIYRRRGWLTSEGREIKNKSEILALLKALFLPKRLSIIHCLGHQKGDSAEARGNRLADQAAREAAIKTPPDTSTLLAGKRTADGSEFEKRTADGSEFESPKKKAKVE

SEQ ID NO: 2073 - protein, 2093 aa, synthetic construct
MPAAKRVKLDGGDKKYSIGLDIGTNSVGWAVITDEYKVPSKKFKVLGNTDRHSIKKNLIGALLFDSGETAEATRLKRTARRRYTRRKNRICYLQEIFSNEMAKVDDSFFHRLEESFLVEEDKKHERHPIFGNIVDEVAYHEKYPTIYHLRKKLVDSTDKADLRLIYLALAHMIKFRGHFLIEGDLNPDNSDVDKLFIQLVQTYNQLFEENPINASGVDAKAILSARLSKSRRLENLIAQLPGEKKNGLFGNLIALSLGLTPNFKSNFDLAEDAKLQLSKDTYDDDLDNLLAQIGDQYADLFLAAKNLSDAILLSDILRVNTEITKAPLSASMIKRYDEHHQDLTLLKALVRQQLPEKYKEIFFDQSKNGYAGYIDGGASQEEFYKFIKPILEKMDGTEELLVKLNREDLLRKQRTFDNGSIPHQIHLGELHAILRRQEDFYPFLKDNREKIEKILTFRIPYYVGPLARGNSRFAWMTRKSEETITPWNFEEVVDKGASAQSFIERMTNFDKNLPNEKVLPKHSLLYEYFTVYNELTKVKYVTEGMRKPAFLSGEQKKAIVDLLFKTNRKVTVKQLKEDYFKKIECFDSVEISGVEDRFNASLGTYHDLLKIIKDKDFLDNEENEDILEDIVLTLTLFEDREMIEERLKTYAHLFDDKVMKQLKRRRYTGWGRLSRKLINGIRDKQSGKTILDFLKSDGFANRNFMQLIHDDSLTFKEDIQKAQVSGQGDSLHEHIANLAGSPAIKKGILQTVKVVDELVKVMGRHKPENIVIEMARENQTTQKGQKNSRERMKRIEEGIKELGSQILKEHPVENTQLQNEKLYLYYLQNGRDMYVDQELDINRLSDYDVDHIVPQSFLKDDSIDNKVLTRSDKARGKSDNVPSEEVVKKMKNYWRQLLNAKLITQRKFDNLTKAERGGLSELDKAGFIKRQLVETRQITKHVAQILDSRMNTKYDENDKLIREVKVITLKSKLVSDFRKDFQFYKVREINNYHHAHDAYLNAVVGTALIKKYPKLESEFVYGDYKVYDVRKMIAKSEQEIGKATAKYFFYSNIMNFFKTEITLANGEIRKRPLIETNGETGEIVWDKGRDFATVRKVLSMPQVNIVKKTEVQTGGFSKESILPKRNSDKLIARKKDWDPKKYGGFDSPTVAYSVLVVAKVEKGKSKKLKSVKELLGITIMERSSFEKNPIDFLEAKGYKEVKKDLIIKLPKYSLFELENGRKRMLASAGELQKGNELALPSKYVNFLYLASHYEKLKGSPEDNEQKQLFVEQHKHYLDEIIEQISEFSKRVILADANLDKVLSAYNKHRDKPIREQAENIIHLFTLTNLGAPAAFKYFDTTIDRKRYTSTKEVLDATLIHQSITGLYETRIDLSQLGGDGGGSSEAAAKGGTLGIEDEYRLHETSTEPDVSLGSTWLSDFPQAWAETGGMGLAVRQAPLIIPLKATSTPVSIQQYPMSHEARLGIKPHIQRLLDQGILVPCQSPWNTPLLPVKKPGTNDYRPVQDLREVNKRVEDIHPTVPNPYNLLSGLPPSHQWYTVLDLKDAFFCLRLHPTSQPLFAFEWRDPGMGISGQLTWTRLPQGFKNSPTLFNEALHRDLADFRIQHPDLILLQYVDDILLAATSELDCQQGTRALLQTLGDLGYRASAKKAQICQKQVKYLGYLLREGQRWLTEARKETVMGQPVPKTPRQLREFLGTAGFCRLWIPGFAEMAAPLYPLTKPGTLFSWGPDQQKAYQEIKQALLTAPALGLPDLTKPFELFVDEKQGYAKGVLTQKLGPWRRPVAYLSKKLDPVAAGWPPCLRMVAAIAVLTKDAGKLTMGQPLVILAPHAVEALVKQPPDRWLSNARMTHYQAMLLDTDRVQFGPVVALNPATLLPLPEEGAPHDCLEILAETHGTRPDLTDQPIPDADHTWYTDGSSFLQEGQRKAGAAVTTETEVIWAGALPAGTSAQRAELIALTQALKMAEGKRLNVYTDSRYAFATAHIHGEIYRRRGWLTSEGREIKNKSEILALLKALFLPKRLSIIHCLGHQKGDSAEARGNRLADQAAREAAIKTPPDTSTLLAGKRTADGSEFEKRTADGSEFESPKKKAKVE

SEQ ID NO: 2074 - protein, 2096 aa, synthetic construct
MPAAKRVKLDGGDKKYSIGLDIGTNSVGWAVITDEYKVPSKKFKVLGNTDRHSIKKNLIGALLFDSGETAEATRLKRTARRRYTRRKNRICYLQEIFSNEMAKVDDSFFHRLEESFLVEEDKKHERHPIFGNIVDEVAYHEKYPTIYHLRKKLVDSTDKADLRLIYLALAHMIKFRGHFLIEGDLNPDNSDVDKLFIQLVQTYNQLFEENPINASGVDAKAILSARLSKSRRLENLIAQLPGEKKNGLFGNLIALSLGLTPNFKSNFDLAEDAKLQLSKDTYDDDLDNLLAQIGDQYADLFLAAKNLSDAILLSDILRVNTEITKAPLSASMIKRYDEHHQDLTLLKALVRQQLPEKYKEIFFDQSKNGYAGYIDGGASQEEFYKFIKPILEKMDGTEELLVKLNREDLLRKQRTFDNGSIPHQIHLGELHAILRRQEDFYPFLKDNREKIEKILTFRIPYYVGPLARGNSRFAWMTRKSEETITPWNFEEVVDKGASAQSFIERMTNFDKNLPNEKVLPKHSLLYEYFTVYNELTKVKYVTEGMRKPAFLSGEQKKAIVDLLFKTNRKVTVKQLKEDYFKKIECFDSVEISGVEDRFNASLGTYHDLLKIIKDKDFLDNEENEDILEDIVLTLTLFEDREMIEERLKTYAHLFDDKVMKQLKRRRYTGWGRLSRKLINGIRDKQSGKTILDFLKSDGFANRNFMQLIHDDSLTFKEDIQKAQVSGQGDSLHEHIANLAGSPAIKKGILQTVKVVDELVKVMGRHKPENIVIEMARENQTTQKGQKNSRERMKRIEEGIKELGSQILKEHPVENTQLQNEKLYLYYLQNGRDMYVDQELDINRLSDYDVDHIVPQSFLKDDSIDNKVLTRSDKARGKSDNVPSEEVVKKMKNYWRQLLNAKLITQRKFDNLTKAERGGLSELDKAGFIKRQLVETRQITKHVAQILDSRMNTKYDENDKLIREVKVITLKSKLVSDFRKDFQFYKVREINNYHHAHDAYLNAVVGTALIKKYPKLESEFVYGDYKVYDVRKMIAKSEQEIGKATAKYFFYSNIMNFFKTEITLANGEIRKRPLIETNGETGEIVWDKGRDFATVRKVLSMPQVNIVKKTEVQTGGFSKESILPKRNSDKLIARKKDWDPKKYGGFDSPTVAYSVLVVAKVEKGKSKKLKSVKELLGITIMERSSFEKNPIDFLEAKGYKEVKKDLIIKLPKYSLFELENGRKRMLASAGELQKGNELALPSKYVNFLYLASHYEKLKGSPEDNEQKQLFVEQHKHYLDEIIEQISEFSKRVILADANLDKVLSAYNKHRDKPIREQAENIIHLFTLTNLGAPAAFKYFDTTIDRKRYTSTKEVLDATLIHQSITGLYETRIDLSQLGGDGGGGSEAAAKGGGGGTLGIEDEYRLHETSTEPDVSLGSTWLSDFPQAWAETGGMGLAVRQAPLIIPLKATSTPVSIQQYPMSHEARLGIKPHIQRLLDQGILVPCQSPWNTPLLPVKKPGTNDYRPVQDLREVNKRVEDIHPTVPNPYNLLSGLPPSHQWYTVLDLKDAFFCLRLHPTSQPLFAFEWRDPGMGISGQLTWTRLPQGFKNSPTLFNEALHRDLADFRIQHPDLILLQYVDDILLAATSELDCQQGTRALLQTLGDLGYRASAKKAQICQKQVKYLGYLLREGQRWLTEARKETVMGQPVPKTPRQLREFLGTAGFCRLWIPGFAEMAAPLYPLTKPGTLFSWGPDQQKAYQEIKQALLTAPALGLPDLTKPFELFVDEKQGYAKGVLTQKLGPWRRPVAYLSKKLDPVAAGWPPCLRMVAAIAVLTKDAGKLTMGQPLVILAPHAVEALVKQPPDRWLSNARMTHYQAMLLDTDRVQFGPVVALNPATLLPLPEEGAPHDCLEILAETHGTRPDLTDQPIPDADHTWYTDGSSFLQEGQRKAGAAVTTETEVIWAGALPAGTSAQRAELIALTQALKMAEGKRLNVYTDSRYAFATAHIHGEIYRRRGWLTSEGREIKNKSEILALLKALFLPKRLSIIHCLGHQKGDSAEARGNRLADQAAREAAIKTPPDTSTLLAGKRTADGSEFEKRTADGSEFESPKKKAKVE

SEQ ID NO: 2075 - protein, 2096 aa, synthetic construct
MPAAKRVKLDGGDKKYSIGLDIGTNSVGWAVITDEYKVPSKKFKVLGNTDRHSIKKNLIGALLFDSGETAEATRLKRTARRRYTRRKNRICYLQEIFSNEMAKVDDSFFHRLEESFLVEEDKKHERHPIFGNIVDEVAYHEKYPTIYHLRKKLVDSTDKADLRLIYLALAHMIKFRGHFLIEGDLNPDNSDVDKLFIQLVQTYNQLFEENPINASGVDAKAILSARLSKSRRLENLIAQLPGEKKNGLFGNLIALSLGLTPNFKSNFDLAEDAKLQLSKDTYDDDLDNLLAQIGDQYADLFLAAKNLSDAILLSDILRVNTEITKAPLSASMIKRYDEHHQDLTLLKALVRQQLPEKYKEIFFDQSKNGYAGYIDGGASQEEFYKFIKPILEKMDGTEELLVKLNREDLLRKQRTFDNGSIPHQIHLGELHAILRRQEDFYPFLKDNREKIEKILTFRIPYYVGPLARGNSRFAWMTRKSEETITPWNFEEVVDKGASAQSFIERMTNFDKNLPNEKVLPKHSLLYEYFTVYNELTKVKYVTEGMRKPAFLSGEQKKAIVDLLFKTNRKVTVKQLKEDYFKKIECFDSVEISGVEDRFNASLGTYHDLLKIIKDKDFLDNEENEDILEDIVLTLTLFEDREMIEERLKTYAHLFDDKVMKQLKRRRYTGWGRLSRKLINGIRDKQSGKTILDFLKSDGFANRNFMQLIHDDSLTFKEDIQKAQVSGQGDSLHEHIANLAGSPAIKKGILQTVKVVDELVKVMGRHKPENIVIEMARENQTTQKGQKNSRERMKRIEEGIKELGSQILKEHPVENTQLQNEKLYLYYLQNGRDMYVDQELDINRLSDYDVDHIVPQSFLKDDSIDNKVLTRSDKARGKSDNVPSEEVVKKMKNYWRQLLNAKLITQRKFDNLTKAERGGLSELDKAGFIKRQLVETRQITKHVAQILDSRMNTKYDENDKLIREVKVITLKSKLVSDFRKDFQFYKVREINNYHHAHDAYLNAVVGTALIKKYPKLESEFVYGDYKVYDVRKMIAKSEQEIGKATAKYFFYSNIMNFFKTEITLANGEIRKRPLIETNGETGEIVWDKGRDFATVRKVLSMPQVNIVKKTEVQTGGFSKESILPKRNSDKLIARKKDWDPKKYGGFDSPTVAYSVLVVAKVEKGKSKKLKSVKELLGITIMERSSFEKNPIDFLEAKGYKEVKKDLIIKLPKYSLFELENGRKRMLASAGELQKGNELALPSKYVNFLYLASHYEKLKGSPEDNEQKQLFVEQHKHYLDEIIEQISEFSKRVILADANLDKVLSAYNKHRDKPIREQAENIIHLFTLTNLGAPAAFKYFDTTIDRKRYTSTKEVLDATLIHQSITGLYETRIDLSQLGGDGGGSSEAAAKGGGGGTLGIEDEYRLHETSTEPDVSLGSTWLSDFPQAWAETGGMGLAVRQAPLIIPLKATSTPVSIQQYPMSHEARLGIKPHIQRLLDQGILVPCQSPWNTPLLPVKKPGTNDYRPVQDLREVNKRVEDIHPTVPNPYNLLSGLPPSHQWYTVLDLKDAFFCLRLHPTSQPLFAFEWRDPGMGISGQLTWTRLPQGFKNSPTLFNEALHRDLADFRIQHPDLILLQYVDDILLAATSELDCQQGTRALLQTLGDLGYRASAKKAQICQKQVKYLGYLLREGQRWLTEARKETVMGQPVPKTPRQLREFLGTAGFCRLWIPGFAEMAAPLYPLTKPGTLFSWGPDQQKAYQEIKQALLTAPALGLPDLTKPFELFVDEKQGYAKGVLTQKLGPWRRPVAYLSKKLDPVAAGWPPCLRMVAAIAVLTKDAGKLTMGQPLVILAPHAVEALVKQPPDRWLSNARMTHYQAMLLDTDRVQFGPVVALNPATLLPLPEEGAPHDCLEILAETHGTRPDLTDQPIPDADHTWYTDGSSFLQEGQRKAGAAVTTETEVIWAGALPAGTSAQRAELIALTQALKMAEGKRLNVYTDSRYAFATAHIHGEIYRRRGWLTSEGREIKNKSEILALLKALFLPKRLSIIHCLGHQKGDSAEARGNRLADQAAREAAIKTPPDTSTLLAGKRTADGSEFEKRTADGSEFESPKKKAKVE

SEQ ID NO: 2076 - protein, 2096 aa, synthetic construct
MPAAKRVKLDGGDKKYSIGLDIGTNSVGWAVITDEYKVPSKKFKVLGNTDRHSIKKNLIGALLFDSGETAEATRLKRTARRRYTRRKNRICYLQEIFSNEMAKVDDSFFHRLEESFLVEEDKKHERHPIFGNIVDEVAYHEKYPTIYHLRKKLVDSTDKADLRLIYLALAHMIKFRGHFLIEGDLNPDNSDVDKLFIQLVQTYNQLFEENPINASGVDAKAILSARLSKSRRLENLIAQLPGEKKNGLFGNLIALSLGLTPNFKSNFDLAEDAKLQLSKDTYDDDLDNLLAQIGDQYADLFLAAKNLSDAILLSDILRVNTEITKAPLSASMIKRYDEHHQDLTLLKALVRQQLPEKYKEIFFDQSKNGYAGYIDGGASQEEFYKFIKPILEKMDGTEELLVKLNREDLLRKQRTFDNGSIPHQIHLGELHAILRRQEDFYPFLKDNREKIEKILTFRIPYYVGPLARGNSRFAWMTRKSEETITPWNFEEVVDKGASAQSFIERMTNFDKNLPNEKVLPKHSLLYEYFTVYNELTKVKYVTEGMRKPAFLSGEQKKAIVDLLFKTNRKVTVKQLKEDYFKKIECFDSVEISGVEDRFNASLGTYHDLLKIIKDKDFLDNEENEDILEDIVLTLTLFEDREMIEERLKTYAHLFDDKVMKQLKRRRYTGWGRLSRKLINGIRDKQSGKTILDFLKSDGFANRNFMQLIHDDSLTFKEDIQKAQVSGQGDSLHEHIANLAGSPAIKKGILQTVKVVDELVKVMGRHKPENIVIEMARENQTTQKGQKNSRERMKRIEEGIKELGSQILKEHPVENTQLQNEKLYLYYLQNGRDMYVDQELDINRLSDYDVDHIVPQSFLKDDSIDNKVLTRSDKARGKSDNVPSEEVVKKMKNYWRQLLNAKLITQRKFDNLTKAERGGLSELDKAGFIKRQLVETRQITKHVAQILDSRMNTKYDENDKLIREVKVITLKSKLVSDFRKDFQFYKVREINNYHHAHDAYLNAVVGTALIKKYPKLESEFVYGDYKVYDVRKMIAKSEQEIGKATAKYFFYSNIMNFFKTEITLANGEIRKRPLIETNGETGEIVWDKGRDFATVRKVLSMPQVNIVKKTEVQTGGFSKESILPKRNSDKLIARKKDWDPKKYGGFDSPTVAYSVLVVAKVEKGKSKKLKSVKELLGITIMERSSFEKNPIDFLEAKGYKEVKKDLIIKLPKYSLFELENGRKRMLASAGELQKGNELALPSKYVNFLYLASHYEKLKGSPEDNEQKQLFVEQHKHYLDEIIEQISEFSKRVILADANLDKVLSAYNKHRDKPIREQAENIIHLFTLTNLGAPAAFKYFDTTIDRKRYTSTKEVLDATLIHQSITGLYETRIDLSQLGGDGGGSSGGSEAAAKGGTLGIEDEYRLHETSTEPDVSLGSTWLSDFPQAWAETGGMGLAVRQAPLIIPLKATSTPVSIQQYPMSHEARLGIKPHIQRLLDQGILVPCQSPWNTPLLPVKKPGTNDYRPVQDLREVNKRVEDIHPTVPNPYNLLSGLPPSHQWYTVLDLKDAFFCLRLHPTSQPLFAFEWRDPGMGISGQLTWTRLPQGFKNSPTLFNEALHRDLADFRIQHPDLILLQYVDDILLAATSELDCQQGTRALLQTLGDLGYRASAKKAQICQKQVKYLGYLLREGQRWLTEARKETVMGQPVPKTPRQLREFLGTAGFCRLWIPGFAEMAAPLYPLTKPGTLFSWGPDQQKAYQEIKQALLTAPALGLPDLTKPFELFVDEKQGYAKGVLTQKLGPWRRPVAYLSKKLDPVAAGWPPCLRMVAAIAVLTKDAGKLTMGQPLVILAPHAVEALVKQPPDRWLSNARMTHYQAMLLDTDRVQFGPVVALNPATLLPLPEEGAPHDCLEILAETHGTRPDLTDQPIPDADHTWYTDGSSFLQEGQRKAGAAVTTETEVIWAGALPAGTSAQRAELIALTQALKMAEGKRLNVYTDSRYAFATAHIHGEIYRRRGWLTSEGREIKNKSEILALLKALFLPKRLSIIHCLGHQKGDSAEARGNRLADQAAREAAIKTPPDTSTLLAGKRTADGSEFEKRTADGSEFESPKKKAKVE

SEQ ID NO: 2077 - protein, 2090 aa, synthetic construct
MPAAKRVKLDGGDKKYSIGLDIGTNSVGWAVITDEYKVPSKKFKVLGNTDRHSIKKNLIGALLFDSGETAEATRLKRTARRRYTRRKNRICYLQEIFSNEMAKVDDSFFHRLEESFLVEEDKKHERHPIFGNIVDEVAYHEKYPTIYHLRKKLVDSTDKADLRLIYLALAHMIKFRGHFLIEGDLNPDNSDVDKLFIQLVQTYNQLFEENPINASGVDAKAILSARLSKSRRLENLIAQLPGEKKNGLFGNLIALSLGLTPNFKSNFDLAEDAKLQLSKDTYDDDLDNLLAQIGDQYADLFLAAKNLSDAILLSDILRVNTEITKAPLSASMIKRYDEHHQDLTLLKALVRQQLPEKYKEIFFDQSKNGYAGYIDGGASQEEFYKFIKPILEKMDGTEELLVKLNREDLLRKQRTFDNGSIPHQIHLGELHAILRRQEDFYPFLKDNREKIEKILTFRIPYYVGPLARGNSRFAWMTRKSEETITPWNFEEVVDKGASAQSFIERMTNFDKNLPNEKVLPKHSLLYEYFTVYNELTKVKYVTEGMRKPAFLSGEQKKAIVDLLFKTNRKVTVKQLKEDYFKKIECFDSVEISGVEDRFNASLGTYHDLLKIIKDKDFLDNEENEDILEDIVLTLTLFEDREMIEERLKTYAHLFDDKVMKQLKRRRYTGWGRLSRKLINGIRDKQSGKTILDFLKSDGFANRNFMQLIHDDSLTFKEDIQKAQVSGQGDSLHEHIANLAGSPAIKKGILQTVKVVDELVKVMGRHKPENIVIEMARENQTTQKGQKNSRERMKRIEEGIKELGSQILKEHPVENTQLQNEKLYLYYLQNGRDMYVDQELDINRLSDYDVDHIVPQSFLKDDSIDNKVLTRSDKARGKSDNVPSEEVVKKMKNYWRQLLNAKLITQRKFDNLTKAERGGLSELDKAGFIKRQLVETRQITKHVAQILDSRMNTKYDENDKLIREVKVITLKSKLVSDFRKDFQFYKVREINNYHHAHDAYLNAVVGTALIKKYPKLESEFVYGDYKVYDVRKMIAKSEQEIGKATAKYFFYSNIMNFFKTEITLANGEIRKRPLIETNGETGEIVWDKGRDFATVRKVLSMPQVNIVKKTEVQTGGFSKESILPKRNSDKLIARKKDWDPKKYGGFDSPTVAYSVLVVAKVEKGKSKKLKSVKELLGITIMERSSFEKNPIDFLEAKGYKEVKKDLIIKLPKYSLFELENGRKRMLASAGELQKGNELALPSKYVNFLYLASHYEKLKGSPEDNEQKQLFVEQHKHYLDEIIEQISEFSKRVILADANLDKVLSAYNKHRDKPIREQAENIIHLFTLTNLGAPAAFKYFDTTIDRKRYTSTKEVLDATLIHQSITGLYETRIDLSQLGGDGGPAPAPGGTLGIEDEYRLHETSTEPDVSLGSTWLSDFPQAWAETGGMGLAVRQAPLIIPLKATSTPVSIQQYPMSHEARLGIKPHIQRLLDQGILVPCQSPWNTPLLPVKKPGTNDYRPVQDLREVNKRVEDIHPTVPNPYNLLSGLPPSHQWYTVLDLKDAFFCLRLHPTSQPLFAFEWRDPGMGISGQLTWTRLPQGFKNSPTLFNEALHRDLADFRIQHPDLILLQYVDDILLAATSELDCQQGTRALLQTLGDLGYRASAKKAQICQKQVKYLGYLLREGQRWLTEARKETVMGQPVPKTPRQLREFLGTAGFCRLWIPGFAEMAAPLYPLTKPGTLFSWGPDQQKAYQEIKQALLTAPALGLPDLTKPFELFVDEKQGYAKGVLTQKLGPWRRPVAYLSKKLDPVAAGWPPCLRMVAAIAVLTKDAGKLTMGQPLVILAPHAVEALVKQPPDRWLSNARMTHYQAMLLDTDRVQFGPVVALNPATLLPLPEEGAPHDCLEILAETHGTRPDLTDQPIPDADHTWYTDGSSFLQEGQRKAGAAVTTETEVIWAGALPAGTSAQRAELIALTQALKMAEGKRLNVYTDSRYAFATAHIHGEIYRRRGWLTSEGREIKNKSEILALLKALFLPKRLSIIHCLGHQKGDSAEARGNRLADQAAREAAIKTPPDTSTLLAGKRTADGSEFEKRTADGSEFESPKKKAKVE

SEQ ID NO: 2078 - protein, 2091 aa, synthetic construct
MPAAKRVKLDGGDKKYSIGLDIGTNSVGWAVITDEYKVPSKKFKVLGNTDRHSIKKNLIGALLFDSGETAEATRLKRTARRRYTRRKNRICYLQEIFSNEMAKVDDSFFHRLEESFLVEEDKKHERHPIFGNIVDEVAYHEKYPTIYHLRKKLVDSTDKADLRLIYLALAHMIKFRGHFLIEGDLNPDNSDVDKLFIQLVQTYNQLFEENPINASGVDAKAILSARLSKSRRLENLIAQLPGEKKNGLFGNLIALSLGLTPNFKSNFDLAEDAKLQLSKDTYDDDLDNLLAQIGDQYADLFLAAKNLSDAILLSDILRVNTEITKAPLSASMIKRYDEHHQDLTLLKALVRQQLPEKYKEIFFDQSKNGYAGYIDGGASQEEFYKFIKPILEKMDGTEELLVKLNREDLLRKQRTFDNGSIPHQIHLGELHAILRRQEDFYPFLKDNREKIEKILTFRIPYYVGPLARGNSRFAWMTRKSEETITPWNFEEVVDKGASAQSFIERMTNFDKNLPNEKVLPKHSLLYEYFTVYNELTKVKYVTEGMRKPAFLSGEQKKAIVDLLFKTNRKVTVKQLKEDYFKKIECFDSVEISGVEDRFNASLGTYHDLLKIIKDKDFLDNEENEDILEDIVLTLTLFEDREMIEERLKTYAHLFDDKVMKQLKRRRYTGWGRLSRKLINGIRDKQSGKTILDFLKSDGFANRNFMQLIHDDSLTFKEDIQKAQVSGQGDSLHEHIANLAGSPAIKKGILQTVKVVDELVKVMGRHKPENIVIEMARENQTTQKGQKNSRERMKRIEEGIKELGSQILKEHPVENTQLQNEKLYLYYLQNGRDMYVDQELDINRLSDYDVDHIVPQSFLKDDSIDNKVLTRSDKARGKSDNVPSEEVVKKMKNYWRQLLNAKLITQRKFDNLTKAERGGLSELDKAGFIKRQLVETRQITKHVAQILDSRMNTKYDENDKLIREVKVITLKSKLVSDFRKDFQFYKVREINNYHHAHDAYLNAVVGTALIKKYPKLESEFVYGDYKVYDVRKMIAKSEQEIGKATAKYFFYSNIMNFFKTEITLANGEIRKRPLIETNGETGEIVWDKGRDFATVRKVLSMPQVNIVKKTEVQTGGFSKESILPKRNSDKLIARKKDWDPKKYGGFDSPTVAYSVLVVAKVEKGKSKKLKSVKELLGITIMERSSFEKNPIDFLEAKGYKEVKKDLIIKLPKYSLFELENGRKRMLASAGELQKGNELALPSKYVNFLYLASHYEKLKGSPEDNEQKQLFVEQHKHYLDEIIEQISEFSKRVILADANLDKVLSAYNKHRDKPIREQAENIIHLFTLTNLGAPAAFKYFDTTIDRKRYTSTKEVLDATLIHQSITGLYETRIDLSQLGGDGGPAPGGSGGTLGIEDEYRLHETSTEPDVSLGSTWLSDFPQAWAETGGMGLAVRQAPLIIPLKATSTPVSIQQYPMSHEARLGIKPHIQRLLDQGILVPCQSPWNTPLLPVKKPGTNDYRPVQDLREVNKRVEDIHPTVPNPYNLLSGLPPSHQWYTVLDLKDAFFCLRLHPTSQPLFAFEWRDPGMGISGQLTWTRLPQGFKNSPTLFNEALHRDLADFRIQHPDLILLQYVDDILLAATSELDCQQGTRALLQTLGDLGYRASAKKAQICQKQVKYLGYLLREGQRWLTEARKETVMGQPVPKTPRQLREFLGTAGFCRLWIPGFAEMAAPLYPLTKPGTLFSWGPDQQKAYQEIKQALLTAPALGLPDLTKPFELFVDEKQGYAKGVLTQKLGPWRRPVAYLSKKLDPVAAGWPPCLRMVAAIAVLTKDAGKLTMGQPLVILAPHAVEALVKQPPDRWLSNARMTHYQAMLLDTDRVQFGPVVALNPATLLPLPEEGAPHDCLEILAETHGTRPDLTDQPIPDADHTWYTDGSSFLQEGQRKAGAAVTTETEVIWAGALPAGTSAQRAELIALTQALKMAEGKRLNVYTDSRYAFATAHIHGEIYRRRGWLTSEGREIKNKSEILALLKALFLPKRLSIIHCLGHQKGDSAEARGNRLADQAAREAAIKTPPDTSTLLAGKRTADGSEFEKRTADGSEFESPKKKAKVE

SEQ ID NO: 2079 - protein, 2094 aa, synthetic construct
MPAAKRVKLDGGDKKYSIGLDIGTNSVGWAVITDEYKVPSKKFKVLGNTDRHSIKKNLIGALLFDSGETAEATRLKRTARRRYTRRKNRICYLQEIFSNEMAKVDDSFFHRLEESFLVEEDKKHERHPIFGNIVDEVAYHEKYPTIYHLRKKLVDSTDKADLRLIYLALAHMIKFRGHFLIEGDLNPDNSDVDKLFIQLVQTYNQLFEENPINASGVDAKAILSARLSKSRRLENLIAQLPGEKKNGLFGNLIALSLGLTPNFKSNFDLAEDAKLQLSKDTYDDDLDNLLAQIGDQYADLFLAAKNLSDAILLSDILRVNTEITKAPLSASMIKRYDEHHQDLTLLKALVRQQLPEKYKEIFFDQSKNGYAGYIDGGASQEEFYKFIKPILEKMDGTEELLVKLNREDLLRKQRTFDNGSIPHQIHLGELHAILRRQEDFYPFLKDNREKIEKILTFRIPYYVGPLARGNSRFAWMTRKSEETITPWNFEEVVDKGASAQSFIERMTNFDKNLPNEKVLPKHSLLYEYFTVYNELTKVKYVTEGMRKPAFLSGEQKKAIVDLLFKTNRKVTVKQLKEDYFKKIECFDSVEISGVEDRFNASLGTYHDLLKIIKDKDFLDNEENEDILEDIVLTLTLFEDREMIEERLKTYAHLFDDKVMKQLKRRRYTGWGRLSRKLINGIRDKQSGKTILDFLKSDGFANRNFMQLIHDDSLTFKEDIQKAQVSGQGDSLHEHIANLAGSPAIKKGILQTVKVVDELVKVMGRHKPENIVIEMARENQTTQKGQKNSRERMKRIEEGIKELGSQILKEHPVENTQLQNEKLYLYYLQNGRDMYVDQELDINRLSDYDVDHIVPQSFLKDDSIDNKVLTRSDKARGKSDNVPSEEVVKKMKNYWRQLLNAKLITQRKFDNLTKAERGGLSELDKAGFIKRQLVETRQITKHVAQILDSRMNTKYDENDKLIREVKVITLKSKLVSDFRKDFQFYKVREINNYHHAHDAYLNAVVGTALIKKYPKLESEFVYGDYKVYDVRKMIAKSEQEIGKATAKYFFYSNIMNFFKTEITLANGEIRKRPLIETNGETGEIVWDKGRDFATVRKVLSMPQVNIVKKTEVQTGGFSKESILPKRNSDKLIARKKDWDPKKYGGFDSPTVAYSVLVVAKVEKGKSKKLKSVKELLGITIMERSSFEKNPIDFLEAKGYKEVKKDLIIKLPKYSLFELENGRKRMLASAGELQKGNELALPSKYVNFLYLASHYEKLKGSPEDNEQKQLFVEQHKHYLDEIIEQISEFSKRVILADANLDKVLSAYNKHRDKPIREQAENIIHLFTLTNLGAPAAFKYFDTTIDRKRYTSTKEVLDATLIHQSITGLYETRIDLSQLGGDGGPAPGSSGGGGGTLGIEDEYRLHETSTEPDVSLGSTWLSDFPQAWAETGGMGLAVRQAPLIIPLKATSTPVSIQQYPMSHEARLGIKPHIQRLLDQGILVPCQSPWNTPLLPVKKPGTNDYRPVQDLREVNKRVEDIHPTVPNPYNLLSGLPPSHQWYTVLDLKDAFFCLRLHPTSQPLFAFEWRDPGMGISGQLTWTRLPQGFKNSPTLFNEALHRDLADFRIQHPDLILLQYVDDILLAATSELDCQQGTRALLQTLGDLGYRASAKKAQICQKQVKYLGYLLREGQRWLTEARKETVMGQPVPKTPRQLREFLGTAGFCRLWIPGFAEMAAPLYPLTKPGTLFSWGPDQQKAYQEIKQALLTAPALGLPDLTKPFELFVDEKQGYAKGVLTQKLGPWRRPVAYLSKKLDPVAAGWPPCLRMVAAIAVLTKDAGKLTMGQPLVILAPHAVEALVKQPPDRWLSNARMTHYQAMLLDTDRVQFGPVVALNPATLLPLPEEGAPHDCLEILAETHGTRPDLTDQPIPDADHTWYTDGSSFLQEGQRKAGAAVTTETEVIWAGALPAGTSAQRAELIALTQALKMAEGKRLNVYTDSRYAFATAHIHGEIYRRRGWLTSEGREIKNKSEILALLKALFLPKRLSIIHCLGHQKGDSAEARGNRLADQAAREAAIKTPPDTSTLLAGKRTADGSEFEKRTADGSEFESPKKKAKVE

SEQ ID NO: 2080 - protein, 2094 aa, synthetic construct
MPAAKRVKLDGGDKKYSIGLDIGTNSVGWAVITDEYKVPSKKFKVLGNTDRHSIKKNLIGALLFDSGETAEATRLKRTARRRYTRRKNRICYLQEIFSNEMAKVDDSFFHRLEESFLVEEDKKHERHPIFGNIVDEVAYHEKYPTIYHLRKKLVDSTDKADLRLIYLALAHMIKFRGHFLIEGDLNPDNSDVDKLFIQLVQTYNQLFEENPINASGVDAKAILSARLSKSRRLENLIAQLPGEKKNGLFGNLIALSLGLTPNFKSNFDLAEDAKLQLSKDTYDDDLDNLLAQIGDQYADLFLAAKNLSDAILLSDILRVNTEITKAPLSASMIKRYDEHHQDLTLLKALVRQQLPEKYKEIFFDQSKNGYAGYIDGGASQEEFYKFIKPILEKMDGTEELLVKLNREDLLRKQRTFDNGSIPHQIHLGELHAILRRQEDFYPFLKDNREKIEKILTFRIPYYVGPLARGNSRFAWMTRKSEETITPWNFEEVVDKGASAQSFIERMTNFDKNLPNEKVLPKHSLLYEYFTVYNELTKVKYVTEGMRKPAFLSGEQKKAIVDLLFKTNRKVTVKQLKEDYFKKIECFDSVEISGVEDRFNASLGTYHDLLKIIKDKDFLDNEENEDILEDIVLTLTLFEDREMIEERLKTYAHLFDDKVMKQLKRRRYTGWGRLSRKLINGIRDKQSGKTILDFLKSDGFANRNFMQLIHDDSLTFKEDIQKAQVSGQGDSLHEHIANLAGSPAIKKGILQTVKVVDELVKVMGRHKPENIVIEMARENQTTQKGQKNSRERMKRIEEGIKELGSQILKEHPVENTQLQNEKLYLYYLQNGRDMYVDQELDINRLSDYDVDHIVPQSFLKDDSIDNKVLTRSDKARGKSDNVPSEEVVKKMKNYWRQLLNAKLITQRKFDNLTKAERGGLSELDKAGFIKRQLVETRQITKHVAQILDSRMNTKYDENDKLIREVKVITLKSKLVSDFRKDFQFYKVREINNYHHAHDAYLNAVVGTALIKKYPKLESEFVYGDYKVYDVRKMIAKSEQEIGKATAKYFFYSNIMNFFKTEITLANGEIRKRPLIETNGETGEIVWDKGRDFATVRKVLSMPQVNIVKKTEVQTGGFSKESILPKRNSDKLIARKKDWDPKKYGGFDSPTVAYSVLVVAKVEKGKSKKLKSVKELLGITIMERSSFEKNPIDFLEAKGYKEVKKDLIIKLPKYSLFELENGRKRMLASAGELQKGNELALPSKYVNFLYLASHYEKLKGSPEDNEQKQLFVEQHKHYLDEIIEQISEFSKRVILADANLDKVLSAYNKHRDKPIREQAENIIHLFTLTNLGAPAAFKYFDTTIDRKRYTSTKEVLDATLIHQSITGLYETRIDLSQLGGDGGGSSPAPGGSGGTLGIEDEYRLHETSTEPDVSLGSTWLSDFPQAWAETGGMGLAVRQAPLIIPLKATSTPVSIQQYPMSHEARLGIKPHIQRLLDQGILVPCQSPWNTPLLPVKKPGTNDYRPVQDLREVNKRVEDIHPTVPNPYNLLSGLPPSHQWYTVLDLKDAFFCLRLHPTSQPLFAFEWRDPGMGISGQLTWTRLPQGFKNSPTLFNEALHRDLADFRIQHPDLILLQYVDDILLAATSELDCQQGTRALLQTLGDLGYRASAKKAQICQKQVKYLGYLLREGQRWLTEARKETVMGQPVPKTPRQLREFLGTAGFCRLWIPGFAEMAAPLYPLTKPGTLFSWGPDQQKAYQEIKQALLTAPALGLPDLTKPFELFVDEKQGYAKGVLTQKLGPWRRPVAYLSKKLDPVAAGWPPCLRMVAAIAVLTKDAGKLTMGQPLVILAPHAVEALVKQPPDRWLSNARMTHYQAMLLDTDRVQFGPVVALNPATLLPLPEEGAPHDCLEILAETHGTRPDLTDQPIPDADHTWYTDGSSFLQEGQRKAGAAVTTETEVIWAGALPAGTSAQRAELIALTQALKMAEGKRLNVYTDSRYAFATAHIHGEIYRRRGWLTSEGREIKNKSEILALLKALFLPKRLSIIHCLGHQKGDSAEARGNRLADQAAREAAIKTPPDTSTLLAGKRTADGSEFEKRTADGSEFESPKKKAKVE

SEQ ID NO: 2081 - protein, 2093 aa, synthetic construct
MPAAKRVKLDGGDKKYSIGLDIGTNSVGWAVITDEYKVPSKKFKVLGNTDRHSIKKNLIGALLFDSGETAEATRLKRTARRRYTRRKNRICYLQEIFSNEMAKVDDSFFHRLEESFLVEEDKKHERHPIFGNIVDEVAYHEKYPTIYHLRKKLVDSTDKADLRLIYLALAHMIKFRGHFLIEGDLNPDNSDVDKLFIQLVQTYNQLFEENPINASGVDAKAILSARLSKSRRLENLIAQLPGEKKNGLFGNLIALSLGLTPNFKSNFDLAEDAKLQLSKDTYDDDLDNLLAQIGDQYADLFLAAKNLSDAILLSDILRVNTEITKAPLSASMIKRYDEHHQDLTLLKALVRQQLPEKYKEIFFDQSKNGYAGYIDGGASQEEFYKFIKPILEKMDGTEELLVKLNREDLLRKQRTFDNGSIPHQIHLGELHAILRRQEDFYPFLKDNREKIEKILTFRIPYYVGPLARGNSRFAWMTRKSEETITPWNFEEVVDKGASAQSFIERMTNFDKNLPNEKVLPKHSLLYEYFTVYNELTKVKYVTEGMRKPAFLSGEQKKAIVDLLFKTNRKVTVKQLKEDYFKKIECFDSVEISGVEDRFNASLGTYHDLLKIIKDKDFLDNEENEDILEDIVLTLTLFEDREMIEERLKTYAHLFDDKVMKQLKRRRYTGWGRLSRKLINGIRDKQSGKTILDFLKSDGFANRNFMQLIHDDSLTFKEDIQKAQVSGQGDSLHEHIANLAGSPAIKKGILQTVKVVDELVKVMGRHKPENIVIEMARENQTTQKGQKNSRERMKRIEEGIKELGSQILKEHPVENTQLQNEKLYLYYLQNGRDMYVDQELDINRLSDYDVDHIVPQSFLKDDSIDNKVLTRSDKARGKSDNVPSEEVVKKMKNYWRQLLNAKLITQRKFDNLTKAERGGLSELDKAGFIKRQLVETRQITKHVAQILDSRMNTKYDENDKLIREVKVITLKSKLVSDFRKDFQFYKVREINNYHHAHDAYLNAVVGTALIKKYPKLESEFVYGDYKVYDVRKMIAKSEQEIGKATAKYFFYSNIMNFFKTEITLANGEIRKRPLIETNGETGEIVWDKGRDFATVRKVLSMPQVNIVKKTEVQTGGFSKESILPKRNSDKLIARKKDWDPKKYGGFDSPTVAYSVLVVAKVEKGKSKKLKSVKELLGITIMERSSFEKNPIDFLEAKGYKEVKKDLIIKLPKYSLFELENGRKRMLASAGELQKGNELALPSKYVNFLYLASHYEKLKGSPEDNEQKQLFVEQHKHYLDEIIEQISEFSKRVILADANLDKVLSAYNKHRDKPIREQAENIIHLFTLTNLGAPAAFKYFDTTIDRKRYTSTKEVLDATLIHQSITGLYETRIDLSQLGGDGGEAAAKGGGGGTLGIEDEYRLHETSTEPDVSLGSTWLSDFPQAWAETGGMGLAVRQAPLIIPLKATSTPVSIQQYPMSHEARLGIKPHIQRLLDQGILVPCQSPWNTPLLPVKKPGTNDYRPVQDLREVNKRVEDIHPTVPNPYNLLSGLPPSHQWYTVLDLKDAFFCLRLHPTSQPLFAFEWRDPGMGISGQLTWTRLPQGFKNSPTLFNEALHRDLADFRIQHPDLILLQYVDDILLAATSELDCQQGTRALLQTLGDLGYRASAKKAQICQKQVKYLGYLLREGQRWLTEARKETVMGQPVPKTPRQLREFLGTAGFCRLWIPGFAEMAAPLYPLTKPGTLFSWGPDQQKAYQEIKQALLTAPALGLPDLTKPFELFVDEKQGYAKGVLTQKLGPWRRPVAYLSKKLDPVAAGWPPCLRMVAAIAVLTKDAGKLTMGQPLVILAPHAVEALVKQPPDRWLSNARMTHYQAMLLDTDRVQFGPVVALNPATLLPLPEEGAPHDCLEILAETHGTRPDLTDQPIPDADHTWYTDGSSFLQEGQRKAGAAVTTETEVIWAGALPAGTSAQRAELIALTQALKMAEGKRLNVYTDSRYAFATAHIHGEIYRRRGWLTSEGREIKNKSEILALLKALFLPKRLSIIHCLGHQKGDSAEARGNRLADQAAREAAIKTPPDTSTLLAGKRTADGSEFEKRTADGSEFESPKKKAKVE

SEQ ID NO: 2082 - protein, 2096 aa, synthetic construct
MPAAKRVKLDGGDKKYSIGLDIGTNSVGWAVITDEYKVPSKKFKVLGNTDRHSIKKNLIGALLFDSGETAEATRLKRTARRRYTRRKNRICYLQEIFSNEMAKVDDSFFHRLEESFLVEEDKKHERHPIFGNIVDEVAYHEKYPTIYHLRKKLVDSTDKADLRLIYLALAHMIKFRGHFLIEGDLNPDNSDVDKLFIQLVQTYNQLFEENPINASGVDAKAILSARLSKSRRLENLIAQLPGEKKNGLFGNLIALSLGLTPNFKSNFDLAEDAKLQLSKDTYDDDLDNLLAQIGDQYADLFLAAKNLSDAILLSDILRVNTEITKAPLSASMIKRYDEHHQDLTLLKALVRQQLPEKYKEIFFDQSKNGYAGYIDGGASQEEFYKFIKPILEKMDGTEELLVKLNREDLLRKQRTFDNGSIPHQIHLGELHAILRRQEDFYPFLKDNREKIEKILTFRIPYYVGPLARGNSRFAWMTRKSEETITPWNFEEVVDKGASAQSFIERMTNFDKNLPNEKVLPKHSLLYEYFTVYNELTKVKYVTEGMRKPAFLSGEQKKAIVDLLFKTNRKVTVKQLKEDYFKKIECFDSVEISGVEDRFNASLGTYHDLLKIIKDKDFLDNEENEDILEDIVLTLTLFEDREMIEERLKTYAHLFDDKVMKQLKRRRYTGWGRLSRKLINGIRDKQSGKTILDFLKSDGFANRNFMQLIHDDSLTFKEDIQKAQVSGQGDSLHEHIANLAGSPAIKKGILQTVKVVDELVKVMGRHKPENIVIEMARENQTTQKGQKNSRERMKRIEEGIKELGSQILKEHPVENTQLQNEKLYLYYLQNGRDMYVDQELDINRLSDYDVDHIVPQSFLKDDSIDNKVLTRSDKARGKSDNVPSEEVVKKMKNYWRQLLNAKLITQRKFDNLTKAERGGLSELDKAGFIKRQLVETRQITKHVAQILDSRMNTKYDENDKLIREVKVITLKSKLVSDFRKDFQFYKVREINNYHHAHDAYLNAVVGTALIKKYPKLESEFVYGDYKVYDVRKMIAKSEQEIGKATAKYFFYSNIMNFFKTEITLANGEIRKRPLIETNGETGEIVWDKGRDFATVRKVLSMPQVNIVKKTEVQTGGFSKESILPKRNSDKLIARKKDWDPKKYGGFDSPTVAYSVLVVAKVEKGKSKKLKSVKELLGITIMERSSFEKNPIDFLEAKGYKEVKKDLIIKLPKYSLFELENGRKRMLASAGELQKGNELALPSKYVNFLYLASHYEKLKGSPEDNEQKQLFVEQHKHYLDEIIEQISEFSKRVILADANLDKVLSAYNKHRDKPIREQAENIIHLFTLTNLGAPAAFKYFDTTIDRKRYTSTKEVLDATLIHQSITGLYETRIDLSQLGGDGGGGGGGSEAAAKGGTLGIEDEYRLHETSTEPDVSLGSTWLSDFPQAWAETGGMGLAVRQAPLIIPLKATSTPVSIQQYPMSHEARLGIKPHIQRLLDQGILVPCQSPWNTPLLPVKKPGTNDYRPVQDLREVNKRVEDIHPTVPNPYNLLSGLPPSHQWYTVLDLKDAFFCLRLHPTSQPLFAFEWRDPGMGISGQLTWTRLPQGFKNSPTLFNEALHRDLADFRIQHPDLILLQYVDDILLAATSELDCQQGTRALLQTLGDLGYRASAKKAQICQKQVKYLGYLLREGQRWLTEARKETVMGQPVPKTPRQLREFLGTAGFCRLWIPGFAEMAAPLYPLTKPGTLFSWGPDQQKAYQEIKQALLTAPALGLPDLTKPFELFVDEKQGYAKGVLTQKLGPWRRPVAYLSKKLDPVAAGWPPCLRMVAAIAVLTKDAGKLTMGQPLVILAPHAVEALVKQPPDRWLSNARMTHYQAMLLDTDRVQFGPVVALNPATLLPLPEEGAPHDCLEILAETHGTRPDLTDQPIPDADHTWYTDGSSFLQEGQRKAGAAVTTETEVIWAGALPAGTSAQRAELIALTQALKMAEGKRLNVYTDSRYAFATAHIHGEIYRRRGWLTSEGREIKNKSEILALLKALFLPKRLSIIHCLGHQKGDSAEARGNRLADQAAREAAIKTPPDTSTLLAGKRTADGSEFEKRTADGSEFESPKKKAKVE

SEQ ID NO: 2083 - protein, 2091 aa, synthetic construct
MPAAKRVKLDGGDKKYSIGLDIGTNSVGWAVITDEYKVPSKKFKVLGNTDRHSIKKNLIGALLFDSGETAEATRLKRTARRRYTRRKNRICYLQEIFSNEMAKVDDSFFHRLEESFLVEEDKKHERHPIFGNIVDEVAYHEKYPTIYHLRKKLVDSTDKADLRLIYLALAHMIKFRGHFLIEGDLNPDNSDVDKLFIQLVQTYNQLFEENPINASGVDAKAILSARLSKSRRLENLIAQLPGEKKNGLFGNLIALSLGLTPNFKSNFDLAEDAKLQLSKDTYDDDLDNLLAQIGDQYADLFLAAKNLSDAILLSDILRVNTEITKAPLSASMIKRYDEHHQDLTLLKALVRQQLPEKYKEIFFDQSKNGYAGYIDGGASQEEFYKFIKPILEKMDGTEELLVKLNREDLLRKQRTFDNGSIPHQIHLGELHAILRRQEDFYPFLKDNREKIEKILTFRIPYYVGPLARGNSRFAWMTRKSEETITPWNFEEVVDKGASAQSFIERMTNFDKNLPNEKVLPKHSLLYEYFTVYNELTKVKYVTEGMRKPAFLSGEQKKAIVDLLFKTNRKVTVKQLKEDYFKKIECFDSVEISGVEDRFNASLGTYHDLLKIIKDKDFLDNEENEDILEDIVLTLTLFEDREMIEERLKTYAHLFDDKVMKQLKRRRYTGWGRLSRKLINGIRDKQSGKTILDFLKSDGFANRNFMQLIHDDSLTFKEDIQKAQVSGQGDSLHEHIANLAGSPAIKKGILQTVKVVDELVKVMGRHKPENIVIEMARENQTTQKGQKNSRERMKRIEEGIKELGSQILKEHPVENTQLQNEKLYLYYLQNGRDMYVDQELDINRLSDYDVDHIVPQSFLKDDSIDNKVLTRSDKARGKSDNVPSEEVVKKMKNYWRQLLNAKLITQRKFDNLTKAERGGLSELDKAGFIKRQLVETRQITKHVAQILDSRMNTKYDENDKLIREVKVITLKSKLVSDFRKDFQFYKVREINNYHHAHDAYLNAVVGTALIKKYPKLESEFVYGDYKVYDVRKMIAKSEQEIGKATAKYFFYSNIMNFFKTEITLANGEIRKRPLIETNGETGEIVWDKGRDFATVRKVLSMPQVNIVKKTEVQTGGFSKESILPKRNSDKLIARKKDWDPKKYGGFDSPTVAYSVLVVAKVEKGKSKKLKSVKELLGITIMERSSFEKNPIDFLEAKGYKEVKKDLIIKLPKYSLFELENGRKRMLASAGELQKGNELALPSKYVNFLYLASHYEKLKGSPEDNEQKQLFVEQHKHYLDEIIEQISEFSKRVILADANLDKVLSAYNKHRDKPIREQAENIIHLFTLTNLGAPAAFKYFDTTIDRKRYTSTKEVLDATLIHQSITGLYETRIDLSQLGGDGGGGSPAPGGTLGIEDEYRLHETSTEPDVSLGSTWLSDFPQAWAETGGMGLAVRQAPLIIPLKATSTPVSIQQYPMSHEARLGIKPHIQRLLDQGILVPCQSPWNTPLLPVKKPGTNDYRPVQDLREVNKRVEDIHPTVPNPYNLLSGLPPSHQWYTVLDLKDAFFCLRLHPTSQPLFAFEWRDPGMGISGQLTWTRLPQGFKNSPTLFNEALHRDLADFRIQHPDLILLQYVDDILLAATSELDCQQGTRALLQTLGDLGYRASAKKAQICQKQVKYLGYLLREGQRWLTEARKETVMGQPVPKTPRQLREFLGTAGFCRLWIPGFAEMAAPLYPLTKPGTLFSWGPDQQKAYQEIKQALLTAPALGLPDLTKPFELFVDEKQGYAKGVLTQKLGPWRRPVAYLSKKLDPVAAGWPPCLRMVAAIAVLTKDAGKLTMGQPLVILAPHAVEALVKQPPDRWLSNARMTHYQAMLLDTDRVQFGPVVALNPATLLPLPEEGAPHDCLEILAETHGTRPDLTDQPIPDADHTWYTDGSSFLQEGQRKAGAAVTTETEVIWAGALPAGTSAQRAELIALTQALKMAEGKRLNVYTDSRYAFATAHIHGEIYRRRGWLTSEGREIKNKSEILALLKALFLPKRLSIIHCLGHQKGDSAEARGNRLADQAAREAAIKTPPDTSTLLAGKRTADGSEFEKRTADGSEFESPKKKAKVE

SEQ ID NO: 2084 - protein, 2110 aa, synthetic construct
MPAAKRVKLDGGDKKYSIGLDIGTNSVGWAVITDEYKVPSKKFKVLGNTDRHSIKKNLIGALLFDSGETAEATRLKRTARRRYTRRKNRICYLQEIFSNEMAKVDDSFFHRLEESFLVEEDKKHERHPIFGNIVDEVAYHEKYPTIYHLRKKLVDSTDKADLRLIYLALAHMIKFRGHFLIEGDLNPDNSDVDKLFIQLVQTYNQLFEENPINASGVDAKAILSARLSKSRRLENLIAQLPGEKKNGLFGNLIALSLGLTPNFKSNFDLAEDAKLQLSKDTYDDDLDNLLAQIGDQYADLFLAAKNLSDAILLSDILRVNTEITKAPLSASMIKRYDEHHQDLTLLKALVRQQLPEKYKEIFFDQSKNGYAGYIDGGASQEEFYKFIKPILEKMDGTEELLVKLNREDLLRKQRTFDNGSIPHQIHLGELHAILRRQEDFYPFLKDNREKIEKILTFRIPYYVGPLARGNSRFAWMTRKSEETITPWNFEEVVDKGASAQSFIERMTNFDKNLPNEKVLPKHSLLYEYFTVYNELTKVKYVTEGMRKPAFLSGEQKKAIVDLLFKTNRKVTVKQLKEDYFKKIECFDSVEISGVEDRFNASLGTYHDLLKIIKDKDFLDNEENEDILEDIVLTLTLFEDREMIEERLKTYAHLFDDKVMKQLKRRRYTGWGRLSRKLINGIRDKQSGKTILDFLKSDGFANRNFMQLIHDDSLTFKEDIQKAQVSGQGDSLHEHIANLAGSPAIKKGILQTVKVVDELVKVMGRHKPENIVIEMARENQTTQKGQKNSRERMKRIEEGIKELGSQILKEHPVENTQLQNEKLYLYYLQNGRDMYVDQELDINRLSDYDVDHIVPQSFLKDDSIDNKVLTRSDKARGKSDNVPSEEVVKKMKNYWRQLLNAKLITQRKFDNLTKAERGGLSELDKAGFIKRQLVETRQITKHVAQILDSRMNTKYDENDKLIREVKVITLKSKLVSDFRKDFQFYKVREINNYHHAHDAYLNAVVGTALIKKYPKLESEFVYGDYKVYDVRKMIAKSEQEIGKATAKYFFYSNIMNFFKTEITLANGEIRKRPLIETNGETGEIVWDKGRDFATVRKVLSMPQVNIVKKTEVQTGGFSKESILPKRNSDKLIARKKDWDPKKYGGFDSPTVAYSVLVVAKVEKGKSKKLKSVKELLGITIMERSSFEKNPIDFLEAKGYKEVKKDLIIKLPKYSLFELENGRKRMLASAGELQKGNELALPSKYVNFLYLASHYEKLKGSPEDNEQKQLFVEQHKHYLDEIIEQISEFSKRVILADANLDKVLSAYNKHRDKPIREQAENIIHLFTLTNLGAPAAFKYFDTTIDRKRYTSTKEVLDATLIHQSITGLYETRIDLSQLGGDGGGGGGSGGGGSGGGGSGGGGSGGGGSGGLGIEDEYRLHETSTEPDVSLGSTWLSDFPQAWAETGGMGLAVRQAPLIIPLKATSTPVSIQQYPMSHEARLGIKPHIQRLLDQGILVPCQSPWNTPLLPVKKPGTNDYRPVQDLREVNKRVEDIHPTVPNPYNLLSGLPPSHQWYTVLDLKDAFFCLRLHPTSQPLFAFEWRDPGMGISGQLTWTRLPQGFKNSPTLFNEALHRDLADFRIQHPDLILLQYVDDILLAATSELDCQQGTRALLQTLGDLGYRASAKKAQICQKQVKYLGYLLREGQRWLTEARKETVMGQPVPKTPRQLREFLGKAGFCRLFIPGFAEMAAPLYPLTKPGTLFSWGPDQQKAYQEIKQALLTAPALGLPDLTKPFELFVDEKQGYAKGVLTQKLGPWRRPVAYLSKKLDPVAAGWPPCLRMVAAIAVLTKDAGKLTMGQPLVILAPHAVEALVKQPPDRWLSNARMTHYQAMLLDTDRVQFGPVVALNPATLLPLPEEGAPHDCLEILAETHGTRPDLTDQPIPDADHTWYTDGSSFLQEGQRKAGAAVTTETEVIWAGALPAGTSAQRAELIALTQALKMAEGKRLNVYTDSRYAFATAHIHGEIYRRRGWLTSEGREIKNKSEILALLKALFLPKRLSIIHCLGHQKGDSAEARGNRLADQAAREAAIKTPPDTSTLLIAGKRTADGSEFEKRTADGSEFESPKKKAKVE

SEQ ID NO: 2085 - protein, 2105 aa, synthetic construct
MPAAKRVKLDGGDKKYSIGLDIGTNSVGWAVITDEYKVPSKKFKVLGNTDRHSIKKNLIGALLFDSGETAEATRLKRTARRRYTRRKNRICYLQEIFSNEMAKVDDSFFHRLEESFLVEEDKKHERHPIFGNIVDEVAYHEKYPTIYHLRKKLVDSTDKADLRLIYLALAHMIKFRGHFLIEGDLNPDNSDVDKLFIQLVQTYNQLFEENPINASGVDAKAILSARLSKSRRLENLIAQLPGEKKNGLFGNLIALSLGLTPNFKSNFDLAEDAKLQLSKDTYDDDLDNLLAQIGDQYADLFLAAKNLSDAILLSDILRVNTEITKAPLSASMIKRYDEHHQDLTLLKALVRQQLPEKYKEIFFDQSKNGYAGYIDGGASQEEFYKFIKPILEKMDGTEELLVKLNREDLLRKQRTFDNGSIPHQIHLGELHAILRRQEDFYPFLKDNREKIEKILTFRIPYYVGPLARGNSRFAWMTRKSEETITPWNFEEVVDKGASAQSFIERMTNFDKNLPNEKVLPKHSLLYEYFTVYNELTKVKYVTEGMRKPAFLSGEQKKAIVDLLFKTNRKVTVKQLKEDYFKKIECFDSVEISGVEDRFNASLGTYHDLLKIIKDKDFLDNEENEDILEDIVLTLTLFEDREMIEERLKTYAHLFDDKVMKQLKRRRYTGWGRLSRKLINGIRDKQSGKTILDFLKSDGFANRNFMQLIHDDSLTFKEDIQKAQVSGQGDSLHEHIANLAGSPAIKKGILQTVKVVDELVKVMGRHKPENIVIEMARENQTTQKGQKNSRERMKRIEEGIKELGSQILKEHPVENTQLQNEKLYLYYLQNGRDMYVDQELDINRLSDYDVDHIVPQSFLKDDSIDNKVLTRSDKARGKSDNVPSEEVVKKMKNYWRQLLNAKLITQRKFDNLTKAERGGLSELDKAGFIKRQLVETRQITKHVAQILDSRMNTKYDENDKLIREVKVITLKSKLVSDFRKDFQFYKVREINNYHHAHDAYLNAVVGTALIKKYPKLESEFVYGDYKVYDVRKMIAKSEQEIGKATAKYFFYSNIMNFFKTEITLANGEIRKRPLIETNGETGEIVWDKGRDFATVRKVLSMPQVNIVKKTEVQTGGFSKESILPKRNSDKLIARKKDWDPKKYGGFDSPTVAYSVLVVAKVEKGKSKKLKSVKELLGITIMERSSFEKNPIDFLEAKGYKEVKKDLIIKLPKYSLFELENGRKRMLASAGELQKGNELALPSKYVNFLYLASHYEKLKGSPEDNEQKQLFVEQHKHYLDEIIEQISEFSKRVILADANLDKVLSAYNKHRDKPIREQAENIIHLFTLTNLGAPAAFKYFDTTIDRKRYTSTKEVLDATLIHQSITGLYETRIDLSQLGGDGGGGGGSGGGGSGGGGSGGGGSGGLGIEDEYRLHETSTEPDVSLGSTWLSDFPQAWAETGGMGLAVRQAPLIIPLKATSTPVSIQQYPMSHEARLGIKPHIQRLLDQGILVPCQSPWNTPLLPVKKPGTNDYRPVQDLREVNKRVEDIHPTVPNPYNLLSGLPPSHQWYTVLDLKDAFFCLRLHPTSQPLFAFEWRDPGMGISGQLTWTRLPQGFKNSPTLFNEALHRDLADFRIQHPDLILLQYVDDILLAATSELDCQQGTRALLQTLGDLGYRASAKKAQICQKQVKYLGYLLREGQRWLTEARKETVMGQPVPKTPRQLREFLGKAGFCRLFIPGFAEMAAPLYPLTKPGTLFSWGPDQQKAYQEIKQALLTAPALGLPDLTKPFELFVDEKQGYAKGVLTQKLGPWRRPVAYLSKKLDPVAAGWPPCLRMVAAIAVLTKDAGKLTMGQPLVILAPHAVEALVKQPPDRWLSNARMTHYQAMLLDTDRVQFGPVVALNPATLLPLPEEGAPHDCLEILAETHGTRPDLTDQPIPDADHTWYTDGSSFLQEGQRKAGAAVTTETEVIWAGALPAGTSAQRAELIALTQALKMAEGKRLNVYTDSRYAFATAHIHGEIYRRRGWLTSEGREIKNKSEILALLKALFLPKRLSIIHCLGHQKGDSAEARGNRLADQAAREAAIKTPPDTSTLLIAGKRTADGSEFEKRTADGSEFESPKKKAKVE

SEQ ID NO: 2086 - protein, 2110 aa, synthetic construct
MPAAKRVKLDGGDKKYSIGLDIGTNSVGWAVITDEYKVPSKKFKVLGNTDRHSIKKNLIGALLFDSGETAEATRLKRTARRRYTRRKNRICYLQEIFSNEMAKVDDSFFHRLEESFLVEEDKKHERHPIFGNIVDEVAYHEKYPTIYHLRKKLVDSTDKADLRLIYLALAHMIKFRGHFLIEGDLNPDNSDVDKLFIQLVQTYNQLFEENPINASGVDAKAILSARLSKSRRLENLIAQLPGEKKNGLFGNLIALSLGLTPNFKSNFDLAEDAKLQLSKDTYDDDLDNLLAQIGDQYADLFLAAKNLSDAILLSDILRVNTEITKAPLSASMIKRYDEHHQDLTLLKALVRQQLPEKYKEIFFDQSKNGYAGYIDGGASQEEFYKFIKPILEKMDGTEELLVKLNREDLLRKQRTFDNGSIPHQIHLGELHAILRRQEDFYPFLKDNREKIEKILTFRIPYYVGPLARGNSRFAWMTRKSEETITPWNFEEVVDKGASAQSFIERMTNFDKNLPNEKVLPKHSLLYEYFTVYNELTKVKYVTEGMRKPAFLSGEQKKAIVDLLFKTNRKVTVKQLKEDYFKKIECFDSVEISGVEDRFNASLGTYHDLLKIIKDKDFLDNEENEDILEDIVLTLTLFEDREMIEERLKTYAHLFDDKVMKQLKRRRYTGWGRLSRKLINGIRDKQSGKTILDFLKSDGFANRNFMQLIHDDSLTFKEDIQKAQVSGQGDSLHEHIANLAGSPAIKKGILQTVKVVDELVKVMGRHKPENIVIEMARENQTTQKGQKNSRERMKRIEEGIKELGSQILKEHPVENTQLQNEKLYLYYLQNGRDMYVDQELDINRLSDYDVDHIVPQSFLKDDSIDNKVLTRSDKARGKSDNVPSEEVVKKMKNYWRQLLNAKLITQRKFDNLTKAERGGLSELDKAGFIKRQLVETRQITKHVAQILDSRMNTKYDENDKLIREVKVITLKSKLVSDFRKDFQFYKVREINNYHHAHDAYLNAVVGTALIKKYPKLESEFVYGDYKVYDVRKMIAKSEQEIGKATAKYFFYSNIMNFFKTEITLANGEIRKRPLIETNGETGEIVWDKGRDFATVRKVLSMPQVNIVKKTEVQTGGFSKESILPKRNSDKLIARKKDWDPKKYGGFDSPTVAYSVLVVAKVEKGKSKKLKSVKELLGITIMERSSFEKNPIDFLEAKGYKEVKKDLIIKLPKYSLFELENGRKRMLASAGELQKGNELALPSKYVNFLYLASHYEKLKGSPEDNEQKQLFVEQHKHYLDEIIEQISEFSKRVILADANLDKVLSAYNKHRDKPIREQAENIIHLFTLTNLGAPAAFKYFDTTIDRKRYTSTKEVLDATLIHQSITGLYETRIDLSQLGGDGGEAAAKEAAAKEAAAKEAAAKEAAAKGGLGIEDEYRLHETSTEPDVSLGSTWLSDFPQAWAETGGMGLAVRQAPLIIPLKATSTPVSIQQYPMSHEARLGIKPHIQRLLDQGILVPCQSPWNTPLLPVKKPGTNDYRPVQDLREVNKRVEDIHPTVPNPYNLLSGLPPSHQWYTVLDLKDAFFCLRLHPTSQPLFAFEWRDPGMGISGQLTWTRLPQGFKNSPTLFNEALHRDLADFRIQHPDLILLQYVDDILLAATSELDCQQGTRALLQTLGDLGYRASAKKAQICQKQVKYLGYLLREGQRWLTEARKETVMGQPVPKTPRQLREFLGKAGFCRLFIPGFAEMAAPLYPLTKPGTLFSWGPDQQKAYQEIKQALLTAPALGLPDLTKPFELFVDEKQGYAKGVLTQKLGPWRRPVAYLSKKLDPVAAGWPPCLRMVAAIAVLTKDAGKLTMGQPLVILAPHAVEALVKQPPDRWLSNARMTHYQAMLLDTDRVQFGPVVALNPATLLPLPEEGAPHDCLEILAETHGTRPDLTDQPIPDADHTWYTDGSSFLQEGQRKAGAAVTTETEVIWAGALPAGTSAQRAELIALTQALKMAEGKRLNVYTDSRYAFATAHIHGEIYRRRGWLTSEGREIKNKSEILALLKALFLPKRLSIIHCLGHQKGDSAEARGNRLADQAAREAAIKTPPDTSTLLIAGKRTADGSEFEKRTADGSEFESPKKKAKVE

SEQ ID NO: 2087 - protein, 2098 aa, synthetic construct
MPAAKRVKLDGGDKKYSIGLDIGTNSVGWAVITDEYKVPSKKFKVLGNTDRHSIKKNLIGALLFDSGETAEATRLKRTARRRYTRRKNRICYLQEIFSNEMAKVDDSFFHRLEESFLVEEDKKHERHPIFGNIVDEVAYHEKYPTIYHLRKKLVDSTDKADLRLIYLALAHMIKFRGHFLIEGDLNPDNSDVDKLFIQLVQTYNQLFEENPINASGVDAKAILSARLSKSRRLENLIAQLPGEKKNGLFGNLIALSLGLTPNFKSNFDLAEDAKLQLSKDTYDDDLDNLLAQIGDQYADLFLAAKNLSDAILLSDILRVNTEITKAPLSASMIKRYDEHHQDLTLLKALVRQQLPEKYKEIFFDQSKNGYAGYIDGGASQEEFYKFIKPILEKMDGTEELLVKLNREDLLRKQRTFDNGSIPHQIHLGELHAILRRQEDFYPFLKDNREKIEKILTFRIPYYVGPLARGNSRFAWMTRKSEETITPWNFEEVVDKGASAQSFIERMTNFDKNLPNEKVLPKHSLLYEYFTVYNELTKVKYVTEGMRKPAFLSGEQKKAIVDLLFKTNRKVTVKQLKEDYFKKIECFDSVEISGVEDRFNASLGTYHDLLKIIKDKDFLDNEENEDILEDIVLTLTLFEDREMIEERLKTYAHLFDDKVMKQLKRRRYTGWGRLSRKLINGIRDKQSGKTILDFLKSDGFANRNFMQLIHDDSLTFKEDIQKAQVSGQGDSLHEHIANLAGSPAIKKGILQTVKVVDELVKVMGRHKPENIVIEMARENQTTQKGQKNSRERMKRIEEGIKELGSQILKEHPVENTQLQNEKLYLYYLQNGRDMYVDQELDINRLSDYDVDHIVPQSFLKDDSIDNKVLTRSDKARGKSDNVPSEEVVKKMKNYWRQLLNAKLITQRKFDNLTKAERGGLSELDKAGFIKRQLVETRQITKHVAQILDSRMNTKYDENDKLIREVKVITLKSKLVSDFRKDFQFYKVREINNYHHAHDAYLNAVVGTALIKKYPKLESEFVYGDYKVYDVRKMIAKSEQEIGKATAKYFFYSNIMNFFKTEITLANGEIRKRPLIETNGETGEIVWDKGRDFATVRKVLSMPQVNIVKKTEVQTGGFSKESILPKRNSDKLIARKKDWDPKKYGGFDSPTVAYSVLVVAKVEKGKSKKLKSVKELLGITIMERSSFEKNPIDFLEAKGYKEVKKDLIIKLPKYSLFELENGRKRMLASAGELQKGNELALPSKYVNFLYLASHYEKLKGSPEDNEQKQLFVEQHKHYLDEIIEQISEFSKRVILADANLDKVLSAYNKHRDKPIREQAENIIHLFTLTNLGAPAAFKYFDTTIDRKRYTSTKEVLDATLIHQSITGLYETRIDLSQLGGDGGPAPAPAPAPAPAPGGLGIEDEYRLHETSTEPDVSLGSTWLSDFPQAWAETGGMGLAVRQAPLIIPLKATSTPVSIQQYPMSHEARLGIKPHIQRLLDQGILVPCQSPWNTPLLPVKKPGTNDYRPVQDLREVNKRVEDIHPTVPNPYNLLSGLPPSHQWYTVLDLKDAFFCLRLHPTSQPLFAFEWRDPGMGISGQLTWTRLPQGFKNSPTLFNEALHRDLADFRIQHPDLILLQYVDDILLAATSELDCQQGTRALLQTLGDLGYRASAKKAQICQKQVKYLGYLLREGQRWLTEARKETVMGQPVPKTPRQLREFLGKAGFCRLFIPGFAEMAAPLYPLTKPGTLFSWGPDQQKAYQEIKQALLTAPALGLPDLTKPFELFVDEKQGYAKGVLTQKLGPWRRPVAYLSKKLDPVAAGWPPCLRMVAAIAVLTKDAGKLTMGQPLVILAPHAVEALVKQPPDRWLSNARMTHYQAMLLDTDRVQFGPVVALNPATLLPLPEEGAPHDCLEILAETHGTRPDLTDQPIPDADHTWYTDGSSFLQEGQRKAGAAVTTETEVIWAGALPAGTSAQRAELIALTQALKMAEGKRLNVYTDSRYAFATAHIHGEIYRRRGWLTSEGREIKNKSEILALLKALFLPKRLSIIHCLGHQKGDSAEARGNRLADQAAREAAIKTPPDTSTLLIAGKRTADGSEFEKRTADGSEFESPKKKAKVE

SEQ ID NO: 2088 - protein, 2131 aa, synthetic construct
MPAAKRVKLDGGDKKYSIGLDIGTNSVGWAVITDEYKVPSKKFKVLGNTDRHSIKKNLIGALLFDSGETAEATRLKRTARRRYTRRKNRICYLQEIFSNEMAKVDDSFFHRLEESFLVEEDKKHERHPIFGNIVDEVAYHEKYPTIYHLRKKLVDSTDKADLRLIYLALAHMIKFRGHFLIEGDLNPDNSDVDKLFIQLVQTYNQLFEENPINASGVDAKAILSARLSKSRRLENLIAQLPGEKKNGLFGNLIALSLGLTPNFKSNFDLAEDAKLQLSKDTYDDDLDNLLAQIGDQYADLFLAAKNLSDAILLSDILRVNTEITKAPLSASMIKRYDEHHQDLTLLKALVRQQLPEKYKEIFFDQSKNGYAGYIDGGASQEEFYKFIKPILEKMDGTEELLVKLNREDLLRKQRTFDNGSIPHQIHLGELHAILRRQEDFYPFLKDNREKIEKILTFRIPYYVGPLARGNSRFAWMTRKSEETITPWNFEEVVDKGASAQSFIERMTNFDKNLPNEKVLPKHSLLYEYFTVYNELTKVKYVTEGMRKPAFLSGEQKKAIVDLLFKTNRKVTVKQLKEDYFKKIECFDSVEISGVEDRFNASLGTYHDLLKIIKDKDFLDNEENEDILEDIVLTLTLFEDREMIEERLKTYAHLFDDKVMKQLKRRRYTGWGRLSRKLINGIRDKQSGKTILDFLKSDGFANRNFMQLIHDDSLTFKEDIQKAQVSGQGDSLHEHIANLAGSPAIKKGILQTVKVVDELVKVMGRHKPENIVIEMARENQTTQKGQKNSRERMKRIEEGIKELGSQILKEHPVENTQLQNEKLYLYYLQNGRDMYVDQELDINRLSDYDVDHIVPQSFLKDDSIDNKVLTRSDKARGKSDNVPSEEVVKKMKNYWRQLLNAKLITQRKFDNLTKAERGGLSELDKAGFIKRQLVETRQITKHVAQILDSRMNTKYDENDKLIREVKVITLKSKLVSDFRKDFQFYKVREINNYHHAHDAYLNAVVGTALIKKYPKLESEFVYGDYKVYDVRKMIAKSEQEIGKATAKYFFYSNIMNFFKTEITLANGEIRKRPLIETNGETGEIVWDKGRDFATVRKVLSMPQVNIVKKTEVQTGGFSKESILPKRNSDKLIARKKDWDPKKYGGFDSPTVAYSVLVVAKVEKGKSKKLKSVKELLGITIMERSSFEKNPIDFLEAKGYKEVKKDLIIKLPKYSLFELENGRKRMLASAGELQKGNELALPSKYVNFLYLASHYEKLKGSPEDNEQKQLFVEQHKHYLDEIIEQISEFSKRVILADANLDKVLSAYNKHRDKPIREQAENIIHLFTLTNLGAPAAFKYFDTTIDRKRYTSTKEVLDATLIHQSITGLYETRIDLSQLGGDGGAEAAAKEAAAKEAAAKEAAAKALEAEAAAKEAAAKEAAAKEAAAKAGGLGIEDEYRLHETSTEPDVSLGSTWLSDFPQAWAETGGMGLAVRQAPLIIPLKATSTPVSIQQYPMSHEARLGIKPHIQRLLDQGILVPCQSPWNTPLLPVKKPGTNDYRPVQDLREVNKRVEDIHPTVPNPYNLLSGLPPSHQWYTVLDLKDAFFCLRLHPTSQPLFAFEWRDPGMGISGQLTWTRLPQGFKNSPTLFNEALHRDLADFRIQHPDLILLQYVDDILLAATSELDCQQGTRALLQTLGDLGYRASAKKAQICQKQVKYLGYLLREGQRWLTEARKETVMGQPVPKTPRQLREFLGKAGFCRLFIPGFAEMAAPLYPLTKPGTLFSWGPDQQKAYQEIKQALLTAPALGLPDLTKPFELFVDEKQGYAKGVLTQKLGPWRRPVAYLSKKLDPVAAGWPPCLRMVAAIAVLTKDAGKLTMGQPLVILAPHAVEALVKQPPDRWLSNARMTHYQAMLLDTDRVQFGPVVALNPATLLPLPEEGAPHDCLEILAETHGTRPDLTDQPIPDADHTWYTDGSSFLQEGQRKAGAAVTTETEVIWAGALPAGTSAQRAELIALTQALKMAEGKRLNVYTDSRYAFATAHIHGEIYRRRGWLTSEGREIKNKSEILALLKALFLPKRLSIIHCLGHQKGDSAEARGNRLADQAAREAAIKTPPDTSTLLIAGKRTADGSEFEKRTADGSEFESPKKKAKVE

SEQ ID NO: 2089 - protein, 2096 aa, synthetic construct; identical to SEQ ID NO: 2050

SEQ ID NO: 2090 - protein, 2100 aa, synthetic construct; identical to SEQ ID NO: 2049

SEQ ID NO: 2091 - protein, 2094 aa, synthetic construct
MPAAKRVKLDGGDKKYSIGLDIGTNSVGWAVITDEYKVPSKKFKVLGNTDRHSIKKNLIGALLFDSGETAEATRLKRTARRRYTRRKNRICYLQEIFSNEMAKVDDSFFHRLEESFLVEEDKKHERHPIFGNIVDEVAYHEKYPTIYHLRKKLVDSTDKADLRLIYLALAHMIKFRGHFLIEGDLNPDNSDVDKLFIQLVQTYNQLFEENPINASGVDAKAILSARLSKSRRLENLIAQLPGEKKNGLFGNLIALSLGLTPNFKSNFDLAEDAKLQLSKDTYDDDLDNLLAQIGDQYADLFLAAKNLSDAILLSDILRVNTEITKAPLSASMIKRYDEHHQDLTLLKALVRQQLPEKYKEIFFDQSKNGYAGYIDGGASQEEFYKFIKPILEKMDGTEELLVKLNREDLLRKQRTFDNGSIPHQIHLGELHAILRRQEDFYPFLKDNREKIEKILTFRIPYYVGPLARGNSRFAWMTRKSEETITPWNFEEVVDKGASAQSFIERMTNFDKNLPNEKVLPKHSLLYEYFTVYNELTKVKYVTEGMRKPAFLSGEQKKAIVDLLFKTNRKVTVKQLKEDYFKKIECFDSVEISGVEDRFNASLGTYHDLLKIIKDKDFLDNEENEDILEDIVLTLTLFEDREMIEERLKTYAHLFDDKVMKQLKRRRYTGWGRLSRKLINGIRDKQSGKTILDFLKSDGFANRNFMQLIHDDSLTFKEDIQKAQVSGQGDSLHEHIANLAGSPAIKKGILQTVKVVDELVKVMGRHKPENIVIEMARENQTTQKGQKNSRERMKRIEEGIKELGSQILKEHPVENTQLQNEKLYLYYLQNGRDMYVDQELDINRLSDYDVDHIVPQSFLKDDSIDNKVLTRSDKARGKSDNVPSEEVVKKMKNYWRQLLNAKLITQRKFDNLTKAERGGLSELDKAGFIKRQLVETRQITKHVAQILDSRMNTKYDENDKLIREVKVITLKSKLVSDFRKDFQFYKVREINNYHHAHDAYLNAVVGTALIKKYPKLESEFVYGDYKVYDVRKMIAKSEQEIGKATAKYFFYSNIMNFFKTEITLANGEIRKRPLIETNGETGEIVWDKGRDFATVRKVLSMPQVNIVKKTEVQTGGFSKESILPKRNSDKLIARKKDWDPKKYGGFDSPTVAYSVLVVAKVEKGKSKKLKSVKELLGITIMERSSFEKNPIDFLEAKGYKEVKKDLIIKLPKYSLFELENGRKRMLASAGELQKGNELALPSKYVNFLYLASHYEKLKGSPEDNEQKQLFVEQHKHYLDEIIEQISEFSKRVILADANLDKVLSAYNKHRDKPIREQAENIIHLFTLTNLGAPAAFKYFDTTIDRKRYTSTKEVLDATLIHQSITGLYETRIDLSQLGGDGGPAPGSSGGGGGLGIEDEYRLHETSTEPDVSLGSTWLSDFPQAWAETGGMGLAVRQAPLIIPLKATSTPVSIQQYPMSHEARLGIKPHIQRLLDQGILVPCQSPWNTPLLPVKKPGTNDYRPVQDLREVNKRVEDIHPTVPNPYNLLSGLPPSHQWYTVLDLKDAFFCLRLHPTSQPLFAFEWRDPGMGISGQLTWTRLPQGFKNSPTLFNEALHRDLADFRIQHPDLILLQYVDDILLAATSELDCQQGTRALLQTLGDLGYRASAKKAQICQKQVKYLGYLLREGQRWLTEARKETVMGQPVPKTPRQLREFLGKAGFCRLFIPGFAEMAAPLYPLTKPGTLFSWGPDQQKAYQEIKQALLTAPALGLPDLTKPFELFVDEKQGYAKGVLTQKLGPWRRPVAYLSKKLDPVAAGWPPCLRMVAAIAVLTKDAGKLTMGQPLVILAPHAVEALVKQPPDRWLSNARMTHYQAMLLDTDRVQFGPVVALNPATLLPLPEEGAPHDCLEILAETHGTRPDLTDQPIPDADHTWYTDGSSFLQEGQRKAGAAVTTETEVIWAGALPAGTSAQRAELIALTQALKMAEGKRLNVYTDSRYAFATAHIHGEIYRRRGWLTSEGREIKNKSEILALLKALFLPKRLSIIHCLGHQKGDSAEARGNRLADQAAREAAIKTPPDTSTLLIAGKRTADGSEFEKRTADGSEFESPKKKAKVE

SEQ ID NO: 2092 - protein, 2105 aa, synthetic construct
MPAAKRVKLDGGDKKYSIGLDIGTNSVGWAVITDEYKVPSKKFKVLGNTDRHSIKKNLIGALLFDSGETAEATRLKRTARRRYTRRKNRICYLQEIFSNEMAKVDDSFFHRLEESFLVEEDKKHERHPIFGNIVDEVAYHEKYPTIYHLRKKLVDSTDKADLRLIYLALAHMIKFRGHFLIEGDLNPDNSDVDKLFIQLVQTYNQLFEENPINASGVDAKAILSARLSKSRRLENLIAQLPGEKKNGLFGNLIALSLGLTPNFKSNFDLAEDAKLQLSKDTYDDDLDNLLAQIGDQYADLFLAAKNLSDAILLSDILRVNTEITKAPLSASMIKRYDEHHQDLTLLKALVRQQLPEKYKEIFFDQSKNGYAGYIDGGASQEEFYKFIKPILEKMDGTEELLVKLNREDLLRKQRTFDNGSIPHQIHLGELHAILRRQEDFYPFLKDNREKIEKILTFRIPYYVGPLARGNSRFAWMTRKSEETITPWNFEEVVDKGASAQSFIERMTNFDKNLPNEKVLPKHSLLYEYFTVYNELTKVKYVTEGMRKPAFLSGEQKKAIVDLLFKTNRKVTVKQLKEDYFKKIECFDSVEISGVEDRFNASLGTYHDLLKIIKDKDFLDNEENEDILEDIVLTLTLFEDREMIEERLKTYAHLFDDKVMKQLKRRRYTGWGRLSRKLINGIRDKQSGKTILDFLKSDGFANRNFMQLIHDDSLTFKEDIQKAQVSGQGDSLHEHIANLAGSPAIKKGILQTVKVVDELVKVMGRHKPENIVIEMARENQTTQKGQKNSRERMKRIEEGIKELGSQILKEHPVENTQLQNEKLYLYYLQNGRDMYVDQELDINRLSDYDVDHIVPQSFLKDDSIDNKVLTRSDKARGKSDNVPSEEVVKKMKNYWRQLLNAKLITQRKFDNLTKAERGGLSELDKAGFIKRQLVETRQITKHVAQILDSRMNTKYDENDKLIREVKVITLKSKLVSDFRKDFQFYKVREINNYHHAHDAYLNAVVGTALIKKYPKLESEFVYGDYKVYDVRKMIAKSEQEIGKATAKYFFYSNIMNFFKTEITLANGEIRKRPLIETNGETGEIVWDKGRDFATVRKVLSMPQVNIVKKTEVQTGGFSKESILPKRNSDKLIARKKDWDPKKYGGFDSPTVAYSVLVVAKVEKGKSKKLKSVKELLGITIMERSSFEKNPIDFLEAKGYKEVKKDLIIKLPKYSLFELENGRKRMLASAGELQKGNELALPSKYVNFLYLASHYEKLKGSPEDNEQKQLFVEQHKHYLDEIIEQISEFSKRVILADANLDKVLSAYNKHRDKPIREQAENIIHLFTLTNLGAPAAFKYFDTTIDRKRYTSTKEVLDATLIHQSITGLYETRIDLSQLGGDGGEAAAKEAAAKEAAAKEAAAKGGLGIEDEYRLHETSTEPDVSLGSTWLSDFPQAWAETGGMGLAVRQAPLIIPLKATSTPVSIQQYPMSHEARLGIKPHIQRLLDQGILVPCQSPWNTPLLPVKKPGTNDYRPVQDLREVNKRVEDIHPTVPNPYNLLSGLPPSHQWYTVLDLKDAFFCLRLHPTSQPLFAFEWRDPGMGISGQLTWTRLPQGFKNSPTLFNEALHRDLADFRIQHPDLILLQYVDDILLAATSELDCQQGTRALLQTLGDLGYRASAKKAQICQKQVKYLGYLLREGQRWLTEARKETVMGQPVPKTPRQLREFLGKAGFCRLFIPGFAEMAAPLYPLTKPGTLFSWGPDQQKAYQEIKQALLTAPALGLPDLTKPFELFVDEKQGYAKGVLTQKLGPWRRPVAYLSKKLDPVAAGWPPCLRMVAAIAVLTKDAGKLTMGQPLVILAPHAVEALVKQPPDRWLSNARMTHYQAMLLDTDRVQFGPVVALNPATLLPLPEEGAPHDCLEILAETHGTRPDLTDQPIPDADHTWYTDGSSFLQEGQRKAGAAVTTETEVIWAGALPAGTSAQRAELIALTQALKMAEGKRLNVYTDSRYAFATAHIHGEIYRRRGWLTSEGREIKNKSEILALLKALFLPKRLSIIHCLGHQKGDSAEARGNRLADQAAREAAIKTPPDTSTLLIAGKRTADGSEFEKRTADGSEFESPKKKAKVE

SEQ ID NO: 2093 - protein, 2096 aa, synthetic construct; identical to SEQ ID NO: 2048

SEQ ID NO: 2094 - protein, 2115 aa, synthetic construct
MPAAKRVKLDGGDKKYSIGLDIGTNSVGWAVITDEYKVPSKKFKVLGNTDRHSIKKNLIGALLFDSGETAEATRLKRTARRRYTRRKNRICYLQEIFSNEMAKVDDSFFHRLEESFLVEEDKKHERHPIFGNIVDEVAYHEKYPTIYHLRKKLVDSTDKADLRLIYLALAHMIKFRGHFLIEGDLNPDNSDVDKLFIQLVQTYNQLFEENPINASGVDAKAILSARLSKSRRLENLIAQLPGEKKNGLFGNLIALSLGLTPNFKSNFDLAEDAKLQLSKDTYDDDLDNLLAQIGDQYADLFLAAKNLSDAILLSDILRVNTEITKAPLSASMIKRYDEHHQDLTLLKALVRQQLPEKYKEIFFDQSKNGYAGYIDGGASQEEFYKFIKPILEKMDGTEELLVKLNREDLLRKQRTFDNGSIPHQIHLGELHAILRRQEDFYPFLKDNREKIEKILTFRIPYYVGPLARGNSRFAWMTRKSEETITPWNFEEVVDKGASAQSFIERMTNFDKNLPNEKVLPKHSLLYEYFTVYNELTKVKYVTEGMRKPAFLSGEQKKAIVDLLFKTNRKVTVKQLKEDYFKKIECFDSVEISGVEDRFNASLGTYHDLLKIIKDKDFLDNEENEDILEDIVLTLTLFEDREMIEERLKTYAHLFDDKVMKQLKRRRYTGWGRLSRKLINGIRDKQSGKTILDFLKSDGFANRNFMQLIHDDSLTFKEDIQKAQVSGQGDSLHEHIANLAGSPAIKKGILQTVKVVDELVKVMGRHKPENIVIEMARENQTTQKGQKNSRERMKRIEEGIKELGSQILKEHPVENTQLQNEKLYLYYLQNGRDMYVDQELDINRLSDYDVDHIVPQSFLKDDSIDNKVLTRSDKARGKSDNVPSEEVVKKMKNYWRQLLNAKLITQRKFDNLTKAERGGLSELDKAGFIKRQLVETRQITKHVAQILDSRMNTKYDENDKLIREVKVITLKSKLVSDFRKDFQFYKVREINNYHHAHDAYLNAVVGTALIKKYPKLESEFVYGDYKVYDVRKMIAKSEQEIGKATAKYFFYSNIMNFFKTEITLANGEIRKRPLIETNGETGEIVWDKGRDFATVRKVLSMPQVNIVKKTEVQTGGFSKESILPKRNSDKLIARKKDWDPKKYGGFDSPTVAYSVLVVAKVEKGKSKKLKSVKELLGITIMERSSFEKNPIDFLEAKGYKEVKKDLIIKLPKYSLFELENGRKRMLASAGELQKGNELALPSKYVNFLYLASHYEKLKGSPEDNEQKQLFVEQHKHYLDEIIEQISEFSKRVILADANLDKVLSAYNKHRDKPIREQAENIIHLFTLTNLGAPAAFKYFDTTIDRKRYTSTKEVLDATLIHQSITGLYETRIDLSQLGGDGGGGGGSGGGGSGGGGSGGGGSGGGGSGGGGSGGLGIEDEYRLHETSTEPDVSLGSTWLSDFPQAWAETGGMGLAVRQAPLIIPLKATSTPVSIQQYPMSHEARLGIKPHIQRLLDQGILVPCQSPWNTPLLPVKKPGTNDYRPVQDLREVNKRVEDIHPTVPNPYNLLSGLPPSHQWYTVLDLKDAFFCLRLHPTSQPLFAFEWRDPGMGISGQLTWTRLPQGFKNSPTLFNEALHRDLADFRIQHPDLILLQYVDDILLAATSELDCQQGTRALLQTLGDLGYRASAKKAQICQKQVKYLGYLLREGQRWLTEARKETVMGQPVPKTPRQLREFLGKAGFCRLFIPGFAEMAAPLYPLTKPGTLFSWGPDQQKAYQEIKQALLTAPALGLPDLTKPFELFVDEKQGYAKGVLTQKLGPWRRPVAYLSKKLDPVAAGWPPCLRMVAAIAVLTKDAGKLTMGQPLVILAPHAVEALVKQPPDRWLSNARMTHYQAMLLDTDRVQFGPVVALNPATLLPLPEEGAPHDCLEILAETHGTRPDLTDQPIPDADHTWYTDGSSFLQEGQRKAGAAVTTETEVIWAGALPAGTSAQRAELIALTQALKMAEGKRLNVYTDSRYAFATAHIHGEIYRRRGWLTSEGREIKNKSEILALLKALFLPKRLSIIHCLGHQKGDSAEARGNRLADQAAREAAIKTPPDTSTLLIAGKRTADGSEFEKRTADGSEFESPKKKAKVE

SEQ ID NO: 2095 - protein, 2096 aa, synthetic construct
MPAAKRVKLDGGDKKYSIGLDIGTNSVGWAVITDEYKVPSKKFKVLGNTDRHSIKKNLIGALLFDSGETAEATRLKRTARRRYTRRKNRICYLQEIFSNEMAKVDDSFFHRLEESFLVEEDKKHERHPIFGNIVDEVAYHEKYPTIYHLRKKLVDSTDKADLRLIYLALAHMIKFRGHFLIEGDLNPDNSDVDKLFIQLVQTYNQLFEENPINASGVDAKAILSARLSKSRRLENLIAQLPGEKKNGLFGNLIALSLGLTPNFKSNFDLAEDAKLQLSKDTYDDDLDNLLAQIGDQYADLFLAAKNLSDAILLSDILRVNTEITKAPLSASMIKRYDEHHQDLTLLKALVRQQLPEKYKEIFFDQSKNGYAGYIDGGASQEEFYKFIKPILEKMDGTEELLVKLNREDLLRKQRTFDNGSIPHQIHLGELHAILRRQEDFYPFLKDNREKIEKILTFRIPYYVGPLARGNSRFAWMTRKSEETITPWNFEEVVDKGASAQSFIERMTNFDKNLPNEKVLPKHSLLYEYFTVYNELTKVKYVTEGMRKPAFLSGEQKKAIVDLLFKTNRKVTVKQLKEDYFKKIECFDSVEISGVEDRFNASLGTYHDLLKIIKDKDFLDNEENEDILEDIVLTLTLFEDREMIEERLKTYAHLFDDKVMKQLKRRRYTGWGRLSRKLINGIRDKQSGKTILDFLKSDGFANRNFMQLIHDDSLTFKEDIQKAQVSGQGDSLHEHIANLAGSPAIKKGILQTVKVVDELVKVMGRHKPENIVIEMARENQTTQKGQKNSRERMKRIEEGIKELGSQILKEHPVENTQLQNEKLYLYYLQNGRDMYVDQELDINRLSDYDVDHIVPQSFLKDDSIDNKVLTRSDKARGKSDNVPSEEVVKKMKNYWRQLLNAKLITQRKFDNLTKAERGGLSELDKAGFIKRQLVETRQITKHVAQILDSRMNTKYDENDKLIREVKVITLKSKLVSDFRKDFQFYKVREINNYHHAHDAYLNAVVGTALIKKYPKLESEFVYGDYKVYDVRKMIAKSEQEIGKATAKYFFYSNIMNFFKTEITLANGEIRKRPLIETNGETGEIVWDKGRDFATVRKVLSMPQVNIVKKTEVQTGGFSKESILPKRNSDKLIARKKDWDPKKYGGFDSPTVAYSVLVVAKVEKGKSKKLKSVKELLGITIMERSSFEKNPIDFLEAKGYKEVKKDLIIKLPKYSLFELENGRKRMLASAGELQKGNELALPSKYVNFLYLASHYEKLKGSPEDNEQKQLFVEQHKHYLDEIIEQISEFSKRVILADANLDKVLSAYNKHRDKPIREQAENIIHLFTLTNLGAPAAFKYFDTTIDRKRYTSTKEVLDATLIHQSITGLYETRIDLSQLGGDGGPAPEAAAKGSSGGLGIEDEYRLHETSTEPDVSLGSTWLSDFPQAWAETGGMGLAVRQAPLIIPLKATSTPVSIQQYPMSHEARLGIKPHIQRLLDQGILVPCQSPWNTPLLPVKKPGTNDYRPVQDLREVNKRVEDIHPTVPNPYNLLSGLPPSHQWYTVLDLKDAFFCLRLHPTSQPLFAFEWRDPGMGISGQLTWTRLPQGFKNSPTLFNEALHRDLADFRIQHPDLILLQYVDDILLAATSELDCQQGTRALLQTLGDLGYRASAKKAQICQKQVKYLGYLLREGQRWLTEARKETVMGQPVPKTPRQLREFLGKAGFCRLFIPGFAEMAAPLYPLTKPGTLFSWGPDQQKAYQEIKQALLTAPALGLPDLTKPFELFVDEKQGYAKGVLTQKLGPWRRPVAYLSKKLDPVAAGWPPCLRMVAAIAVLTKDAGKLTMGQPLVILAPHAVEALVKQPPDRWLSNARMTHYQAMLLDTDRVQFGPVVALNPATLLPLPEEGAPHDCLEILAETHGTRPDLTDQPIPDADHTWYTDGSSFLQEGQRKAGAAVTTETEVIWAGALPAGTSAQRAELIALTQALKMAEGKRLNVYTDSRYAFATAHIHGEIYRRRGWLTSEGREIKNKSEILALLKALFLPKRLSIIHCLGHQKGDSAEARGNRLADQAAREAAIKTPPDTSTLLIAGKRTADGSEFEKRTADGSEFESPKKKAKVE

SEQ ID NO: 2096 - protein, 2090 aa, synthetic construct
MPAAKRVKLDGGDKKYSIGLDIGTNSVGWAVITDEYKVPSKKFKVLGNTDRHSIKKNLIGALLFDSGETAEATRLKRTARRRYTRRKNRICYLQEIFSNEMAKVDDSFFHRLEESFLVEEDKKHERHPIFGNIVDEVAYHEKYPTIYHLRKKLVDSTDKADLRLIYLALAHMIKFRGHFLIEGDLNPDNSDVDKLFIQLVQTYNQLFEENPINASGVDAKAILSARLSKSRRLENLIAQLPGEKKNGLFGNLIALSLGLTPNFKSNFDLAEDAKLQLSKDTYDDDLDNLLAQIGDQYADLFLAAKNLSDAILLSDILRVNTEITKAPLSASMIKRYDEHHQDLTLLKALVRQQLPEKYKEIFFDQSKNGYAGYIDGGASQEEFYKFIKPILEKMDGTEELLVKLNREDLLRKQRTFDNGSIPHQIHLGELHAILRRQEDFYPFLKDNREKIEKILTFRIPYYVGPLARGNSRFAWMTRKSEETITPWNFEEVVDKGASAQSFIERMTNFDKNLPNEKVLPKHSLLYEYFTVYNELTKVKYVTEGMRKPAFLSGEQKKAIVDLLFKTNRKVTVKQLKEDYFKKIECFDSVEISGVEDRFNASLGTYHDLLKIIKDKDFLDNEENEDILEDIVLTLTLFEDREMIEERLKTYAHLFDDKVMKQLKRRRYTGWGRLSRKLINGIRDKQSGKTILDFLKSDGFANRNFMQLIHDDSLTFKEDIQKAQVSGQGDSLHEHIANLAGSPAIKKGILQTVKVVDELVKVMGRHKPENIVIEMARENQTTQKGQKNSRERMKRIEEGIKELGSQILKEHPVENTQLQNEKLYLYYLQNGRDMYVDQELDINRLSDYDVDHIVPQSFLKDDSIDNKVLTRSDKARGKSDNVPSEEVVKKMKNYWRQLLNAKLITQRKFDNLTKAERGGLSELDKAGFIKRQLVETRQITKHVAQILDSRMNTKYDENDKLIREVKVITLKSKLVSDFRKDFQFYKVREINNYHHAHDAYLNAVVGTALIKKYPKLESEFVYGDYKVYDVRKMIAKSEQEIGKATAKYFFYSNIMNFFKTEITLANGEIRKRPLIETNGETGEIVWDKGRDFATVRKVLSMPQVNIVKKTEVQTGGFSKESILPKRNSDKLIARKKDWDPKKYGGFDSPTVAYSVLVVAKVEKGKSKKLKSVKELLGITIMERSSFEKNPIDFLEAKGYKEVKKDLIIKLPKYSLFELENGRKRMLASAGELQKGNELALPSKYVNFLYLASHYEKLKGSPEDNEQKQLFVEQHKHYLDEIIEQISEFSKRVILADANLDKVLSAYNKHRDKPIREQAENIIHLFTLTNLGAPAAFKYFDTTIDRKRYTSTKEVLDATLIHQSITGLYETRIDLSQLGGDGGEAAAKGGLGIEDEYRLHETSTEPDVSLGSTWLSDFPQAWAETGGMGLAVRQAPLIIPLKATSTPVSIQQYPMSHEARLGIKPHIQRLLDQGILVPCQSPWNTPLLPVKKPGTNDYRPVQDLREVNKRVEDIHPTVPNPYNLLSGLPPSHQWYTVLDLKDAFFCLRLHPTSQPLFAFEWRDPGMGISGQLTWTRLPQGFKNSPTLFNEALHRDLADFRIQHPDLILLQYVDDILLAATSELDCQQGTRALLQTLGDLGYRASAKKAQICQKQVKYLGYLLREGQRWLTEARKETVMGQPVPKTPRQLREFLGKAGFCRLFIPGFAEMAAPLYPLTKPGTLFSWGPDQQKAYQEIKQALLTAPALGLPDLTKPFELFVDEKQGYAKGVLTQKLGPWRRPVAYLSKKLDPVAAGWPPCLRMVAAIAVLTKDAGKLTMGQPLVILAPHAVEALVKQPPDRWLSNARMTHYQAMLLDTDRVQFGPVVALNPATLLPLPEEGAPHDCLEILAETHGTRPDLTDQPIPDADHTWYTDGSSFLQEGQRKAGAAVTTETEVIWAGALPAGTSAQRAELIALTQALKMAEGKRLNVYTDSRYAFATAHIHGEIYRRRGWLTSEGREIKNKSEILALLKALFLPKRLSIIHCLGHQKGDSAEARGNRLADQAAREAAIKTPPDTSTLLIAGKRTADGSEFEKRTADGSEFESPKKKAKVE

SEQ ID NO: 2097 - protein, 2096 aa, synthetic construct
MPAAKRVKLDGGDKKYSIGLDIGTNSVGWAVITDEYKVPSKKFKVLGNTDRHSIKKNLIGALLFDSGETAEATRLKRTARRRYTRRKNRICYLQEIFSNEMAKVDDSFFHRLEESFLVEEDKKHERHPIFGNIVDEVAYHEKYPTIYHLRKKLVDSTDKADLRLIYLALAHMIKFRGHFLIEGDLNPDNSDVDKLFIQLVQTYNQLFEENPINASGVDAKAILSARLSKSRRLENLIAQLPGEKKNGLFGNLIALSLGLTPNFKSNFDLAEDAKLQLSKDTYDDDLDNLLAQIGDQYADLFLAAKNLSDAILLSDILRVNTEITKAPLSASMIKRYDEHHQDLTLLKALVRQQLPEKYKEIFFDQSKNGYAGYIDGGASQEEFYKFIKPILEKMDGTEELLVKLNREDLLRKQRTFDNGSIPHQIHLGELHAILRRQEDFYPFLKDNREKIEKILTFRIPYYVGPLARGNSRFAWMTRKSEETITPWNFEEVVDKGASAQSFIERMTNFDKNLPNEKVLPKHSLLYEYFTVYNELTKVKYVTEGMRKPAFLSGEQKKAIVDLLFKTNRKVTVKQLKEDYFKKIECFDSVEISGVEDRFNASLGTYHDLLKIIKDKDFLDNEENEDILEDIVLTLTLFEDREMIEERLKTYAHLFDDKVMKQLKRRRYTGWGRLSRKLINGIRDKQSGKTILDFLKSDGFANRNFMQLIHDDSLTFKEDIQKAQVSGQGDSLHEHIANLAGSPAIKKGILQTVKVVDELVKVMGRHKPENIVIEMARENQTTQKGQKNSRERMKRIEEGIKELGSQILKEHPVENTQLQNEKLYLYYLQNGRDMYVDQELDINRLSDYDVDHIVPQSFLKDDSIDNKVLTRSDKARGKSDNVPSEEVVKKMKNYWRQLLNAKLITQRKFDNLTKAERGGLSELDKAGFIKRQLVETRQITKHVAQILDSRMNTKYDENDKLIREVKVITLKSKLVSDFRKDFQFYKVREINNYHHAHDAYLNAVVGTALIKKYPKLESEFVYGDYKVYDVRKMIAKSEQEIGKATAKYFFYSNIMNFFKTEITLANGEIRKRPLIETNGETGEIVWDKGRDFATVRKVLSMPQVNIVKKTEVQTGGFSKESILPKRNSDKLIARKKDWDPKKYGGFDSPTVAYSVLVVAKVEKGKSKKLKSVKELLGITIMERSSFEKNPIDFLEAKGYKEVKKDLIIKLPKYSLFELENGRKRMLASAGELQKGNELALPSKYVNFLYLASHYEKLKGSPEDNEQKQLFVEQHKHYLDEIIEQISEFSKRVILADANLDKVLSAYNKHRDKPIREQAENIIHLFTLTNLGAPAAFKYFDTTIDRKRYTSTKEVLDATLIHQSITGLYETRIDLSQLGGDGGPAPEAAAKGGSGGLGIEDEYRLHETSTEPDVSLGSTWLSDFPQAWAETGGMGLAVRQAPLIIPLKATSTPVSIQQYPMSHEARLGIKPHIQRLLDQGILVPCQSPWNTPLLPVKKPGTNDYRPVQDLREVNKRVEDIHPTVPNPYNLLSGLPPSHQWYTVLDLKDAFFCLRLHPTSQPLFAFEWRDPGMGISGQLTWTRLPQGFKNSPTLFNEALHRDLADFRIQHPDLILLQYVDDILLAATSELDCQQGTRALLQTLGDLGYRASAKKAQICQKQVKYLGYLLREGQRWLTEARKETVMGQPVPKTPRQLREFLGKAGFCRLFIPGFAEMAAPLYPLTKPGTLFSWGPDQQKAYQEIKQALLTAPALGLPDLTKPFELFVDEKQGYAKGVLTQKLGPWRRPVAYLSKKLDPVAAGWPPCLRMVAAIAVLTKDAGKLTMGQPLVILAPHAVEALVKQPPDRWLSNARMTHYQAMLLDTDRVQFGPVVALNPATLLPLPEEGAPHDCLEILAETHGTRPDLTDQPIPDADHTWYTDGSSFLQEGQRKAGAAVTTETEVIWAGALPAGTSAQRAELIALTQALKMAEGKRLNVYTDSRYAFATAHIHGEIYRRRGWLTSEGREIKNKSEILALLKALFLPKRLSIIHCLGHQKGDSAEARGNRLADQAAREAAIKTPPDTSTLLIAGKRTADGSEFEKRTADGSEFESPKKKAKVE

SEQ ID NO: 2098 - protein, 2115 aa, synthetic construct
MPAAKRVKLDGGDKKYSIGLDIGTNSVGWAVITDEYKVPSKKFKVLGNTDRHSIKKNLIGALLFDSGETAEATRLKRTARRRYTRRKNRICYLQEIFSNEMAKVDDSFFHRLEESFLVEEDKKHERHPIFGNIVDEVAYHEKYPTIYHLRKKLVDSTDKADLRLIYLALAHMIKFRGHFLIEGDLNPDNSDVDKLFIQLVQTYNQLFEENPINASGVDAKAILSARLSKSRRLENLIAQLPGEKKNGLFGNLIALSLGLTPNFKSNFDLAEDAKLQLSKDTYDDDLDNLLAQIGDQYADLFLAAKNLSDAILLSDILRVNTEITKAPLSASMIKRYDEHHQDLTLLKALVRQQLPEKYKEIFFDQSKNGYAGYIDGGASQEEFYKFIKPILEKMDGTEELLVKLNREDLLRKQRTFDNGSIPHQIHLGELHAILRRQEDFYPFLKDNREKIEKILTFRIPYYVGPLARGNSRFAWMTRKSEETITPWNFEEVVDKGASAQSFIERMTNFDKNLPNEKVLPKHSLLYEYFTVYNELTKVKYVTEGMRKPAFLSGEQKKAIVDLLFKTNRKVTVKQLKEDYFKKIECFDSVEISGVEDRFNASLGTYHDLLKIIKDKDFLDNEENEDILEDIVLTLTLFEDREMIEERLKTYAHLFDDKVMKQLKRRRYTGWGRLSRKLINGIRDKQSGKTILDFLKSDGFANRNFMQLIHDDSLTFKEDIQKAQVSGQGDSLHEHIANLAGSPAIKKGILQTVKVVDELVKVMGRHKPENIVIEMARENQTTQKGQKNSRERMKRIEEGIKELGSQILKEHPVENTQLQNEKLYLYYLQNGRDMYVDQELDINRLSDYDVDHIVPQSFLKDDSIDNKVLTRSDKARGKSDNVPSEEVVKKMKNYWRQLLNAKLITQRKFDNLTKAERGGLSELDKAGFIKRQLVETRQITKHVAQILDSRMNTKYDENDKLIREVKVITLKSKLVSDFRKDFQFYKVREINNYHHAHDAYLNAVVGTALIKKYPKLESEFVYGDYKVYDVRKMIAKSEQEIGKATAKYFFYSNIMNFFKTEITLANGEIRKRPLIETNGETGEIVWDKGRDFATVRKVLSMPQVNIVKKTEVQTGGFSKESILPKRNSDKLIARKKDWDPKKYGGFDSPTVAYSVLVVAKVEKGKSKKLKSVKELLGITIMERSSFEKNPIDFLEAKGYKEVKKDLIIKLPKYSLFELENGRKRMLASAGELQKGNELALPSKYVNFLYLASHYEKLKGSPEDNEQKQLFVEQHKHYLDEIIEQISEFSKRVILADANLDKVLSAYNKHRDKPIREQAENIIHLFTLTNLGAPAAFKYFDTTIDRKRYTSTKEVLDATLIHQSITGLYETRIDLSQLGGDGGEAAAKEAAAKEAAAKEAAAKEAAAKEAAAKGGLGIEDEYRLHETSTEPDVSLGSTWLSDFPQAWAETGGMGLAVRQAPLIIPLKATSTPVSIQQYPMSHEARLGIKPHIQRLLDQGILVPCQSPWNTPLLPVKKPGTNDYRPVQDLREVNKRVEDIHPTVPNPYNLLSGLPPSHQWYTVLDLKDAFFCLRLHPTSQPLFAFEWRDPGMGISGQLTWTRLPQGFKNSPTLFNEALHRDLADFRIQHPDLILLQYVDDILLAATSELDCQQGTRALLQTLGDLGYRASAKKAQICQKQVKYLGYLLREGQRWLTEARKETVMGQPVPKTPRQLREFLGKAGFCRLFIPGFAEMAAPLYPLTKPGTLFSWGPDQQKAYQEIKQALLTAPALGLPDLTKPFELFVDEKQGYAKGVLTQKLGPWRRPVAYLSKKLDPVAAGWPPCLRMVAAIAVLTKDAGKLTMGQPLVILAPHAVEALVKQPPDRWLSNARMTHYQAMLLDTDRVQFGPVVALNPATLLPLPEEGAPHDCLEILAETHGTRPDLTDQPIPDADHTWYTDGSSFLQEGQRKAGAAVTTETEVIWAGALPAGTSAQRAELIALTQALKMAEGKRLNVYTDSRYAFATAHIHGEIYRRRGWLTSEGREIKNKSEILALLKALFLPKRLSIIHCLGHQKGDSAEARGNRLADQAAREAAIKTPPDTSTLLIAGKRTADGSEFEKRTADGSEFESPKKKAKVE

SEQ ID NO: 2099 - protein, 2096 aa, synthetic construct
MPAAKRVKLDGGDKKYSIGLDIGTNSVGWAVITDEYKVPSKKFKVLGNTDRHSIKKNLIGALLFDSGETAEATRLKRTARRRYTRRKNRICYLQEIFSNEMAKVDDSFFHRLEESFLVEEDKKHERHPIFGNIVDEVAYHEKYPTIYHLRKKLVDSTDKADLRLIYLALAHMIKFRGHFLIEGDLNPDNSDVDKLFIQLVQTYNQLFEENPINASGVDAKAILSARLSKSRRLENLIAQLPGEKKNGLFGNLIALSLGLTPNFKSNFDLAEDAKLQLSKDTYDDDLDNLLAQIGDQYADLFLAAKNLSDAILLSDILRVNTEITKAPLSASMIKRYDEHHQDLTLLKALVRQQLPEKYKEIFFDQSKNGYAGYIDGGASQEEFYKFIKPILEKMDGTEELLVKLNREDLLRKQRTFDNGSIPHQIHLGELHAILRRQEDFYPFLKDNREKIEKILTFRIPYYVGPLARGNSRFAWMTRKSEETITPWNFEEVVDKGASAQSFIERMTNFDKNLPNEKVLPKHSLLYEYFTVYNELTKVKYVTEGMRKPAFLSGEQKKAIVDLLFKTNRKVTVKQLKEDYFKKIECFDSVEISGVEDRFNASLGTYHDLLKIIKDKDFLDNEENEDILEDIVLTLTLFEDREMIEERLKTYAHLFDDKVMKQLKRRRYTGWGRLSRKLINGIRDKQSGKTILDFLKSDGFANRNFMQLIHDDSLTFKEDIQKAQVSGQGDSLHEHIANLAGSPAIKKGILQTVKVVDELVKVMGRHKPENIVIEMARENQTTQKGQKNSRERMKRIEEGIKELGSQILKEHPVENTQLQNEKLYLYYLQNGRDMYVDQELDINRLSDYDVDHIVPQSFLKDDSIDNKVLTRSDKARGKSDNVPSEEVVKKMKNYWRQLLNAKLITQRKFDNLTKAERGGLSELDKAGFIKRQLVETRQITKHVAQILDSRMNTKYDENDKLIREVKVITLKSKLVSDFRKDFQFYKVREINNYHHAHDAYLNAVVGTALIKKYPKLESEFVYGDYKVYDVRKMIAKSEQEIGKATAKYFFYSNIMNFFKTEITLANGEIRKRPLIETNGETGEIVWDKGRDFATVRKVLSMPQVNIVKKTEVQTGGFSKESILPKRNSDKLIARKKDWDPKKYGGFDSPTVAYSVLVVAKVEKGKSKKLKSVKELLGITIMERSSFEKNPIDFLEAKGYKEVKKDLIIKLPKYSLFELENGRKRMLASAGELQKGNELALPSKYVNFLYLASHYEKLKGSPEDNEQKQLFVEQHKHYLDEIIEQISEFSKRVILADANLDKVLSAYNKHRDKPIREQAENIIHLFTLTNLGAPAAFKYFDTTIDRKRYTSTKEVLDATLIHQSITGLYETRIDLSQLGGDGGEAAAKPAPGGSGGLGIEDEYRLHETSTEPDVSLGSTWLSDFPQAWAETGGMGLAVRQAPLIIPLKATSTPVSIQQYPMSHEARLGIKPHIQRLLDQGILVPCQSPWNTPLLPVKKPGTNDYRPVQDLREVNKRVEDIHPTVPNPYNLLSGLPPSHQWYTVLDLKDAFFCLRLHPTSQPLFAFEWRDPGMGISGQLTWTRLPQGFKNSPTLFNEALHRDLADFRIQHPDLILLQYVDDILLAATSELDCQQGTRALLQTLGDLGYRASAKKAQICQKQVKYLGYLLREGQRWLTEARKETVMGQPVPKTPRQLREFLGKAGFCRLFIPGFAEMAAPLYPLTKPGTLFSWGPDQQKAYQEIKQALLTAPALGLPDLTKPFELFVDEKQGYAKGVLTQKLGPWRRPVAYLSKKLDPVAAGWPPCLRMVAAIAVLTKDAGKLTMGQPLVILAPHAVEALVKQPPDRWLSNARMTHYQAMLLDTDRVQFGPVVALNPATLLPLPEEGAPHDCLEILAETHGTRPDLTDQPIPDADHTWYTDGSSFLQEGQRKAGAAVTTETEVIWAGALPAGTSAQRAELIALTQALKMAEGKRLNVYTDSRYAFATAHIHGEIYRRRGWLTSEGREIKNKSEILALLKALFLPKRLSIIHCLGHQKGDSAEARGNRLADQAAREAAIKTPPDTSTLLIAGKRTADGSEFEKRTADGSEFESPKKKAKVE

SEQ ID NO: 2100 - protein, 2096 aa, synthetic construct
MPAAKRVKLDGGDKKYSIGLDIGTNSVGWAVITDEYKVPSKKFKVLGNTDRHSIKKNLIGALLFDSGETAEATRLKRTARRRYTRRKNRICYLQEIFSNEMAKVDDSFFHRLEESFLVEEDKKHERHPIFGNIVDEVAYHEKYPTIYHLRKKLVDSTDKADLRLIYLALAHMIKFRGHFLIEGDLNPDNSDVDKLFIQLVQTYNQLFEENPINASGVDAKAILSARLSKSRRLENLIAQLPGEKKNGLFGNLIALSLGLTPNFKSNFDLAEDAKLQLSKDTYDDDLDNLLAQIGDQYADLFLAAKNLSDAILLSDILRVNTEITKAPLSASMIKRYDEHHQDLTLLKALVRQQLPEKYKEIFFDQSKNGYAGYIDGGASQEEFYKFIKPILEKMDGTEELLVKLNREDLLRKQRTFDNGSIPHQIHLGELHAILRRQEDFYPFLKDNREKIEKILTFRIPYYVGPLARGNSRFAWMTRKSEETITPWNFEEVVDKGASAQSFIERMTNFDKNLPNEKVLPKHSLLYEYFTVYNELTKVKYVTEGMRKPAFLSGEQKKAIVDLLFKTNRKVTVKQLKEDYFKKIECFDSVEISGVEDRFNASLGTYHDLLKIIKDKDFLDNEENEDILEDIVLTLTLFEDREMIEERLKTYAHLFDDKVMKQLKRRRYTGWGRLSRKLINGIRDKQSGKTILDFLKSDGFANRNFMQLIHDDSLTFKEDIQKAQVSGQGDSLHEHIANLAGSPAIKKGILQTVKVVDELVKVMGRHKPENIVIEMARENQTTQKGQKNSRERMKRIEEGIKELGSQILKEHPVENTQLQNEKLYLYYLQNGRDMYVDQELDINRLSDYDVDHIVPQSFLKDDSIDNKVLTRSDKARGKSDNVPSEEVVKKMKNYWRQLLNAKLITQRKFDNLTKAERGGLSELDKAGFIKRQLVETRQITKHVAQILDSRMNTKYDENDKLIREVKVITLKSKLVSDFRKDFQFYKVREINNYHHAHDAYLNAVVGTALIKKYPKLESEFVYGDYKVYDVRKMIAKSEQEIGKATAKYFFYSNIMNFFKTEITLANGEIRKRPLIETNGETGEIVWDKGRDFATVRKVLSMPQVNIVKKTEVQTGGFSKESILPKRNSDKLIARKKDWDPKKYGGFDSPTVAYSVLVVAKVEKGKSKKLKSVKELLGITIMERSSFEKNPIDFLEAKGYKEVKKDLIIKLPKYSLFELENGRKRMLASAGELQKGNELALPSKYVNFLYLASHYEKLKGSPEDNEQKQLFVEQHKHYLDEIIEQISEFSKRVILADANLDKVLSAYNKHRDKPIREQAENIIHLFTLTNLGAPAAFKYFDTTIDRKRYTSTKEVLDATLIHQSITGLYETRIDLSQLGGDGGGGSGSSEAAAKGGLGIEDEYRLHETSTEPDVSLGSTWLSDFPQAWAETGGMGLAVRQAPLIIPLKATSTPVSIQQYPMSHEARLGIKPHIQRLLDQGILVPCQSPWNTPLLPVKKPGTNDYRPVQDLREVNKRVEDIHPTVPNPYNLLSGLPPSHQWYTVLDLKDAFFCLRLHPTSQPLFAFEWRDPGMGISGQLTWTRLPQGFKNSPTLFNEALHRDLADFRIQHPDLILLQYVDDILLAATSELDCQQGTRALLQTLGDLGYRASAKKAQICQKQVKYLGYLLREGQRWLTEARKETVMGQPVPKTPRQLREFLGKAGFCRLFIPGFAEMAAPLYPLTKPGTLFSWGPDQQKAYQEIKQALLTAPALGLPDLTKPFELFVDEKQGYAKGVLTQKLGPWRRPVAYLSKKLDPVAAGWPPCLRMVAAIAVLTKDAGKLTMGQPLVILAPHAVEALVKQPPDRWLSNARMTHYQAMLLDTDRVQFGPVVALNPATLLPLPEEGAPHDCLEILAETHGTRPDLTDQPIPDADHTWYTDGSSFLQEGQRKAGAAVTTETEVIWAGALPAGTSAQRAELIALTQALKMAEGKRLNVYTDSRYAFATAHIHGEIYRRRGWLTSEGREIKNKSEILALLKALFLPKRLSIIHCLGHQKGDSAEARGNRLADQAAREAAIKTPPDTSTLLIAGKRTADGSEFEKRTADGSEFESPKKKAKVE

SEQ ID NO: 2101 - protein, 2094 aa, synthetic construct
MPAAKRVKLDGGDKKYSIGLDIGTNSVGWAVITDEYKVPSKKFKVLGNTDRHSIKKNLIGALLFDSGETAEATRLKRTARRRYTRRKNRICYLQEIFSNEMAKVDDSFFHRLEESFLVEEDKKHERHPIFGNIVDEVAYHEKYPTIYHLRKKLVDSTDKADLRLIYLALAHMIKFRGHFLIEGDLNPDNSDVDKLFIQLVQTYNQLFEENPINASGVDAKAILSARLSKSRRLENLIAQLPGEKKNGLFGNLIALSLGLTPNFKSNFDLAEDAKLQLSKDTYDDDLDNLLAQIGDQYADLFLAAKNLSDAILLSDILRVNTEITKAPLSASMIKRYDEHHQDLTLLKALVRQQLPEKYKEIFFDQSKNGYAGYIDGGASQEEFYKFIKPILEKMDGTEELLVKLNREDLLRKQRTFDNGSIPHQIHLGELHAILRRQEDFYPFLKDNREKIEKILTFRIPYYVGPLARGNSRFAWMTRKSEETITPWNFEEVVDKGASAQSFIERMTNFDKNLPNEKVLPKHSLLYEYFTVYNELTKVKYVTEGMRKPAFLSGEQKKAIVDLLFKTNRKVTVKQLKEDYFKKIECFDSVEISGVEDRFNASLGTYHDLLKIIKDKDFLDNEENEDILEDIVLTLTLFEDREMIEERLKTYAHLFDDKVMKQLKRRRYTGWGRLSRKLINGIRDKQSGKTILDFLKSDGFANRNFMQLIHDDSLTFKEDIQKAQVSGQGDSLHEHIANLAGSPAIKKGILQTVKVVDELVKVMGRHKPENIVIEMARENQTTQKGQKNSRERMKRIEEGIKELGSQILKEHPVENTQLQNEKLYLYYLQNGRDMYVDQELDINRLSDYDVDHIVPQSFLKDDSIDNKVLTRSDKARGKSDNVPSEEVVKKMKNYWRQLLNAKLITQRKFDNLTKAERGGLSELDKAGFIKRQLVETRQITKHVAQILDSRMNTKYDENDKLIREVKVITLKSKLVSDFRKDFQFYKVREINNYHHAHDAYLNAVVGTALIKKYPKLESEFVYGDYKVYDVRKMIAKSEQEIGKATAKYFFYSNIMNFFKTEITLANGEIRKRPLIETNGETGEIVWDKGRDFATVRKVLSMPQVNIVKKTEVQTGGFSKESILPKRNSDKLIARKKDWDPKKYGGFDSPTVAYSVLVVAKVEKGKSKKLKSVKELLGITIMERSSFEKNPIDFLEAKGYKEVKKDLIIKLPKYSLFELENGRKRMLASAGELQKGNELALPSKYVNFLYLASHYEKLKGSPEDNEQKQLFVEQHKHYLDEIIEQISEFSKRVILADANLDKVLSAYNKHRDKPIREQAENIIHLFTLTNLGAPAAFKYFDTTIDRKRYTSTKEVLDATLIHQSITGLYETRIDLSQLGGDGGPAPGGGGSSGGLGIEDEYRLHETSTEPDVSLGSTWLSDFPQAWAETGGMGLAVRQAPLIIPLKATSTPVSIQQYPMSHEARLGIKPHIQRLLDQGILVPCQSPWNTPLLPVKKPGTNDYRPVQDLREVNKRVEDIHPTVPNPYNLLSGLPPSHQWYTVLDLKDAFFCLRLHPTSQPLFAFEWRDPGMGISGQLTWTRLPQGFKNSPTLFNEALHRDLADFRIQHPDLILLQYVDDILLAATSELDCQQGTRALLQTLGDLGYRASAKKAQICQKQVKYLGYLLREGQRWLTEARKETVMGQPVPKTPRQLREFLGKAGFCRLFIPGFAEMAAPLYPLTKPGTLFSWGPDQQKAYQEIKQALLTAPALGLPDLTKPFELFVDEKQGYAKGVLTQKLGPWRRPVAYLSKKLDPVAAGWPPCLRMVAAIAVLTKDAGKLTMGQPLVILAPHAVEALVKQPPDRWLSNARMTHYQAMLLDTDRVQFGPVVALNPATLLPLPEEGAPHDCLEILAETHGTRPDLTDQPIPDADHTWYTDGSSFLQEGQRKAGAAVTTETEVIWAGALPAGTSAQRAELIALTQALKMAEGKRLNVYTDSRYAFATAHIHGEIYRRRGWLTSEGREIKNKSEILALLKALFLPKRLSIIHCLGHQKGDSAEARGNRLADQAAREAAIKTPPDTSTLLIAGKRTADGSEFEKRTADGSEFESPKKKAKVE

SEQ ID NO: 2102 - protein, 2096 aa, synthetic construct
MPAAKRVKLDGGDKKYSIGLDIGTNSVGWAVITDEYKVPSKKFKVLGNTDRHSIKKNLIGALLFDSGETAEATRLKRTARRRYTRRKNRICYLQEIFSNEMAKVDDSFFHRLEESFLVEEDKKHERHPIFGNIVDEVAYHEKYPTIYHLRKKLVDSTDKADLRLIYLALAHMIKFRGHFLIEGDLNPDNSDVDKLFIQLVQTYNQLFEENPINASGVDAKAILSARLSKSRRLENLIAQLPGEKKNGLFGNLIALSLGLTPNFKSNFDLAEDAKLQLSKDTYDDDLDNLLAQIGDQYADLFLAAKNLSDAILLSDILRVNTEITKAPLSASMIKRYDEHHQDLTLLKALVRQQLPEKYKEIFFDQSKNGYAGYIDGGASQEEFYKFIKPILEKMDGTEELLVKLNREDLLRKQRTFDNGSIPHQIHLGELHAILRRQEDFYPFLKDNREKIEKILTFRIPYYVGPLARGNSRFAWMTRKSEETITPWNFEEVVDKGASAQSFIERMTNFDKNLPNEKVLPKHSLLYEYFTVYNELTKVKYVTEGMRKPAFLSGEQKKAIVDLLFKTNRKVTVKQLKEDYFKKIECFDSVEISGVEDRFNASLGTYHDLLKIIKDKDFLDNEENEDILEDIVLTLTLFEDREMIEERLKTYAHLFDDKVMKQLKRRRYTGWGRLSRKLINGIRDKQSGKTILDFLKSDGFANRNFMQLIHDDSLTFKEDIQKAQVSGQGDSLHEHIANLAGSPAIKKGILQTVKVVDELVKVMGRHKPENIVIEMARENQTTQKGQKNSRERMKRIEEGIKELGSQILKEHPVENTQLQNEKLYLYYLQNGRDMYVDQELDINRLSDYDVDHIVPQSFLKDDSIDNKVLTRSDKARGKSDNVPSEEVVKKMKNYWRQLLNAKLITQRKFDNLTKAERGGLSELDKAGFIKRQLVETRQITKHVAQILDSRMNTKYDENDKLIREVKVITLKSKLVSDFRKDFQFYKVREINNYHHAHDAYLNAVVGTALIKKYPKLESEFVYGDYKVYDVRKMIAKSEQEIGKATAKYFFYSNIMNFFKTEITLANGEIRKRPLIETNGETGEIVWDKGRDFATVRKVLSMPQVNIVKKTEVQTGGFSKESILPKRNSDKLIARKKDWDPKKYGGFDSPTVAYSVLVVAKVEKGKSKKLKSVKELLGITIMERSSFEKNPIDFLEAKGYKEVKKDLIIKLPKYSLFELENGRKRMLASAGELQKGNELALPSKYVNFLYLASHYEKLKGSPEDNEQKQLFVEQHKHYLDEIIEQISEFSKRVILADANLDKVLSAYNKHRDKPIREQAENIIHLFTLTNLGAPAAFKYFDTTIDRKRYTSTKEVLDATLIHQSITGLYETRIDLSQLGGDGGGGSEAAAKGGGGGLGIEDEYRLHETSTEPDVSLGSTWLSDFPQAWAETGGMGLAVRQAPLIIPLKATSTPVSIQQYPMSHEARLGIKPHIQRLLDQGILVPCQSPWNTPLLPVKKPGTNDYRPVQDLREVNKRVEDIHPTVPNPYNLLSGLPPSHQWYTVLDLKDAFFCLRLHPTSQPLFAFEWRDPGMGISGQLTWTRLPQGFKNSPTLFNEALHRDLADFRIQHPDLILLQYVDDILLAATSELDCQQGTRALLQTLGDLGYRASAKKAQICQKQVKYLGYLLREGQRWLTEARKETVMGQPVPKTPRQLREFLGKAGFCRLFIPGFAEMAAPLYPLTKPGTLFSWGPDQQKAYQEIKQALLTAPALGLPDLTKPFELFVDEKQGYAKGVLTQKLGPWRRPVAYLSKKLDPVAAGWPPCLRMVAAIAVLTKDAGKLTMGQPLVILAPHAVEALVKQPPDRWLSNARMTHYQAMLLDTDRVQFGPVVALNPATLLPLPEEGAPHDCLEILAETHGTRPDLTDQPIPDADHTWYTDGSSFLQEGQRKAGAAVTTETEVIWAGALPAGTSAQRAELIALTQALKMAEGKRLNVYTDSRYAFATAHIHGEIYRRRGWLTSEGREIKNKSEILALLKALFLPKRLSIIHCLGHQKGDSAEARGNRLADQAAREAAIKTPPDTSTLLIAGKRTADGSEFEKRTADGSEFESPKKKAKVE

SEQ ID NO: 2103 - protein, 2088 aa, synthetic construct
MPAAKRVKLDGGDKKYSIGLDIGTNSVGWAVITDEYKVPSKKFKVLGNTDRHSIKKNLIGALLFDSGETAEATRLKRTARRRYTRRKNRICYLQEIFSNEMAKVDDSFFHRLEESFLVEEDKKHERHPIFGNIVDEVAYHEKYPTIYHLRKKLVDSTDKADLRLIYLALAHMIKFRGHFLIEGDLNPDNSDVDKLFIQLVQTYNQLFEENPINASGVDAKAILSARLSKSRRLENLIAQLPGEKKNGLFGNLIALSLGLTPNFKSNFDLAEDAKLQLSKDTYDDDLDNLLAQIGDQYADLFLAAKNLSDAILLSDILRVNTEITKAPLSASMIKRYDEHHQDLTLLKALVRQQLPEKYKEIFFDQSKNGYAGYIDGGASQEEFYKFIKPILEKMDGTEELLVKLNREDLLRKQRTFDNGSIPHQIHLGELHAILRRQEDFYPFLKDNREKIEKILTFRIPYYVGPLARGNSRFAWMTRKSEETITPWNFEEVVDKGASAQSFIERMTNFDKNLPNEKVLPKHSLLYEYFTVYNELTKVKYVTEGMRKPAFLSGEQKKAIVDLLFKTNRKVTVKQLKEDYFKKIECFDSVEISGVEDRFNASLGTYHDLLKIIKDKDFLDNEENEDILEDIVLTLTLFEDREMIEERLKTYAHLFDDKVMKQLKRRRYTGWGRLSRKLINGIRDKQSGKTILDFLKSDGFANRNFMQLIHDDSLTFKEDIQKAQVSGQGDSLHEHIANLAGSPAIKKGILQTVKVVDELVKVMGRHKPENIVIEMARENQTTQKGQKNSRERMKRIEEGIKELGSQILKEHPVENTQLQNEKLYLYYLQNGRDMYVDQELDINRLSDYDVDHIVPQSFLKDDSIDNKVLTRSDKARGKSDNVPSEEVVKKMKNYWRQLLNAKLITQRKFDNLTKAERGGLSELDKAGFIKRQLVETRQITKHVAQILDSRMNTKYDENDKLIREVKVITLKSKLVSDFRKDFQFYKVREINNYHHAHDAYLNAVVGTALIKKYPKLESEFVYGDYKVYDVRKMIAKSEQEIGKATAKYFFYSNIMNFFKTEITLANGEIRKRPLIETNGETGEIVWDKGRDFATVRKVLSMPQVNIVKKTEVQTGGFSKESILPKRNSDKLIARKKDWDPKKYGGFDSPTVAYSVLVVAKVEKGKSKKLKSVKELLGITIMERSSFEKNPIDFLEAKGYKEVKKDLIIKLPKYSLFELENGRKRMLASAGELQKGNELALPSKYVNFLYLASHYEKLKGSPEDNEQKQLFVEQHKHYLDEIIEQISEFSKRVILADANLDKVLSAYNKHRDKPIREQAENIIHLFTLTNLGAPAAFKYFDTTIDRKRYTSTKEVLDATLIHQSITGLYETRIDLSQLGGDGGPAPGGLGIEDEYRLHETSTEPDVSLGSTWLSDFPQAWAETGGMGLAVRQAPLIIPLKATSTPVSIQQYPMSHEARLGIKPHIQRLLDQGILVPCQSPWNTPLLPVKKPGTNDYRPVQDLREVNKRVEDIHPTVPNPYNLLSGLPPSHQWYTVLDLKDAFFCLRLHPTSQPLFAFEWRDPGMGISGQLTWTRLPQGFKNSPTLFNEALHRDLADFRIQHPDLILLQYVDDILLAATSELDCQQGTRALLQTLGDLGYRASAKKAQICQKQVKYLGYLLREGQRWLTEARKETVMGQPVPKTPRQLREFLGKAGFCRLFIPGFAEMAAPLYPLTKPGTLFSWGPDQQKAYQEIKQALLTAPALGLPDLTKPFELFVDEKQGYAKGVLTQKLGPWRRPVAYLSKKLDPVAAGWPPCLRMVAAIAVLTKDAGKLTMGQPLVILAPHAVEALVKQPPDRWLSNARMTHYQAMLLDTDRVQFGPVVALNPATLLPLPEEGAPHDCLEILAETHGTRPDLTDQPIPDADHTWYTDGSSFLQEGQRKAGAAVTTETEVIWAGALPAGTSAQRAELIALTQALKMAEGKRLNVYTDSRYAFATAHIHGEIYRRRGWLTSEGREIKNKSEILALLKALFLPKRLSIIHCLGHQKGDSAEARGNRLADQAAREAAIKTPPDTSTLLIAGKRTADGSEFEKRTADGSEFESPKKKAKVE

SEQ ID NO: 2104 - protein, 2093 aa, synthetic construct
MPAAKRVKLDGGDKKYSIGLDIGTNSVGWAVITDEYKVPSKKFKVLGNTDRHSIKKNLIGALLFDSGETAEATRLKRTARRRYTRRKNRICYLQEIFSNEMAKVDDSFFHRLEESFLVEEDKKHERHPIFGNIVDEVAYHEKYPTIYHLRKKLVDSTDKADLRLIYLALAHMIKFRGHFLIEGDLNPDNSDVDKLFIQLVQTYNQLFEENPINASGVDAKAILSARLSKSRRLENLIAQLPGEKKNGLFGNLIALSLGLTPNFKSNFDLAEDAKLQLSKDTYDDDLDNLLAQIGDQYADLFLAAKNLSDAILLSDILRVNTEITKAPLSASMIKRYDEHHQDLTLLKALVRQQLPEKYKEIFFDQSKNGYAGYIDGGASQEEFYKFIKPILEKMDGTEELLVKLNREDLLRKQRTFDNGSIPHQIHLGELHAILRRQEDFYPFLKDNREKIEKILTFRIPYYVGPLARGNSRFAWMTRKSEETITPWNFEEVVDKGASAQSFIERMTNFDKNLPNEKVLPKHSLLYEYFTVYNELTKVKYVTEGMRKPAFLSGEQKKAIVDLLFKTNRKVTVKQLKEDYFKKIECFDSVEISGVEDRFNASLGTYHDLLKIIKDKDFLDNEENEDILEDIVLTLTLFEDREMIEERLKTYAHLFDDKVMKQLKRRRYTGWGRLSRKLINGIRDKQSGKTILDFLKSDGFANRNFMQLIHDDSLTFKEDIQKAQVSGQGDSLHEHIANLAGSPAIKKGILQTVKVVDELVKVMGRHKPENIVIEMARENQTTQKGQKNSRERMKRIEEGIKELGSQILKEHPVENTQLQNEKLYLYYLQNGRDMYVDQELDINRLSDYDVDHIVPQSFLKDDSIDNKVLTRSDKARGKSDNVPSEEVVKKMKNYWRQLLNAKLITQRKFDNLTKAERGGLSELDKAGFIKRQLVETRQITKHVAQILDSRMNTKYDENDKLIREVKVITLKSKLVSDFRKDFQFYKVREINNYHHAHDAYLNAVVGTALIKKYPKLESEFVYGDYKVYDVRKMIAKSEQEIGKATAKYFFYSNIMNFFKTEITLANGEIRKRPLIETNGETGEIVWDKGRDFATVRKVLSMPQVNIVKKTEVQTGGFSKESILPKRNSDKLIARKKDWDPKKYGGFDSPTVAYSVLVVAKVEKGKSKKLKSVKELLGITIMERSSFEKNPIDFLEAKGYKEVKKDLIIKLPKYSLFELENGRKRMLASAGELQKGNELALPSKYVNFLYLASHYEKLKGSPEDNEQKQLFVEQHKHYLDEIIEQISEFSKRVILADANLDKVLSAYNKHRDKPIREQAENIIHLFTLTNLGAPAAFKYFDTTIDRKRYTSTKEVLDATLIHQSITGLYETRIDLSQLGGDGGEAAAKGGSGGLGIEDEYRLHETSTEPDVSLGSTWLSDFPQAWAETGGMGLAVRQAPLIIPLKATSTPVSIQQYPMSHEARLGIKPHIQRLLDQGILVPCQSPWNTPLLPVKKPGTNDYRPVQDLREVNKRVEDIHPTVPNPYNLLSGLPPSHQWYTVLDLKDAFFCLRLHPTSQPLFAFEWRDPGMGISGQLTWTRLPQGFKNSPTLFNEALHRDLADFRIQHPDLILLQYVDDILLAATSELDCQQGTRALLQTLGDLGYRASAKKAQICQKQVKYLGYLLREGQRWLTEARKETVMGQPVPKTPRQLREFLGKAGFCRLFIPGFAEMAAPLYPLTKPGTLFSWGPDQQKAYQEIKQALLTAPALGLPDLTKPFELFVDEKQGYAKGVLTQKLGPWRRPVAYLSKKLDPVAAGWPPCLRMVAAIAVLTKDAGKLTMGQPLVILAPHAVEALVKQPPDRWLSNARMTHYQAMLLDTDRVQFGPVVALNPATLLPLPEEGAPHDCLEILAETHGTRPDLTDQPIPDADHTWYTDGSSFLQEGQRKAGAAVTTETEVIWAGALPAGTSAQRAELIALTQALKMAEGKRLNVYTDSRYAFATAHIHGEIYRRRGWLTSEGREIKNKSEILALLKALFLPKRLSIIHCLGHQKGDSAEARGNRLADQAAREAAIKTPPDTSTLLIAGKRTADGSEFEKRTADGSEFESPKKKAKVE

SEQ ID NO: 2105 - protein, 2093 aa, synthetic construct
MPAAKRVKLDGGDKKYSIGLDIGTNSVGWAVITDEYKVPSKKFKVLGNTDRHSIKKNLIGALLFDSGETAEATRLKRTARRRYTRRKNRICYLQEIFSNEMAKVDDSFFHRLEESFLVEEDKKHERHPIFGNIVDEVAYHEKYPTIYHLRKKLVDSTDKADLRLIYLALAHMIKFRGHFLIEGDLNPDNSDVDKLFIQLVQTYNQLFEENPINASGVDAKAILSARLSKSRRLENLIAQLPGEKKNGLFGNLIALSLGLTPNFKSNFDLAEDAKLQLSKDTYDDDLDNLLAQIGDQYADLFLAAKNLSDAILLSDILRVNTEITKAPLSASMIKRYDEHHQDLTLLKALVRQQLPEKYKEIFFDQSKNGYAGYIDGGASQEEFYKFIKPILEKMDGTEELLVKLNREDLLRKQRTFDNGSIPHQIHLGELHAILRRQEDFYPFLKDNREKIEKILTFRIPYYVGPLARGNSRFAWMTRKSEETITPWNFEEVVDKGASAQSFIERMTNFDKNLPNEKVLPKHSLLYEYFTVYNELTKVKYVTEGMRKPAFLSGEQKKAIVDLLFKTNRKVTVKQLKEDYFKKIECFDSVEISGVEDRFNASLGTYHDLLKIIKDKDFLDNEENEDILEDIVLTLTLFEDREMIEERLKTYAHLFDDKVMKQLKRRRYTGWGRLSRKLINGIRDKQSGKTILDFLKSDGFANRNFMQLIHDDSLTFKEDIQKAQVSGQGDSLHEHIANLAGSPAIKKGILQTVKVVDELVKVMGRHKPENIVIEMARENQTTQKGQKNSRERMKRIEEGIKELGSQILKEHPVENTQLQNEKLYLYYLQNGRDMYVDQELDINRLSDYDVDHIVPQSFLKDDSIDNKVLTRSDKARGKSDNVPSEEVVKKMKNYWRQLLNAKLITQRKFDNLTKAERGGLSELDKAGFIKRQLVETRQITKHVAQILDSRMNTKYDENDKLIREVKVITLKSKLVSDFRKDFQFYKVREINNYHHAHDAYLNAVVGTALIKKYPKLESEFVYGDYKVYDVRKMIAKSEQEIGKATAKYFFYSNIMNFFKTEITLANGEIRKRPLIETNGETGEIVWDKGRDFATVRKVLSMPQVNIVKKTEVQTGGFSKESILPKRNSDKLIARKKDWDPKKYGGFDSPTVAYSVLVVAKVEKGKSKKLKSVKELLGITIMERSSFEKNPIDFLEAKGYKEVKKDLIIKLPKYSLFELENGRKRMLASAGELQKGNELALPSKYVNFLYLASHYEKLKGSPEDNEQKQLFVEQHKHYLDEIIEQISEFSKRVILADANLDKVLSAYNKHRDKPIREQAENIIHLFTLTNLGAPAAFKYFDTTIDRKRYTSTKEVLDATLIHQSITGLYETRIDLSQLGGDGGGGSEAAAKGGLGIEDEYRLHETSTEPDVSLGSTWLSDFPQAWAETGGMGLAVRQAPLIIPLKATSTPVSIQQYPMSHEARLGIKPHIQRLLDQGILVPCQSPWNTPLLPVKKPGTNDYRPVQDLREVNKRVEDIHPTVPNPYNLLSGLPPSHQWYTVLDLKDAFFCLRLHPTSQPLFAFEWRDPGMGISGQLTWTRLPQGFKNSPTLFNEALHRDLADFRIQHPDLILLQYVDDILLAATSELDCQQGTRALLQTLGDLGYRASAKKAQICQKQVKYLGYLLREGQRWLTEARKETVMGQPVPKTPRQLREFLGKAGFCRLFIPGFAEMAAPLYPLTKPGTLFSWGPDQQKAYQEIKQALLTAPALGLPDLTKPFELFVDEKQGYAKGVLTQKLGPWRRPVAYLSKKLDPVAAGWPPCLRMVAAIAVLTKDAGKLTMGQPLVILAPHAVEALVKQPPDRWLSNARMTHYQAMLLDTDRVQFGPVVALNPATLLPLPEEGAPHDCLEILAETHGTRPDLTDQPIPDADHTWYTDGSSFLQEGQRKAGAAVTTETEVIWAGALPAGTSAQRAELIALTQALKMAEGKRLNVYTDSRYAFATAHIHGEIYRRRGWLTSEGREIKNKSEILALLKALFLPKRLSIIHCLGHQKGDSAEARGNRLADQAAREAAIKTPPDTSTLLIAGKRTADGSEFEKRTADGSEFESPKKKAKVE

SEQ ID NO: 2106 - protein, 2100 aa, synthetic construct
MPAAKRVKLDGGDKKYSIGLDIGTNSVGWAVITDEYKVPSKKFKVLGNTDRHSIKKNLIGALLFDSGETAEATRLKRTARRRYTRRKNRICYLQEIFSNEMAKVDDSFFHRLEESFLVEEDKKHERHPIFGNIVDEVAYHEKYPTIYHLRKKLVDSTDKADLRLIYLALAHMIKFRGHFLIEGDLNPDNSDVDKLFIQLVQTYNQLFEENPINASGVDAKAILSARLSKSRRLENLIAQLPGEKKNGLFGNLIALSLGLTPNFKSNFDLAEDAKLQLSKDTYDDDLDNLLAQIGDQYADLFLAAKNLSDAILLSDILRVNTEITKAPLSASMIKRYDEHHQDLTLLKALVRQQLPEKYKEIFFDQSKNGYAGYIDGGASQEEFYKFIKPILEKMDGTEELLVKLNREDLLRKQRTFDNGSIPHQIHLGELHAILRRQEDFYPFLKDNREKIEKILTFRIPYYVGPLARGNSRFAWMTRKSEETITPWNFEEVVDKGASAQSFIERMTNFDKNLPNEKVLPKHSLLYEYFTVYNELTKVKYVTEGMRKPAFLSGEQKKAIVDLLFKTNRKVTVKQLKEDYFKKIECFDSVEISGVEDRFNASLGTYHDLLKIIKDKDFLDNEENEDILEDIVLTLTLFEDREMIEERLKTYAHLFDDKVMKQLKRRRYTGWGRLSRKLINGIRDKQSGKTILDFLKSDGFANRNFMQLIHDDSLTFKEDIQKAQVSGQGDSLHEHIANLAGSPAIKKGILQTVKVVDELVKVMGRHKPENIVIEMARENQTTQKGQKNSRERMKRIEEGIKELGSQILKEHPVENTQLQNEKLYLYYLQNGRDMYVDQELDINRLSDYDVDHIVPQSFLKDDSIDNKVLTRSDKARGKSDNVPSEEVVKKMKNYWRQLLNAKLITQRKFDNLTKAERGGLSELDKAGFIKRQLVETRQITKHVAQILDSRMNTKYDENDKLIREVKVITLKSKLVSDFRKDFQFYKVREINNYHHAHDAYLNAVVGTALIKKYPKLESEFVYGDYKVYDVRKMIAKSEQEIGKATAKYFFYSNIMNFFKTEITLANGEIRKRPLIETNGETGEIVWDKGRDFATVRKVLSMPQVNIVKKTEVQTGGFSKESILPKRNSDKLIARKKDWDPKKYGGFDSPTVAYSVLVVAKVEKGKSKKLKSVKELLGITIMERSSFEKNPIDFLEAKGYKEVKKDLIIKLPKYSLFELENGRKRMLASAGELQKGNELALPSKYVNFLYLASHYEKLKGSPEDNEQKQLFVEQHKHYLDEIIEQISEFSKRVILADANLDKVLSAYNKHRDKPIREQAENIIHLFTLTNLGAPAAFKYFDTTIDRKRYTSTKEVLDATLIHQSITGLYETRIDLSQLGGDGGGGGGSEAAAKGGGGSGGLGIEDEYRLHETSTEPDVSLGSTWLSDFPQAWAETGGMGLAVRQAPLIIPLKATSTPVSIQQYPMSHEARLGIKPHIQRLLDQGILVPCQSPWNTPLLPVKKPGTNDYRPVQDLREVNKRVEDIHPTVPNPYNLLSGLPPSHQWYTVLDLKDAFFCLRLHPTSQPLFAFEWRDPGMGISGQLTWTRLPQGFKNSPTLFNEALHRDLADFRIQHPDLILLQYVDDILLAATSELDCQQGTRALLQTLGDLGYRASAKKAQICQKQVKYLGYLLREGQRWLTEARKETVMGQPVPKTPRQLREFLGKAGFCRLFIPGFAEMAAPLYPLTKPGTLFSWGPDQQKAYQEIKQALLTAPALGLPDLTKPFELFVDEKQGYAKGVLTQKLGPWRRPVAYLSKKLDPVAAGWPPCLRMVAAIAVLTKDAGKLTMGQPLVILAPHAVEALVKQPPDRWLSNARMTHYQAMLLDTDRVQFGPVVALNPATLLPLPEEGAPHDCLEILAETHGTRPDLTDQPIPDADHTWYTDGSSFLQEGQRKAGAAVTTETEVIWAGALPAGTSAQRAELIALTQALKMAEGKRLNVYTDSRYAFATAHIHGEIYRRRGWLTSEGREIKNKSEILALLKALFLPKRLSIIHCLGHQKGDSAEARGNRLADQAAREAAIKTPPDTSTLLIAGKRTADGSEFEKRTADGSEFESPKKKAKVE

SEQ ID NO: 2107 - protein, 2094 aa, synthetic construct
MPAAKRVKLDGGDKKYSIGLDIGTNSVGWAVITDEYKVPSKKFKVLGNTDRHSIKKNLIGALLFDSGETAEATRLKRTARRRYTRRKNRICYLQEIFSNEMAKVDDSFFHRLEESFLVEEDKKHERHPIFGNIVDEVAYHEKYPTIYHLRKKLVDSTDKADLRLIYLALAHMIKFRGHFLIEGDLNPDNSDVDKLFIQLVQTYNQLFEENPINASGVDAKAILSARLSKSRRLENLIAQLPGEKKNGLFGNLIALSLGLTPNFKSNFDLAEDAKLQLSKDTYDDDLDNLLAQIGDQYADLFLAAKNLSDAILLSDILRVNTEITKAPLSASMIKRYDEHHQDLTLLKALVRQQLPEKYKEIFFDQSKNGYAGYIDGGASQEEFYKFIKPILEKMDGTEELLVKLNREDLLRKQRTFDNGSIPHQIHLGELHAILRRQEDFYPFLKDNREKIEKILTFRIPYYVGPLARGNSRFAWMTRKSEETITPWNFEEVVDKGASAQSFIERMTNFDKNLPNEKVLPKHSLLYEYFTVYNELTKVKYVTEGMRKPAFLSGEQKKAIVDLLFKTNRKVTVKQLKEDYFKKIECFDSVEISGVEDRFNASLGTYHDLLKIIKDKDFLDNEENEDILEDIVLTLTLFEDREMIEERLKTYAHLFDDKVMKQLKRRRYTGWGRLSRKLINGIRDKQSGKTILDFLKSDGFANRNFMQLIHDDSLTFKEDIQKAQVSGQGDSLHEHIANLAGSPAIKKGILQTVKVVDELVKVMGRHKPENIVIEMARENQTTQKGQKNSRERMKRIEEGIKELGSQILKEHPVENTQLQNEKLYLYYLQNGRDMYVDQELDINRLSDYDVDHIVPQSFLKDDSIDNKVLTRSDKARGKSDNVPSEEVVKKMKNYWRQLLNAKLITQRKFDNLTKAERGGLSELDKAGFIKRQLVETRQITKHVAQILDSRMNTKYDENDKLIREVKVITLKSKLVSDFRKDFQFYKVREINNYHHAHDAYLNAVVGTALIKKYPKLESEFVYGDYKVYDVRKMIAKSEQEIGKATAKYFFYSNIMNFFKTEITLANGEIRKRPLIETNGETGEIVWDKGRDFATVRKVLSMPQVNIVKKTEVQTGGFSKESILPKRNSDKLIARKKDWDPKKYGGFDSPTVAYSVLVVAKVEKGKSKKLKSVKELLGITIMERSSFEKNPIDFLEAKGYKEVKKDLIIKLPKYSLFELENGRKRMLASAGELQKGNELALPSKYVNFLYLASHYEKLKGSPEDNEQKQLFVEQHKHYLDEIIEQISEFSKRVILADANLDKVLSAYNKHRDKPIREQAENIIHLFTLTNLGAPAAFKYFDTTIDRKRYTSTKEVLDATLIHQSITGLYETRIDLSQLGGDGGGGGGSSGGSGGLGIEDEYRLHETSTEPDVSLGSTWLSDFPQAWAETGGMGLAVRQAPLIIPLKATSTPVSIQQYPMSHEARLGIKPHIQRLLDQGILVPCQSPWNTPLLPVKKPGTNDYRPVQDLREVNKRVEDIHPTVPNPYNLLSGLPPSHQWYTVLDLKDAFFCLRLHPTSQPLFAFEWRDPGMGISGQLTWTRLPQGFKNSPTLFNEALHRDLADFRIQHPDLILLQYVDDILLAATSELDCQQGTRALLQTLGDLGYRASAKKAQICQKQVKYLGYLLREGQRWLTEARKETVMGQPVPKTPRQLREFLGKAGFCRLFIPGFAEMAAPLYPLTKPGTLFSWGPDQQKAYQEIKQALLTAPALGLPDLTKPFELFVDEKQGYAKGVLTQKLGPWRRPVAYLSKKLDPVAAGWPPCLRMVAAIAVLTKDAGKLTMGQPLVILAPHAVEALVKQPPDRWLSNARMTHYQAMLLDTDRVQFGPVVALNPATLLPLPEEGAPHDCLEILAETHGTRPDLTDQPIPDADHTWYTDGSSFLQEGQRKAGAAVTTETEVIWAGALPAGTSAQRAELIALTQALKMAEGKRLNVYTDSRYAFATAHIHGEIYRRRGWLTSEGREIKNKSEILALLKALFLPKRLSIIHCLGHQKGDSAEARGNRLADQAAREAAIKTPPDTSTLLIAGKRTADGSEFEKRTADGSEFESPKKKAKVE

SEQ ID NO: 2108 - protein, 2096 aa, synthetic construct
MPAAKRVKLDGGDKKYSIGLDIGTNSVGWAVITDEYKVPSKKFKVLGNTDRHSIKKNLIGALLFDSGETAEATRLKRTARRRYTRRKNRICYLQEIFSNEMAKVDDSFFHRLEESFLVEEDKKHERHPIFGNIVDEVAYHEKYPTIYHLRKKLVDSTDKADLRLIYLALAHMIKFRGHFLIEGDLNPDNSDVDKLFIQLVQTYNQLFEENPINASGVDAKAILSARLSKSRRLENLIAQLPGEKKNGLFGNLIALSLGLTPNFKSNFDLAEDAKLQLSKDTYDDDLDNLLAQIGDQYADLFLAAKNLSDAILLSDILRVNTEITKAPLSASMIKRYDEHHQDLTLLKALVRQQLPEKYKEIFFDQSKNGYAGYIDGGASQEEFYKFIKPILEKMDGTEELLVKLNREDLLRKQRTFDNGSIPHQIHLGELHAILRRQEDFYPFLKDNREKIEKILTFRIPYYVGPLARGNSRFAWMTRKSEETITPWNFEEVVDKGASAQSFIERMTNFDKNLPNEKVLPKHSLLYEYFTVYNELTKVKYVTEGMRKPAFLSGEQKKAIVDLLFKTNRKVTVKQLKEDYFKKIECFDSVEISGVEDRFNASLGTYHDLLKIIKDKDFLDNEENEDILEDIVLTLTLFEDREMIEERLKTYAHLFDDKVMKQLKRRRYTGWGRLSRKLINGIRDKQSGKTILDFLKSDGFANRNFMQLIHDDSLTFKEDIQKAQVSGQGDSLHEHIANLAGSPAIKKGILQTVKVVDELVKVMGRHKPENIVIEMARENQTTQKGQKNSRERMKRIEEGIKELGSQILKEHPVENTQLQNEKLYLYYLQNGRDMYVDQELDINRLSDYDVDHIVPQSFLKDDSIDNKVLTRSDKARGKSDNVPSEEVVKKMKNYWRQLLNAKLITQRKFDNLTKAERGGLSELDKAGFIKRQLVETRQITKHVAQILDSRMNTKYDENDKLIREVKVITLKSKLVSDFRKDFQFYKVREINNYHHAHDAYLNAVVGTALIKKYPKLESEFVYGDYKVYDVRKMIAKSEQEIGKATAKYFFYSNIMNFFKTEITLANGEIRKRPLIETNGETGEIVWDKGRDFATVRKVLSMPQVNIVKKTEVQTGGFSKESILPKRNSDKLIARKKDWDPKKYGGFDSPTVAYSVLVVAKVEKGKSKKLKSVKELLGITIMERSSFEKNPIDFLEAKGYKEVKKDLIIKLPKYSLFELENGRKRMLASAGELQKGNELALPSKYVNFLYLASHYEKLKGSPEDNEQKQLFVEQHKHYLDEIIEQISEFSKRVILADANLDKVLSAYNKHRDKPIREQAENIIHLFTLTNLGAPAAFKYFDTTIDRKRYTSTKEVLDATLIHQSITGLYETRIDLSQLGGDGGGSSGGGEAAAKGGLGIEDEYRLHETSTEPDVSLGSTWLSDFPQAWAETGGMGLAVRQAPLIIPLKATSTPVSIQQYPMSHEARLGIKPHIQRLLDQGILVPCQSPWNTPLLPVKKPGTNDYRPVQDLREVNKRVEDIHPTVPNPYNLLSGLPPSHQWYTVLDLKDAFFCLRLHPTSQPLFAFEWRDPGMGISGQLTWTRLPQGFKNSPTLFNEALHRDLADFRIQHPDLILLQYVDDILLAATSELDCQQGTRALLQTLGDLGYRASAKKAQICQKQVKYLGYLLREGQRWLTEARKETVMGQPVPKTPRQLREFLGKAGFCRLFIPGFAEMAAPLYPLTKPGTLFSWGPDQQKAYQEIKQALLTAPALGLPDLTKPFELFVDEKQGYAKGVLTQKLGPWRRPVAYLSKKLDPVAAGWPPCLRMVAAIAVLTKDAGKLTMGQPLVILAPHAVEALVKQPPDRWLSNARMTHYQAMLLDTDRVQFGPVVALNPATLLPLPEEGAPHDCLEILAETHGTRPDLTDQPIPDADHTWYTDGSSFLQEGQRKAGAAVTTETEVIWAGALPAGTSAQRAELIALTQALKMAEGKRLNVYTDSRYAFATAHIHGEIYRRRGWLTSEGREIKNKSEILALLKALFLPKRLSIIHCLGHQKGDSAEARGNRLADQAAREAAIKTPPDTSTLLIAGKRTADGSEFEKRTADGSEFESPKKKAKVE

SEQ ID NO: 2109 - protein, 2096 aa, synthetic construct
MPAAKRVKLDGGDKKYSIGLDIGTNSVGWAVITDEYKVPSKKFKVLGNTDRHSIKKNLIGALLFDSGETAEATRLKRTARRRYTRRKNRICYLQEIFSNEMAKVDDSFFHRLEESFLVEEDKKHERHPIFGNIVDEVAYHEKYPTIYHLRKKLVDSTDKADLRLIYLALAHMIKFRGHFLIEGDLNPDNSDVDKLFIQLVQTYNQLFEENPINASGVDAKAILSARLSKSRRLENLIAQLPGEKKNGLFGNLIALSLGLTPNFKSNFDLAEDAKLQLSKDTYDDDLDNLLAQIGDQYADLFLAAKNLSDAILLSDILRVNTEITKAPLSASMIKRYDEHHQDLTLLKALVRQQLPEKYKEIFFDQSKNGYAGYIDGGASQEEFYKFIKPILEKMDGTEELLVKLNREDLLRKQRTFDNGSIPHQIHLGELHAILRRQEDFYPFLKDNREKIEKILTFRIPYYVGPLARGNSRFAWMTRKSEETITPWNFEEVVDKGASAQSFIERMTNFDKNLPNEKVLPKHSLLYEYFTVYNELTKVKYVTEGMRKPAFLSGEQKKAIVDLLFKTNRKVTVKQLKEDYFKKIECFDSVEISGVEDRFNASLGTYHDLLKIIKDKDFLDNEENEDILEDIVLTLTLFEDREMIEERLKTYAHLFDDKVMKQLKRRRYTGWGRLSRKLINGIRDKQSGKTILDFLKSDGFANRNFMQLIHDDSLTFKEDIQKAQVSGQGDSLHEHIANLAGSPAIKKGILQTVKVVDELVKVMGRHKPENIVIEMARENQTTQKGQKNSRERMKRIEEGIKELGSQILKEHPVENTQLQNEKLYLYYLQNGRDMYVDQELDINRLSDYDVDHIVPQSFLKDDSIDNKVLTRSDKARGKSDNVPSEEVVKKMKNYWRQLLNAKLITQRKFDNLTKAERGGLSELDKAGFIKRQLVETRQITKHVAQILDSRMNTKYDENDKLIREVKVITLKSKLVSDFRKDFQFYKVREINNYHHAHDAYLNAVVGTALIKKYPKLESEFVYGDYKVYDVRKMIAKSEQEIGKATAKYFFYSNIMNFFKTEITLANGEIRKRPLIETNGETGEIVWDKGRDFATVRKVLSMPQVNIVKKTEVQTGGFSKESILPKRNSDKLIARKKDWDPKKYGGFDSPTVAYSVLVVAKVEKGKSKKLKSVKELLGITIMERSSFEKNPIDFLEAKGYKEVKKDLIIKLPKYSLFELENGRKRMLASAGELQKGNELALPSKYVNFLYLASHYEKLKGSPEDNEQKQLFVEQHKHYLDEIIEQISEFSKRVILADANLDKVLSAYNKHRDKPIREQAENIIHLFTLTNLGAPAAFKYFDTTIDRKRYTSTKEVLDATLIHQSITGLYETRIDLSQLGGDGGGSSEAAAKPAPGGLGIEDEYRLHETSTEPDVSLGSTWLSDFPQAWAETGGMGLAVRQAPLIIPLKATSTPVSIQQYPMSHEARLGIKPHIQRLLDQGILVPCQSPWNTPLLPVKKPGTNDYRPVQDLREVNKRVEDIHPTVPNPYNLLSGLPPSHQWYTVLDLKDAFFCLRLHPTSQPLFAFEWRDPGMGISGQLTWTRLPQGFKNSPTLFNEALHRDLADFRIQHPDLILLQYVDDILLAATSELDCQQGTRALLQTLGDLGYRASAKKAQICQKQVKYLGYLLREGQRWLTEARKETVMGQPVPKTPRQLREFLGKAGFCRLFIPGFAEMAAPLYPLTKPGTLFSWGPDQQKAYQEIKQALLTAPALGLPDLTKPFELFVDEKQGYAKGVLTQKLGPWRRPVAYLSKKLDPVAAGWPPCLRMVAAIAVLTKDAGKLTMGQPLVILAPHAVEALVKQPPDRWLSNARMTHYQAMLLDTDRVQFGPVVALNPATLLPLPEEGAPHDCLEILAETHGTRPDLTDQPIPDADHTWYTDGSSFLQEGQRKAGAAVTTETEVIWAGALPAGTSAQRAELIALTQALKMAEGKRLNVYTDSRYAFATAHIHGEIYRRRGWLTSEGREIKNKSEILALLKALFLPKRLSIIHCLGHQKGDSAEARGNRLADQAAREAAIKTPPDTSTLLIAGKRTADGSEFEKRTADGSEFESPKKKAKVE

SEQ ID NO: 2110 - protein, 2092 aa, synthetic construct
MPAAKRVKLDGGDKKYSIGLDIGTNSVGWAVITDEYKVPSKKFKVLGNTDRHSIKKNLIGALLFDSGETAEATRLKRTARRRYTRRKNRICYLQEIFSNEMAKVDDSFFHRLEESFLVEEDKKHERHPIFGNIVDEVAYHEKYPTIYHLRKKLVDSTDKADLRLIYLALAHMIKFRGHFLIEGDLNPDNSDVDKLFIQLVQTYNQLFEENPINASGVDAKAILSARLSKSRRLENLIAQLPGEKKNGLFGNLIALSLGLTPNFKSNFDLAEDAKLQLSKDTYDDDLDNLLAQIGDQYADLFLAAKNLSDAILLSDILRVNTEITKAPLSASMIKRYDEHHQDLTLLKALVRQQLPEKYKEIFFDQSKNGYAGYIDGGASQEEFYKFIKPILEKMDGTEELLVKLNREDLLRKQRTFDNGSIPHQIHLGELHAILRRQEDFYPFLKDNREKIEKILTFRIPYYVGPLARGNSRFAWMTRKSEETITPWNFEEVVDKGASAQSFIERMTNFDKNLPNEKVLPKHSLLYEYFTVYNELTKVKYVTEGMRKPAFLSGEQKKAIVDLLFKTNRKVTVKQLKEDYFKKIECFDSVEISGVEDRFNASLGTYHDLLKIIKDKDFLDNEENEDILEDIVLTLTLFEDREMIEERLKTYAHLFDDKVMKQLKRRRYTGWGRLSRKLINGIRDKQSGKTILDFLKSDGFANRNFMQLIHDDSLTFKEDIQKAQVSGQGDSLHEHIANLAGSPAIKKGILQTVKVVDELVKVMGRHKPENIVIEMARENQTTQKGQKNSRERMKRIEEGIKELGSQILKEHPVENTQLQNEKLYLYYLQNGRDMYVDQELDINRLSDYDVDHIVPQSFLKDDSIDNKVLTRSDKARGKSDNVPSEEVVKKMKNYWRQLLNAKLITQRKFDNLTKAERGGLSELDKAGFIKRQLVETRQITKHVAQILDSRMNTKYDENDKLIREVKVITLKSKLVSDFRKDFQFYKVREINNYHHAHDAYLNAVVGTALIKKYPKLESEFVYGDYKVYDVRKMIAKSEQEIGKATAKYFFYSNIMNFFKTEITLANGEIRKRPLIETNGETGEIVWDKGRDFATVRKVLSMPQVNIVKKTEVQTGGFSKESILPKRNSDKLIARKKDWDPKKYGGFDSPTVAYSVLVVAKVEKGKSKKLKSVKELLGITIMERSSFEKNPIDFLEAKGYKEVKKDLIIKLPKYSLFELENGRKRMLASAGELQKGNELALPSKYVNFLYLASHYEKLKGSPEDNEQKQLFVEQHKHYLDEIIEQISEFSKRVILADANLDKVLSAYNKHRDKPIREQAENIIHLFTLTNLGAPAAFKYFDTTIDRKRYTSTKEVLDATLIHQSITGLYETRIDLSQLGGDGGGGGGGGGGGLGIEDEYRLHETSTEPDVSLGSTWLSDFPQAWAETGGMGLAVRQAPLIIPLKATSTPVSIQQYPMSHEARLGIKPHIQRLLDQGILVPCQSPWNTPLLPVKKPGTNDYRPVQDLREVNKRVEDIHPTVPNPYNLLSGLPPSHQWYTVLDLKDAFFCLRLHPTSQPLFAFEWRDPGMGISGQLTWTRLPQGFKNSPTLFNEALHRDLADFRIQHPDLILLQYVDDILLAATSELDCQQGTRALLQTLGDLGYRASAKKAQICQKQVKYLGYLLREGQRWLTEARKETVMGQPVPKTPRQLREFLGKAGFCRLFIPGFAEMAAPLYPLTKPGTLFSWGPDQQKAYQEIKQALLTAPALGLPDLTKPFELFVDEKQGYAKGVLTQKLGPWRRPVAYLSKKLDPVAAGWPPCLRMVAAIAVLTKDAGKLTMGQPLVILAPHAVEALVKQPPDRWLSNARMTHYQAMLLDTDRVQFGPVVALNPATLLPLPEEGAPHDCLEILAETHGTRPDLTDQPIPDADHTWYTDGSSFLQEGQRKAGAAVTTETEVIWAGALPAGTSAQRAELIALTQALKMAEGKRLNVYTDSRYAFATAHIHGEIYRRRGWLTSEGREIKNKSEILALLKALFLPKRLSIIHCLGHQKGDSAEARGNRLADQAAREAAIKTPPDTSTLLIAGKRTADGSEFEKRTADGSEFESPKKKAKVE

SEQ ID NO: 2111 - protein, 2091 aa, synthetic construct
MPAAKRVKLDGGDKKYSIGLDIGTNSVGWAVITDEYKVPSKKFKVLGNTDRHSIKKNLIGALLFDSGETAEATRLKRTARRRYTRRKNRICYLQEIFSNEMAKVDDSFFHRLEESFLVEEDKKHERHPIFGNIVDEVAYHEKYPTIYHLRKKLVDSTDKADLRLIYLALAHMIKFRGHFLIEGDLNPDNSDVDKLFIQLVQTYNQLFEENPINASGVDAKAILSARLSKSRRLENLIAQLPGEKKNGLFGNLIALSLGLTPNFKSNFDLAEDAKLQLSKDTYDDDLDNLLAQIGDQYADLFLAAKNLSDAILLSDILRVNTEITKAPLSASMIKRYDEHHQDLTLLKALVRQQLPEKYKEIFFDQSKNGYAGYIDGGASQEEFYKFIKPILEKMDGTEELLVKLNREDLLRKQRTFDNGSIPHQIHLGELHAILRRQEDFYPFLKDNREKIEKILTFRIPYYVGPLARGNSRFAWMTRKSEETITPWNFEEVVDKGASAQSFIERMTNFDKNLPNEKVLPKHSLLYEYFTVYNELTKVKYVTEGMRKPAFLSGEQKKAIVDLLFKTNRKVTVKQLKEDYFKKIECFDSVEISGVEDRFNASLGTYHDLLKIIKDKDFLDNEENEDILEDIVLTLTLFEDREMIEERLKTYAHLFDDKVMKQLKRRRYTGWGRLSRKLINGIRDKQSGKTILDFLKSDGFANRNFMQLIHDDSLTFKEDIQKAQVSGQGDSLHEHIANLAGSPAIKKGILQTVKVVDELVKVMGRHKPENIVIEMARENQTTQKGQKNSRERMKRIEEGIKELGSQILKEHPVENTQLQNEKLYLYYLQNGRDMYVDQELDINRLSDYDVDHIVPQSFLKDDSIDNKVLTRSDKARGKSDNVPSEEVVKKMKNYWRQLLNAKLITQRKFDNLTKAERGGLSELDKAGFIKRQLVETRQITKHVAQILDSRMNTKYDENDKLIREVKVITLKSKLVSDFRKDFQFYKVREINNYHHAHDAYLNAVVGTALIKKYPKLESEFVYGDYKVYDVRKMIAKSEQEIGKATAKYFFYSNIMNFFKTEITLANGEIRKRPLIETNGETGEIVWDKGRDFATVRKVLSMPQVNIVKKTEVQTGGFSKESILPKRNSDKLIARKKDWDPKKYGGFDSPTVAYSVLVVAKVEKGKSKKLKSVKELLGITIMERSSFEKNPIDFLEAKGYKEVKKDLIIKLPKYSLFELENGRKRMLASAGELQKGNELALPSKYVNFLYLASHYEKLKGSPEDNEQKQLFVEQHKHYLDEIIEQISEFSKRVILADANLDKVLSAYNKHRDKPIREQAENIIHLFTLTNLGAPAAFKYFDTTIDRKRYTSTKEVLDATLIHQSITGLYETRIDLSQLGGDGGGGGGGGGGLGIEDEYRLHETSTEPDVSLGSTWLSDFPQAWAETGGMGLAVRQAPLIIPLKATSTPVSIQQYPMSHEARLGIKPHIQRLLDQGILVPCQSPWNTPLLPVKKPGTNDYRPVQDLREVNKRVEDIHPTVPNPYNLLSGLPPSHQWYTVLDLKDAFFCLRLHPTSQPLFAFEWRDPGMGISGQLTWTRLPQGFKNSPTLFNEALHRDLADFRIQHPDLILLQYVDDILLAATSELDCQQGTRALLQTLGDLGYRASAKKAQICQKQVKYLGYLLREGQRWLTEARKETVMGQPVPKTPRQLREFLGKAGFCRLFIPGFAEMAAPLYPLTKPGTLFSWGPDQQKAYQEIKQALLTAPALGLPDLTKPFELFVDEKQGYAKGVLTQKLGPWRRPVAYLSKKLDPVAAGWPPCLRMVAAIAVLTKDAGKLTMGQPLVILAPHAVEALVKQPPDRWLSNARMTHYQAMLLDTDRVQFGPVVALNPATLLPLPEEGAPHDCLEILAETHGTRPDLTDQPIPDADHTWYTDGSSFLQEGQRKAGAAVTTETEVIWAGALPAGTSAQRAELIALTQALKMAEGKRLNVYTDSRYAFATAHIHGEIYRRRGWLTSEGREIKNKSEILALLKALFLPKRLSIIHCLGHQKGDSAEARGNRLADQAAREAAIKTPPDTSTLLIAGKRTADGSEFEKRTADGSEFESPKKKAKVE

SEQ ID NO: 2112 - protein, 2096 aa, synthetic construct
MPAAKRVKLDGGDKKYSIGLDIGTNSVGWAVITDEYKVPSKKFKVLGNTDRHSIKKNLIGALLFDSGETAEATRLKRTARRRYTRRKNRICYLQEIFSNEMAKVDDSFFHRLEESFLVEEDKKHERHPIFGNIVDEVAYHEKYPTIYHLRKKLVDSTDKADLRLIYLALAHMIKFRGHFLIEGDLNPDNSDVDKLFIQLVQTYNQLFEENPINASGVDAKAILSARLSKSRRLENLIAQLPGEKKNGLFGNLIALSLGLTPNFKSNFDLAEDAKLQLSKDTYDDDLDNLLAQIGDQYADLFLAAKNLSDAILLSDILRVNTEITKAPLSASMIKRYDEHHQDLTLLKALVRQQLPEKYKEIFFDQSKNGYAGYIDGGASQEEFYKFIKPILEKMDGTEELLVKLNREDLLRKQRTFDNGSIPHQIHLGELHAILRRQEDFYPFLKDNREKIEKILTFRIPYYVGPLARGNSRFAWMTRKSEETITPWNFEEVVDKGASAQSFIERMTNFDKNLPNEKVLPKHSLLYEYFTVYNELTKVKYVTEGMRKPAFLSGEQKKAIVDLLFKTNRKVTVKQLKEDYFKKIECFDSVEISGVEDRFNASLGTYHDLLKIIKDKDFLDNEENEDILEDIVLTLTLFEDREMIEERLKTYAHLFDDKVMKQLKRRRYTGWGRLSRKLINGIRDKQSGKTILDFLKSDGFANRNFMQLIHDDSLTFKEDIQKAQVSGQGDSLHEHIANLAGSPAIKKGILQTVKVVDELVKVMGRHKPENIVIEMARENQTTQKGQKNSRERMKRIEEGIKELGSQILKEHPVENTQLQNEKLYLYYLQNGRDMYVDQELDINRLSDYDVDHIVPQSFLKDDSIDNKVLTRSDKARGKSDNVPSEEVVKKMKNYWRQLLNAKLITQRKFDNLTKAERGGLSELDKAGFIKRQLVETRQITKHVAQILDSRMNTKYDENDKLIREVKVITLKSKLVSDFRKDFQFYKVREINNYHHAHDAYLNAVVGTALIKKYPKLESEFVYGDYKVYDVRKMIAKSEQEIGKATAKYFFYSNIMNFFKTEITLANGEIRKRPLIETNGETGEIVWDKGRDFATVRKVLSMPQVNIVKKTEVQTGGFSKESILPKRNSDKLIARKKDWDPKKYGGFDSPTVAYSVLVVAKVEKGKSKKLKSVKELLGITIMERSSFEKNPIDFLEAKGYKEVKKDLIIKLPKYSLFELENGRKRMLASAGELQKGNELALPSKYVNFLYLASHYEKLKGSPEDNEQKQLFVEQHKHYLDEIIEQISEFSKRVILADANLDKVLSAYNKHRDKPIREQAENIIHLFTLTNLGAPAAFKYFDTTIDRKRYTSTKEVLDATLIHQSITGLYETRIDLSQLGGDGGEAAAKGGSPAPGGLGIEDEYRLHETSTEPDVSLGSTWLSDFPQAWAETGGMGLAVRQAPLIIPLKATSTPVSIQQYPMSHEARLGIKPHIQRLLDQGILVPCQSPWNTPLLPVKKPGTNDYRPVQDLREVNKRVEDIHPTVPNPYNLLSGLPPSHQWYTVLDLKDAFFCLRLHPTSQPLFAFEWRDPGMGISGQLTWTRLPQGFKNSPTLFNEALHRDLADFRIQHPDLILLQYVDDILLAATSELDCQQGTRALLQTLGDLGYRASAKKAQICQKQVKYLGYLLREGQRWLTEARKETVMGQPVPKTPRQLREFLGKAGFCRLFIPGFAEMAAPLYPLTKPGTLFSWGPDQQKAYQEIKQALLTAPALGLPDLTKPFELFVDEKQGYAKGVLTQKLGPWRRPVAYLSKKLDPVAAGWPPCLRMVAAIAVLTKDAGKLTMGQPLVILAPHAVEALVKQPPDRWLSNARMTHYQAMLLDTDRVQFGPVVALNPATLLPLPEEGAPHDCLEILAETHGTRPDLTDQPIPDADHTWYTDGSSFLQEGQRKAGAAVTTETEVIWAGALPAGTSAQRAELIALTQALKMAEGKRLNVYTDSRYAFATAHIHGEIYRRRGWLTSEGREIKNKSEILALLKALFLPKRLSIIHCLGHQKGDSAEARGNRLADQAAREAAIKTPPDTSTLLIAGKRTADGSEFEKRTADGSEFESPKKKAKVE

SEQ ID NO: 2113 - protein, 2088 aa, synthetic construct; identical to SEQ ID NO: 2053

SEQ ID NO: 2114 - protein, 2094 aa, synthetic construct; identical to SEQ ID NO: 2060

SEQ ID NO: 2115 - protein, 2093 aa, synthetic construct
MPAAKRVKLDGGDKKYSIGLDIGTNSVGWAVITDEYKVPSKKFKVLGNTDRHSIKKNLIGALLFDSGETAEATRLKRTARRRYTRRKNRICYLQEIFSNEMAKVDDSFFHRLEESFLVEEDKKHERHPIFGNIVDEVAYHEKYPTIYHLRKKLVDSTDKADLRLIYLALAHMIKFRGHFLIEGDLNPDNSDVDKLFIQLVQTYNQLFEENPINASGVDAKAILSARLSKSRRLENLIAQLPGEKKNGLFGNLIALSLGLTPNFKSNFDLAEDAKLQLSKDTYDDDLDNLLAQIGDQYADLFLAAKNLSDAILLSDILRVNTEITKAPLSASMIKRYDEHHQDLTLLKALVRQQLPEKYKEIFFDQSKNGYAGYIDGGASQEEFYKFIKPILEKMDGTEELLVKLNREDLLRKQRTFDNGSIPHQIHLGELHAILRRQEDFYPFLKDNREKIEKILTFRIPYYVGPLARGNSRFAWMTRKSEETITPWNFEEVVDKGASAQSFIERMTNFDKNLPNEKVLPKHSLLYEYFTVYNELTKVKYVTEGMRKPAFLSGEQKKAIVDLLFKTNRKVTVKQLKEDYFKKIECFDSVEISGVEDRFNASLGTYHDLLKIIKDKDFLDNEENEDILEDIVLTLTLFEDREMIEERLKTYAHLFDDKVMKQLKRRRYTGWGRLSRKLINGIRDKQSGKTILDFLKSDGFANRNFMQLIHDDSLTFKEDIQKAQVSGQGDSLHEHIANLAGSPAIKKGILQTVKVVDELVKVMGRHKPENIVIEMARENQTTQKGQKNSRERMKRIEEGIKELGSQILKEHPVENTQLQNEKLYLYYLQNGRDMYVDQELDINRLSDYDVDHIVPQSFLKDDSIDNKVLTRSDKARGKSDNVPSEEVVKKMKNYWRQLLNAKLITQRKFDNLTKAERGGLSELDKAGFIKRQLVETRQITKHVAQILDSRMNTKYDENDKLIREVKVITLKSKLVSDFRKDFQFYKVREINNYHHAHDAYLNAVVGTALIKKYPKLESEFVYGDYKVYDVRKMIAKSEQEIGKATAKYFFYSNIMNFFKTEITLANGEIRKRPLIETNGETGEIVWDKGRDFATVRKVLSMPQVNIVKKTEVQTGGFSKESILPKRNSDKLIARKKDWDPKKYGGFDSPTVAYSVLVVAKVEKGKSKKLKSVKELLGITIMERSSFEKNPIDFLEAKGYKEVKKDLIIKLPKYSLFELENGRKRMLASAGELQKGNELALPSKYVNFLYLASHYEKLKGSPEDNEQKQLFVEQHKHYLDEIIEQISEFSKRVILADANLDKVLSAYNKHRDKPIREQAENIIHLFTLTNLGAPAAFKYFDTTIDRKRYTSTKEVLDATLIHQSITGLYETRIDLSQLGGDGGGSSEAAAKGGLGIEDEYRLHETSTEPDVSLGSTWLSDFPQAWAETGGMGLAVRQAPLIIPLKATSTPVSIQQYPMSHEARLGIKPHIQRLLDQGILVPCQSPWNTPLLPVKKPGTNDYRPVQDLREVNKRVEDIHPTVPNPYNLLSGLPPSHQWYTVLDLKDAFFCLRLHPTSQPLFAFEWRDPGMGISGQLTWTRLPQGFKNSPTLFNEALHRDLADFRIQHPDLILLQYVDDILLAATSELDCQQGTRALLQTLGDLGYRASAKKAQICQKQVKYLGYLLREGQRWLTEARKETVMGQPVPKTPRQLREFLGKAGFCRLFIPGFAEMAAPLYPLTKPGTLFSWGPDQQKAYQEIKQALLTAPALGLPDLTKPFELFVDEKQGYAKGVLTQKLGPWRRPVAYLSKKLDPVAAGWPPCLRMVAAIAVLTKDAGKLTMGQPLVILAPHAVEALVKQPPDRWLSNARMTHYQAMLLDTDRVQFGPVVALNPATLLPLPEEGAPHDCLEILAETHGTRPDLTDQPIPDADHTWYTDGSSFLQEGQRKAGAAVTTETEVIWAGALPAGTSAQRAELIALTQALKMAEGKRLNVYTDSRYAFATAHIHGEIYRRRGWLTSEGREIKNKSEILALLKALFLPKRLSIIHCLGHQKGDSAEARGNRLADQAAREAAIKTPPDTSTLLIAGKRTADGSEFEKRTADGSEFESPKKKAKVE

SEQ ID NO: 2116 - protein, 2100 aa, synthetic construct
MPAAKRVKLDGGDKKYSIGLDIGTNSVGWAVITDEYKVPSKKFKVLGNTDRHSIKKNLIGALLFDSGETAEATRLKRTARRRYTRRKNRICYLQEIFSNEMAKVDDSFFHRLEESFLVEEDKKHERHPIFGNIVDEVAYHEKYPTIYHLRKKLVDSTDKADLRLIYLALAHMIKFRGHFLIEGDLNPDNSDVDKLFIQLVQTYNQLFEENPINASGVDAKAILSARLSKSRRLENLIAQLPGEKKNGLFGNLIALSLGLTPNFKSNFDLAEDAKLQLSKDTYDDDLDNLLAQIGDQYADLFLAAKNLSDAILLSDILRVNTEITKAPLSASMIKRYDEHHQDLTLLKALVRQQLPEKYKEIFFDQSKNGYAGYIDGGASQEEFYKFIKPILEKMDGTEELLVKLNREDLLRKQRTFDNGSIPHQIHLGELHAILRRQEDFYPFLKDNREKIEKILTFRIPYYVGPLARGNSRFAWMTRKSEETITPWNFEEVVDKGASAQSFIERMTNFDKNLPNEKVLPKHSLLYEYFTVYNELTKVKYVTEGMRKPAFLSGEQKKAIVDLLFKTNRKVTVKQLKEDYFKKIECFDSVEISGVEDRFNASLGTYHDLLKIIKDKDFLDNEENEDILEDIVLTLTLFEDREMIEERLKTYAHLFDDKVMKQLKRRRYTGWGRLSRKLINGIRDKQSGKTILDFLKSDGFANRNFMQLIHDDSLTFKEDIQKAQVSGQGDSLHEHIANLAGSPAIKKGILQTVKVVDELVKVMGRHKPENIVIEMARENQTTQKGQKNSRERMKRIEEGIKELGSQILKEHPVENTQLQNEKLYLYYLQNGRDMYVDQELDINRLSDYDVDHIVPQSFLKDDSIDNKVLTRSDKARGKSDNVPSEEVVKKMKNYWRQLLNAKLITQRKFDNLTKAERGGLSELDKAGFIKRQLVETRQITKHVAQILDSRMNTKYDENDKLIREVKVITLKSKLVSDFRKDFQFYKVREINNYHHAHDAYLNAVVGTALIKKYPKLESEFVYGDYKVYDVRKMIAKSEQEIGKATAKYFFYSNIMNFFKTEITLANGEIRKRPLIETNGETGEIVWDKGRDFATVRKVLSMPQVNIVKKTEVQTGGFSKESILPKRNSDKLIARKKDWDPKKYGGFDSPTVAYSVLVVAKVEKGKSKKLKSVKELLGITIMERSSFEKNPIDFLEAKGYKEVKKDLIIKLPKYSLFELENGRKRMLASAGELQKGNELALPSKYVNFLYLASHYEKLKGSPEDNEQKQLFVEQHKHYLDEIIEQISEFSKRVILADANLDKVLSAYNKHRDKPIREQAENIIHLFTLTNLGAPAAFKYFDTTIDRKRYTSTKEVLDATLIHQSITGLYETRIDLSQLGGDGGGGGGSGGGGSGGGGSGGLGIEDEYRLHETSTEPDVSLGSTWLSDFPQAWAETGGMGLAVRQAPLIIPLKATSTPVSIQQYPMSHEARLGIKPHIQRLLDQGILVPCQSPWNTPLLPVKKPGTNDYRPVQDLREVNKRVEDIHPTVPNPYNLLSGLPPSHQWYTVLDLKDAFFCLRLHPTSQPLFAFEWRDPGMGISGQLTWTRLPQGFKNSPTLFNEALHRDLADFRIQHPDLILLQYVDDILLAATSELDCQQGTRALLQTLGDLGYRASAKKAQICQKQVKYLGYLLREGQRWLTEARKETVMGQPVPKTPRQLREFLGKAGFCRLFIPGFAEMAAPLYPLTKPGTLFSWGPDQQKAYQEIKQALLTAPALGLPDLTKPFELFVDEKQGYAKGVLTQKLGPWRRPVAYLSKKLDPVAAGWPPCLRMVAAIAVLTKDAGKLTMGQPLVILAPHAVEALVKQPPDRWLSNARMTHYQAMLLDTDRVQFGPVVALNPATLLPLPEEGAPHDCLEILAETHGTRPDLTDQPIPDADHTWYTDGSSFLQEGQRKAGAAVTTETEVIWAGALPAGTSAQRAELIALTQALKMAEGKRLNVYTDSRYAFATAHIHGEIYRRRGWLTSEGREIKNKSEILALLKALFLPKRLSIIHCLGHQKGDSAEARGNRLADQAAREAAIKTPPDTSTLLIAGKRTADGSEFEKRTADGSEFESPKKKAKVE

SEQ ID NO: 2117 - protein, 2096 aa, synthetic construct
MPAAKRVKLDGGDKKYSIGLDIGTNSVGWAVITDEYKVPSKKFKVLGNTDRHSIKKNLIGALLFDSGETAEATRLKRTARRRYTRRKNRICYLQEIFSNEMAKVDDSFFHRLEESFLVEEDKKHERHPIFGNIVDEVAYHEKYPTIYHLRKKLVDSTDKADLRLIYLALAHMIKFRGHFLIEGDLNPDNSDVDKLFIQLVQTYNQLFEENPINASGVDAKAILSARLSKSRRLENLIAQLPGEKKNGLFGNLIALSLGLTPNFKSNFDLAEDAKLQLSKDTYDDDLDNLLAQIGDQYADLFLAAKNLSDAILLSDILRVNTEITKAPLSASMIKRYDEHHQDLTLLKALVRQQLPEKYKEIFFDQSKNGYAGYIDGGASQEEFYKFIKPILEKMDGTEELLVKLNREDLLRKQRTFDNGSIPHQIHLGELHAILRRQEDFYPFLKDNREKIEKILTFRIPYYVGPLARGNSRFAWMTRKSEETITPWNFEEVVDKGASAQSFIERMTNFDKNLPNEKVLPKHSLLYEYFTVYNELTKVKYVTEGMRKPAFLSGEQKKAIVDLLFKTNRKVTVKQLKEDYFKKIECFDSVEISGVEDRFNASLGTYHDLLKIIKDKDFLDNEENEDILEDIVLTLTLFEDREMIEERLKTYAHLFDDKVMKQLKRRRYTGWGRLSRKLINGIRDKQSGKTILDFLKSDGFANRNFMQLIHDDSLTFKEDIQKAQVSGQGDSLHEHIANLAGSPAIKKGILQTVKVVDELVKVMGRHKPENIVIEMARENQTTQKGQKNSRERMKRIEEGIKELGSQILKEHPVENTQLQNEKLYLYYLQNGRDMYVDQELDINRLSDYDVDHIVPQSFLKDDSIDNKVLTRSDKARGKSDNVPSEEVVKKMKNYWRQLLNAKLITQRKFDNLTKAERGGLSELDKAGFIKRQLVETRQITKHVAQILDSRMNTKYDENDKLIREVKVITLKSKLVSDFRKDFQFYKVREINNYHHAHDAYLNAVVGTALIKKYPKLESEFVYGDYKVYDVRKMIAKSEQEIGKATAKYFFYSNIMNFFKTEITLANGEIRKRPLIETNGETGEIVWDKGRDFATVRKVLSMPQVNIVKKTEVQTGGFSKESILPKRNSDKLIARKKDWDPKKYGGFDSPTVAYSVLVVAKVEKGKSKKLKSVKELLGITIMERSSFEKNPIDFLEAKGYKEVKKDLIIKLPKYSLFELENGRKRMLASAGELQKGNELALPSKYVNFLYLASHYEKLKGSPEDNEQKQLFVEQHKHYLDEIIEQISEFSKRVILADANLDKVLSAYNKHRDKPIREQAENIIHLFTLTNLGAPAAFKYFDTTIDRKRYTSTKEVLDATLIHQSITGLYETRIDLSQLGGDGGGSSGGSEAAAKGGLGIEDEYRLHETSTEPDVSLGSTWLSDFPQAWAETGGMGLAVRQAPLIIPLKATSTPVSIQQYPMSHEARLGIKPHIQRLLDQGILVPCQSPWNTPLLPVKKPGTNDYRPVQDLREVNKRVEDIHPTVPNPYNLLSGLPPSHQWYTVLDLKDAFFCLRLHPTSQPLFAFEWRDPGMGISGQLTWTRLPQGFKNSPTLFNEALHRDLADFRIQHPDLILLQYVDDILLAATSELDCQQGTRALLQTLGDLGYRASAKKAQICQKQVKYLGYLLREGQRWLTEARKETVMGQPVPKTPRQLREFLGKAGFCRLFIPGFAEMAAPLYPLTKPGTLFSWGPDQQKAYQEIKQALLTAPALGLPDLTKPFELFVDEKQGYAKGVLTQKLGPWRRPVAYLSKKLDPVAAGWPPCLRMVAAIAVLTKDAGKLTMGQPLVILAPHAVEALVKQPPDRWLSNARMTHYQAMLLDTDRVQFGPVVALNPATLLPLPEEGAPHDCLEILAETHGTRPDLTDQPIPDADHTWYTDGSSFLQEGQRKAGAAVTTETEVIWAGALPAGTSAQRAELIALTQALKMAEGKRLNVYTDSRYAFATAHIHGEIYRRRGWLTSEGREIKNKSEILALLKALFLPKRLSIIHCLGHQKGDSAEARGNRLADQAAREAAIKTPPDTSTLLIAGKRTADGSEFEKRTADGSEFESPKKKAKVE

SEQ ID NO: 2118 - protein, 2100 aa, synthetic construct
MPAAKRVKLDGGDKKYSIGLDIGTNSVGWAVITDEYKVPSKKFKVLGNTDRHSIKKNLIGALLFDSGETAEATRLKRTARRRYTRRKNRICYLQEIFSNEMAKVDDSFFHRLEESFLVEEDKKHERHPIFGNIVDEVAYHEKYPTIYHLRKKLVDSTDKADLRLIYLALAHMIKFRGHFLIEGDLNPDNSDVDKLFIQLVQTYNQLFEENPINASGVDAKAILSARLSKSRRLENLIAQLPGEKKNGLFGNLIALSLGLTPNFKSNFDLAEDAKLQLSKDTYDDDLDNLLAQIGDQYADLFLAAKNLSDAILLSDILRVNTEITKAPLSASMIKRYDEHHQDLTLLKALVRQQLPEKYKEIFFDQSKNGYAGYIDGGASQEEFYKFIKPILEKMDGTEELLVKLNREDLLRKQRTFDNGSIPHQIHLGELHAILRRQEDFYPFLKDNREKIEKILTFRIPYYVGPLARGNSRFAWMTRKSEETITPWNFEEVVDKGASAQSFIERMTNFDKNLPNEKVLPKHSLLYEYFTVYNELTKVKYVTEGMRKPAFLSGEQKKAIVDLLFKTNRKVTVKQLKEDYFKKIECFDSVEISGVEDRFNASLGTYHDLLKIIKDKDFLDNEENEDILEDIVLTLTLFEDREMIEERLKTYAHLFDDKVMKQLKRRRYTGWGRLSRKLINGIRDKQSGKTILDFLKSDGFANRNFMQLIHDDSLTFKEDIQKAQVSGQGDSLHEHIANLAGSPAIKKGILQTVKVVDELVKVMGRHKPENIVIEMARENQTTQKGQKNSRERMKRIEEGIKELGSQILKEHPVENTQLQNEKLYLYYLQNGRDMYVDQELDINRLSDYDVDHIVPQSFLKDDSIDNKVLTRSDKARGKSDNVPSEEVVKKMKNYWRQLLNAKLITQRKFDNLTKAERGGLSELDKAGFIKRQLVETRQITKHVAQILDSRMNTKYDENDKLIREVKVITLKSKLVSDFRKDFQFYKVREINNYHHAHDAYLNAVVGTALIKKYPKLESEFVYGDYKVYDVRKMIAKSEQEIGKATAKYFFYSNIMNFFKTEITLANGEIRKRPLIETNGETGEIVWDKGRDFATVRKVLSMPQVNIVKKTEVQTGGFSKESILPKRNSDKLIARKKDWDPKKYGGFDSPTVAYSVLVVAKVEKGKSKKLKSVKELLGITIMERSSFEKNPIDFLEAKGYKEVKKDLIIKLPKYSLFELENGRKRMLASAGELQKGNELALPSKYVNFLYLASHYEKLKGSPEDNEQKQLFVEQHKHYLDEIIEQISEFSKRVILADANLDKVLSAYNKHRDKPIREQAENIIHLFTLTNLGAPAAFKYFDTTIDRKRYTSTKEVLDATLIHQSITGLYETRIDLSQLGGDGGGGSGGSGGSGGSGGSGGLGIEDEYRLHETSTEPDVSLGSTWLSDFPQAWAETGGMGLAVRQAPLIIPLKATSTPVSIQQYPMSHEARLGIKPHIQRLLDQGILVPCQSPWNTPLLPVKKPGTNDYRPVQDLREVNKRVEDIHPTVPNPYNLLSGLPPSHQWYTVLDLKDAFFCLRLHPTSQPLFAFEWRDPGMGISGQLTWTRLPQGFKNSPTLFNEALHRDLADFRIQHPDLILLQYVDDILLAATSELDCQQGTRALLQTLGDLGYRASAKKAQICQKQVKYLGYLLREGQRWLTEARKETVMGQPVPKTPRQLREFLGKAGFCRLFIPGFAEMAAPLYPLTKPGTLFSWGPDQQKAYQEIKQALLTAPALGLPDLTKPFELFVDEKQGYAKGVLTQKLGPWRRPVAYLSKKLDPVAAGWPPCLRMVAAIAVLTKDAGKLTMGQPLVILAPHAVEALVKQPPDRWLSNARMTHYQAMLLDTDRVQFGPVVALNPATLLPLPEEGAPHDCLEILAETHGTRPDLTDQPIPDADHTWYTDGSSFLQEGQRKAGAAVTTETEVIWAGALPAGTSAQRAELIALTQALKMAEGKRLNVYTDSRYAFATAHIHGEIYRRRGWLTSEGREIKNKSEILALLKALFLPKRLSIIHCLGHQKGDSAEARGNRLADQAAREAAIKTPPDTSTLLIAGKRTADGSEFEKRTADGSEFESPKKKAKVE

SEQ ID NO: 2119 - protein, 2096 aa, synthetic construct
MPAAKRVKLDGGDKKYSIGLDIGTNSVGWAVITDEYKVPSKKFKVLGNTDRHSIKKNLIGALLFDSGETAEATRLKRTARRRYTRRKNRICYLQEIFSNEMAKVDDSFFHRLEESFLVEEDKKHERHPIFGNIVDEVAYHEKYPTIYHLRKKLVDSTDKADLRLIYLALAHMIKFRGHFLIEGDLNPDNSDVDKLFIQLVQTYNQLFEENPINASGVDAKAILSARLSKSRRLENLIAQLPGEKKNGLFGNLIALSLGLTPNFKSNFDLAEDAKLQLSKDTYDDDLDNLLAQIGDQYADLFLAAKNLSDAILLSDILRVNTEITKAPLSASMIKRYDEHHQDLTLLKALVRQQLPEKYKEIFFDQSKNGYAGYIDGGASQEEFYKFIKPILEKMDGTEELLVKLNREDLLRKQRTFDNGSIPHQIHLGELHAILRRQEDFYPFLKDNREKIEKILTFRIPYYVGPLARGNSRFAWMTRKSEETITPWNFEEVVDKGASAQSFIERMTNFDKNLPNEKVLPKHSLLYEYFTVYNELTKVKYVTEGMRKPAFLSGEQKKAIVDLLFKTNRKVTVKQLKEDYFKKIECFDSVEISGVEDRFNASLGTYHDLLKIIKDKDFLDNEENEDILEDIVLTLTLFEDREMIEERLKTYAHLFDDKVMKQLKRRRYTGWGRLSRKLINGIRDKQSGKTILDFLKSDGFANRNFMQLIHDDSLTFKEDIQKAQVSGQGDSLHEHIANLAGSPAIKKGILQTVKVVDELVKVMGRHKPENIVIEMARENQTTQKGQKNSRERMKRIEEGIKELGSQILKEHPVENTQLQNEKLYLYYLQNGRDMYVDQELDINRLSDYDVDHIVPQSFLKDDSIDNKVLTRSDKARGKSDNVPSEEVVKKMKNYWRQLLNAKLITQRKFDNLTKAERGGLSELDKAGFIKRQLVETRQITKHVAQILDSRMNTKYDENDKLIREVKVITLKSKLVSDFRKDFQFYKVREINNYHHAHDAYLNAVVGTALIKKYPKLESEFVYGDYKVYDVRKMIAKSEQEIGKATAKYFFYSNIMNFFKTEITLANGEIRKRPLIETNGETGEIVWDKGRDFATVRKVLSMPQVNIVKKTEVQTGGFSKESILPKRNSDKLIARKKDWDPKKYGGFDSPTVAYSVLVVAKVEKGKSKKLKSVKELLGITIMERSSFEKNPIDFLEAKGYKEVKKDLIIKLPKYSLFELENGRKRMLASAGELQKGNELALPSKYVNFLYLASHYEKLKGSPEDNEQKQLFVEQHKHYLDEIIEQISEFSKRVILADANLDKVLSAYNKHRDKPIREQAENIIHLFTLTNLGAPAAFKYFDTTIDRKRYTSTKEVLDATLIHQSITGLYETRIDLSQLGGDGGEAAAKGSSGGSGGLGIEDEYRLHETSTEPDVSLGSTWLSDFPQAWAETGGMGLAVRQAPLIIPLKATSTPVSIQQYPMSHEARLGIKPHIQRLLDQGILVPCQSPWNTPLLPVKKPGTNDYRPVQDLREVNKRVEDIHPTVPNPYNLLSGLPPSHQWYTVLDLKDAFFCLRLHPTSQPLFAFEWRDPGMGISGQLTWTRLPQGFKNSPTLFNEALHRDLADFRIQHPDLILLQYVDDILLAATSELDCQQGTRALLQTLGDLGYRASAKKAQICQKQVKYLGYLLREGQRWLTEARKETVMGQPVPKTPRQLREFLGKAGFCRLFIPGFAEMAAPLYPLTKPGTLFSWGPDQQKAYQEIKQALLTAPALGLPDLTKPFELFVDEKQGYAKGVLTQKLGPWRRPVAYLSKKLDPVAAGWPPCLRMVAAIAVLTKDAGKLTMGQPLVILAPHAVEALVKQPPDRWLSNARMTHYQAMLLDTDRVQFGPVVALNPATLLPLPEEGAPHDCLEILAETHGTRPDLTDQPIPDADHTWYTDGSSFLQEGQRKAGAAVTTETEVIWAGALPAGTSAQRAELIALTQALKMAEGKRLNVYTDSRYAFATAHIHGEIYRRRGWLTSEGREIKNKSEILALLKALFLPKRLSIIHCLGHQKGDSAEARGNRLADQAAREAAIKTPPDTSTLLIAGKRTADGSEFEKRTADGSEFESPKKKAKVE

SEQ ID NO: 2120 - protein, 2096 aa, synthetic construct
MPAAKRVKLDGGDKKYSIGLDIGTNSVGWAVITDEYKVPSKKFKVLGNTDRHSIKKNLIGALLFDSGETAEATRLKRTARRRYTRRKNRICYLQEIFSNEMAKVDDSFFHRLEESFLVEEDKKHERHPIFGNIVDEVAYHEKYPTIYHLRKKLVDSTDKADLRLIYLALAHMIKFRGHFLIEGDLNPDNSDVDKLFIQLVQTYNQLFEENPINASGVDAKAILSARLSKSRRLENLIAQLPGEKKNGLFGNLIALSLGLTPNFKSNFDLAEDAKLQLSKDTYDDDLDNLLAQIGDQYADLFLAAKNLSDAILLSDILRVNTEITKAPLSASMIKRYDEHHQDLTLLKALVRQQLPEKYKEIFFDQSKNGYAGYIDGGASQEEFYKFIKPILEKMDGTEELLVKLNREDLLRKQRTFDNGSIPHQIHLGELHAILRRQEDFYPFLKDNREKIEKILTFRIPYYVGPLARGNSRFAWMTRKSEETITPWNFEEVVDKGASAQSFIERMTNFDKNLPNEKVLPKHSLLYEYFTVYNELTKVKYVTEGMRKPAFLSGEQKKAIVDLLFKTNRKVTVKQLKEDYFKKIECFDSVEISGVEDRFNASLGTYHDLLKIIKDKDFLDNEENEDILEDIVLTLTLFEDREMIEERLKTYAHLFDDKVMKQLKRRRYTGWGRLSRKLINGIRDKQSGKTILDFLKSDGFANRNFMQLIHDDSLTFKEDIQKAQVSGQGDSLHEHIANLAGSPAIKKGILQTVKVVDELVKVMGRHKPENIVIEMARENQTTQKGQKNSRERMKRIEEGIKELGSQILKEHPVENTQLQNEKLYLYYLQNGRDMYVDQELDINRLSDYDVDHIVPQSFLKDDSIDNKVLTRSDKARGKSDNVPSEEVVKKMKNYWRQLLNAKLITQRKFDNLTKAERGGLSELDKAGFIKRQLVETRQITKHVAQILDSRMNTKYDENDKLIREVKVITLKSKLVSDFRKDFQFYKVREINNYHHAHDAYLNAVVGTALIKKYPKLESEFVYGDYKVYDVRKMIAKSEQEIGKATAKYFFYSNIMNFFKTEITLANGEIRKRPLIETNGETGEIVWDKGRDFATVRKVLSMPQVNIVKKTEVQTGGFSKESILPKRNSDKLIARKKDWDPKKYGGFDSPTVAYSVLVVAKVEKGKSKKLKSVKELLGITIMERSSFEKNPIDFLEAKGYKEVKKDLIIKLPKYSLFELENGRKRMLASAGELQKGNELALPSKYVNFLYLASHYEKLKGSPEDNEQKQLFVEQHKHYLDEIIEQISEFSKRVILADANLDKVLSAYNKHRDKPIREQAENIIHLFTLTNLGAPAAFKYFDTTIDRKRYTSTKEVLDATLIHQSITGLYETRIDLSQLGGDGGPAPEAAAKGGGGGLGIEDEYRLHETSTEPDVSLGSTWLSDFPQAWAETGGMGLAVRQAPLIIPLKATSTPVSIQQYPMSHEARLGIKPHIQRLLDQGILVPCQSPWNTPLLPVKKPGTNDYRPVQDLREVNKRVEDIHPTVPNPYNLLSGLPPSHQWYTVLDLKDAFFCLRLHPTSQPLFAFEWRDPGMGISGQLTWTRLPQGFKNSPTLFNEALHRDLADFRIQHPDLILLQYVDDILLAATSELDCQQGTRALLQTLGDLGYRASAKKAQICQKQVKYLGYLLREGQRWLTEARKETVMGQPVPKTPRQLREFLGKAGFCRLFIPGFAEMAAPLYPLTKPGTLFSWGPDQQKAYQEIKQALLTAPALGLPDLTKPFELFVDEKQGYAKGVLTQKLGPWRRPVAYLSKKLDPVAAGWPPCLRMVAAIAVLTKDAGKLTMGQPLVILAPHAVEALVKQPPDRWLSNARMTHYQAMLLDTDRVQFGPVVALNPATLLPLPEEGAPHDCLEILAETHGTRPDLTDQPIPDADHTWYTDGSSFLQEGQRKAGAAVTTETEVIWAGALPAGTSAQRAELIALTQALKMAEGKRLNVYTDSRYAFATAHIHGEIYRRRGWLTSEGREIKNKSEILALLKALFLPKRLSIIHCLGHQKGDSAEARGNRLADQAAREAAIKTPPDTSTLLIAGKRTADGSEFEKRTADGSEFESPKKKAKVE

SEQ ID NO: 2121 - protein, 2101 aa, synthetic construct
MPAAKRVKLDGGDKKYSIGLDIGTNSVGWAVITDEYKVPSKKFKVLGNTDRHSIKKNLIGALLFDSGETAEATRLKRTARRRYTRRKNRICYLQEIFSNEMAKVDDSFFHRLEESFLVEEDKKHERHPIFGNIVDEVAYHEKYPTIYHLRKKLVDSTDKADLRLIYLALAHMIKFRGHFLIEGDLNPDNSDVDKLFIQLVQTYNQLFEENPINASGVDAKAILSARLSKSRRLENLIAQLPGEKKNGLFGNLIALSLGLTPNFKSNFDLAEDAKLQLSKDTYDDDLDNLLAQIGDQYADLFLAAKNLSDAILLSDILRVNTEITKAPLSASMIKRYDEHHQDLTLLKALVRQQLPEKYKEIFFDQSKNGYAGYIDGGASQEEFYKFIKPILEKMDGTEELLVKLNREDLLRKQRTFDNGSIPHQIHLGELHAILRRQEDFYPFLKDNREKIEKILTFRIPYYVGPLARGNSRFAWMTRKSEETITPWNFEEVVDKGASAQSFIERMTNFDKNLPNEKVLPKHSLLYEYFTVYNELTKVKYVTEGMRKPAFLSGEQKKAIVDLLFKTNRKVTVKQLKEDYFKKIECFDSVEISGVEDRFNASLGTYHDLLKIIKDKDFLDNEENEDILEDIVLTLTLFEDREMIEERLKTYAHLFDDKVMKQLKRRRYTGWGRLSRKLINGIRDKQSGKTILDFLKSDGFANRNFMQLIHDDSLTFKEDIQKAQVSGQGDSLHEHIANLAGSPAIKKGILQTVKVVDELVKVMGRHKPENIVIEMARENQTTQKGQKNSRERMKRIEEGIKELGSQILKEHPVENTQLQNEKLYLYYLQNGRDMYVDQELDINRLSDYDVDHIVPQSFLKDDSIDNKVLTRSDKARGKSDNVPSEEVVKKMKNYWRQLLNAKLITQRKFDNLTKAERGGLSELDKAGFIKRQLVETRQITKHVAQILDSRMNTKYDENDKLIREVKVITLKSKLVSDFRKDFQFYKVREINNYHHAHDAYLNAVVGTALIKKYPKLESEFVYGDYKVYDVRKMIAKSEQEIGKATAKYFFYSNIMNFFKTEITLANGEIRKRPLIETNGETGEIVWDKGRDFATVRKVLSMPQVNIVKKTEVQTGGFSKESILPKRNSDKLIARKKDWDPKKYGGFDSPTVAYSVLVVAKVEKGKSKKLKSVKELLGITIMERSSFEKNPIDFLEAKGYKEVKKDLIIKLPKYSLFELENGRKRMLASAGELQKGNELALPSKYVNFLYLASHYEKLKGSPEDNEQKQLFVEQHKHYLDEIIEQISEFSKRVILADANLDKVLSAYNKHRDKPIREQAENIIHLFTLTNLGAPAAFKYFDTTIDRKRYTSTKEVLDATLIHQSITGLYETRIDLSQLGGDGGSGSETPGTSESATPESGGLGIEDEYRLHETSTEPDVSLGSTWLSDFPQAWAETGGMGLAVRQAPLIIPLKATSTPVSIQQYPMSHEARLGIKPHIQRLLDQGILVPCQSPWNTPLLPVKKPGTNDYRPVQDLREVNKRVEDIHPTVPNPYNLLSGLPPSHQWYTVLDLKDAFFCLRLHPTSQPLFAFEWRDPGMGISGQLTWTRLPQGFKNSPTLFNEALHRDLADFRIQHPDLILLQYVDDILLAATSELDCQQGTRALLQTLGDLGYRASAKKAQICQKQVKYLGYLLREGQRWLTEARKETVMGQPVPKTPRQLREFLGKAGFCRLFIPGFAEMAAPLYPLTKPGTLFSWGPDQQKAYQEIKQALLTAPALGLPDLTKPFELFVDEKQGYAKGVLTQKLGPWRRPVAYLSKKLDPVAAGWPPCLRMVAAIAVLTKDAGKLTMGQPLVILAPHAVEALVKQPPDRWLSNARMTHYQAMLLDTDRVQFGPVVALNPATLLPLPEEGAPHDCLEILAETHGTRPDLTDQPIPDADHTWYTDGSSFLQEGQRKAGAAVTTETEVIWAGALPAGTSAQRAELIALTQALKMAEGKRLNVYTDSRYAFATAHIHGEIYRRRGWLTSEGREIKNKSEILALLKALFLPKRLSIIHCLGHQKGDSAEARGNRLADQAAREAAIKTPPDTSTLLIAGKRTADGSEFEKRTADGSEFESPKKKAKVE

SEQ ID NO: 2122 - protein, 2094 aa, synthetic construct; identical to SEQ ID NO: 2058

SEQ ID NO: 2123 - protein, 2096 aa, synthetic construct; identical to SEQ ID NO: 2054

SEQ ID NO: 2124 - protein, 2091 aa, synthetic construct
MPAAKRVKLDGGDKKYSIGLDIGTNSVGWAVITDEYKVPSKKFKVLGNTDRHSIKKNLIGALLFDSGETAEATRLKRTARRRYTRRKNRICYLQEIFSNEMAKVDDSFFHRLEESFLVEEDKKHERHPIFGNIVDEVAYHEKYPTIYHLRKKLVDSTDKADLRLIYLALAHMIKFRGHFLIEGDLNPDNSDVDKLFIQLVQTYNQLFEENPINASGVDAKAILSARLSKSRRLENLIAQLPGEKKNGLFGNLIALSLGLTPNFKSNFDLAEDAKLQLSKDTYDDDLDNLLAQIGDQYADLFLAAKNLSDAILLSDILRVNTEITKAPLSASMIKRYDEHHQDLTLLKALVRQQLPEKYKEIFFDQSKNGYAGYIDGGASQEEFYKFIKPILEKMDGTEELLVKLNREDLLRKQRTFDNGSIPHQIHLGELHAILRRQEDFYPFLKDNREKIEKILTFRIPYYVGPLARGNSRFAWMTRKSEETITPWNFEEVVDKGASAQSFIERMTNFDKNLPNEKVLPKHSLLYEYFTVYNELTKVKYVTEGMRKPAFLSGEQKKAIVDLLFKTNRKVTVKQLKEDYFKKIECFDSVEISGVEDRFNASLGTYHDLLKIIKDKDFLDNEENEDILEDIVLTLTLFEDREMIEERLKTYAHLFDDKVMKQLKRRRYTGWGRLSRKLINGIRDKQSGKTILDFLKSDGFANRNFMQLIHDDSLTFKEDIQKAQVSGQGDSLHEHIANLAGSPAIKKGILQTVKVVDELVKVMGRHKPENIVIEMARENQTTQKGQKNSRERMKRIEEGIKELGSQILKEHPVENTQLQNEKLYLYYLQNGRDMYVDQELDINRLSDYDVDHIVPQSFLKDDSIDNKVLTRSDKARGKSDNVPSEEVVKKMKNYWRQLLNAKLITQRKFDNLTKAERGGLSELDKAGFIKRQLVETRQITKHVAQILDSRMNTKYDENDKLIREVKVITLKSKLVSDFRKDFQFYKVREINNYHHAHDAYLNAVVGTALIKKYPKLESEFVYGDYKVYDVRKMIAKSEQEIGKATAKYFFYSNIMNFFKTEITLANGEIRKRPLIETNGETGEIVWDKGRDFATVRKVLSMPQVNIVKKTEVQTGGFSKESILPKRNSDKLIARKKDWDPKKYGGFDSPTVAYSVLVVAKVEKGKSKKLKSVKELLGITIMERSSFEKNPIDFLEAKGYKEVKKDLIIKLPKYSLFELENGRKRMLASAGELQKGNELALPSKYVNFLYLASHYEKLKGSPEDNEQKQLFVEQHKHYLDEIIEQISEFSKRVILADANLDKVLSAYNKHRDKPIREQAENIIHLFTLTNLGAPAAFKYFDTTIDRKRYTSTKEVLDATLIHQSITGLYETRIDLSQLGGDGGGSSPAPGGLGIEDEYRLHETSTEPDVSLGSTWLSDFPQAWAETGGMGLAVRQAPLIIPLKATSTPVSIQQYPMSHEARLGIKPHIQRLLDQGILVPCQSPWNTPLLPVKKPGTNDYRPVQDLREVNKRVEDIHPTVPNPYNLLSGLPPSHQWYTVLDLKDAFFCLRLHPTSQPLFAFEWRDPGMGISGQLTWTRLPQGFKNSPTLFNEALHRDLADFRIQHPDLILLQYVDDILLAATSELDCQQGTRALLQTLGDLGYRASAKKAQICQKQVKYLGYLLREGQRWLTEARKETVMGQPVPKTPRQLREFLGKAGFCRLFIPGFAEMAAPLYPLTKPGTLFSWGPDQQKAYQEIKQALLTAPALGLPDLTKPFELFVDEKQGYAKGVLTQKLGPWRRPVAYLSKKLDPVAAGWPPCLRMVAAIAVLTKDAGKLTMGQPLVILAPHAVEALVKQPPDRWLSNARMTHYQAMLLDTDRVQFGPVVALNPATLLPLPEEGAPHDCLEILAETHGTRPDLTDQPIPDADHTWYTDGSSFLQEGQRKAGAAVTTETEVIWAGALPAGTSAQRAELIALTQALKMAEGKRLNVYTDSRYAFATAHIHGEIYRRRGWLTSEGREIKNKSEILALLKALFLPKRLSIIHCLGHQKGDSAEARGNRLADQAAREAAIKTPPDTSTLLIAGKRTADGSEFEKRTADGSEFESPKKKAKVE

SEQ ID NO: 2125 - protein, 2090 aa, synthetic construct
MPAAKRVKLDGGDKKYSIGLDIGTNSVGWAVITDEYKVPSKKFKVLGNTDRHSIKKNLIGALLFDSGETAEATRLKRTARRRYTRRKNRICYLQEIFSNEMAKVDDSFFHRLEESFLVEEDKKHERHPIFGNIVDEVAYHEKYPTIYHLRKKLVDSTDKADLRLIYLALAHMIKFRGHFLIEGDLNPDNSDVDKLFIQLVQTYNQLFEENPINASGVDAKAILSARLSKSRRLENLIAQLPGEKKNGLFGNLIALSLGLTPNFKSNFDLAEDAKLQLSKDTYDDDLDNLLAQIGDQYADLFLAAKNLSDAILLSDILRVNTEITKAPLSASMIKRYDEHHQDLTLLKALVRQQLPEKYKEIFFDQSKNGYAGYIDGGASQEEFYKFIKPILEKMDGTEELLVKLNREDLLRKQRTFDNGSIPHQIHLGELHAILRRQEDFYPFLKDNREKIEKILTFRIPYYVGPLARGNSRFAWMTRKSEETITPWNFEEVVDKGASAQSFIERMTNFDKNLPNEKVLPKHSLLYEYFTVYNELTKVKYVTEGMRKPAFLSGEQKKAIVDLLFKTNRKVTVKQLKEDYFKKIECFDSVEISGVEDRFNASLGTYHDLLKIIKDKDFLDNEENEDILEDIVLTLTLFEDREMIEERLKTYAHLFDDKVMKQLKRRRYTGWGRLSRKLINGIRDKQSGKTILDFLKSDGFANRNFMQLIHDDSLTFKEDIQKAQVSGQGDSLHEHIANLAGSPAIKKGILQTVKVVDELVKVMGRHKPENIVIEMARENQTTQKGQKNSRERMKRIEEGIKELGSQILKEHPVENTQLQNEKLYLYYLQNGRDMYVDQELDINRLSDYDVDHIVPQSFLKDDSIDNKVLTRSDKARGKSDNVPSEEVVKKMKNYWRQLLNAKLITQRKFDNLTKAERGGLSELDKAGFIKRQLVETRQITKHVAQILDSRMNTKYDENDKLIREVKVITLKSKLVSDFRKDFQFYKVREINNYHHAHDAYLNAVVGTALIKKYPKLESEFVYGDYKVYDVRKMIAKSEQEIGKATAKYFFYSNIMNFFKTEITLANGEIRKRPLIETNGETGEIVWDKGRDFATVRKVLSMPQVNIVKKTEVQTGGFSKESILPKRNSDKLIARKKDWDPKKYGGFDSPTVAYSVLVVAKVEKGKSKKLKSVKELLGITIMERSSFEKNPIDFLEAKGYKEVKKDLIIKLPKYSLFELENGRKRMLASAGELQKGNELALPSKYVNFLYLASHYEKLKGSPEDNEQKQLFVEQHKHYLDEIIEQISEFSKRVILADANLDKVLSAYNKHRDKPIREQAENIIHLFTLTNLGAPAAFKYFDTTIDRKRYTSTKEVLDATLIHQSITGLYETRIDLSQLGGDGGGGGGSGGLGIEDEYRLHETSTEPDVSLGSTWLSDFPQAWAETGGMGLAVRQAPLIIPLKATSTPVSIQQYPMSHEARLGIKPHIQRLLDQGILVPCQSPWNTPLLPVKKPGTNDYRPVQDLREVNKRVEDIHPTVPNPYNLLSGLPPSHQWYTVLDLKDAFFCLRLHPTSQPLFAFEWRDPGMGISGQLTWTRLPQGFKNSPTLFNEALHRDLADFRIQHPDLILLQYVDDILLAATSELDCQQGTRALLQTLGDLGYRASAKKAQICQKQVKYLGYLLREGQRWLTEARKETVMGQPVPKTPRQLREFLGKAGFCRLFIPGFAEMAAPLYPLTKPGTLFSWGPDQQKAYQEIKQALLTAPALGLPDLTKPFELFVDEKQGYAKGVLTQKLGPWRRPVAYLSKKLDPVAAGWPPCLRMVAAIAVLTKDAGKLTMGQPLVILAPHAVEALVKQPPDRWLSNARMTHYQAMLLDTDRVQFGPVVALNPATLLPLPEEGAPHDCLEILAETHGTRPDLTDQPIPDADHTWYTDGSSFLQEGQRKAGAAVTTETEVIWAGALPAGTSAQRAELIALTQALKMAEGKRLNVYTDSRYAFATAHIHGEIYRRRGWLTSEGREIKNKSEILALLKALFLPKRLSIIHCLGHQKGDSAEARGNRLADQAAREAAIKTPPDTSTLLIAGKRTADGSEFEKRTADGSEFESPKKKAKVE

SEQ ID NO: 2126 - protein, 2096 aa, synthetic construct; identical to SEQ ID NO: 2052

SEQ ID NO: 2127 - protein, 2091 aa, synthetic construct
MPAAKRVKLDGGDKKYSIGLDIGTNSVGWAVITDEYKVPSKKFKVLGNTDRHSIKKNLIGALLFDSGETAEATRLKRTARRRYTRRKNRICYLQEIFSNEMAKVDDSFFHRLEESFLVEEDKKHERHPIFGNIVDEVAYHEKYPTIYHLRKKLVDSTDKADLRLIYLALAHMIKFRGHFLIEGDLNPDNSDVDKLFIQLVQTYNQLFEENPINASGVDAKAILSARLSKSRRLENLIAQLPGEKKNGLFGNLIALSLGLTPNFKSNFDLAEDAKLQLSKDTYDDDLDNLLAQIGDQYADLFLAAKNLSDAILLSDILRVNTEITKAPLSASMIKRYDEHHQDLTLLKALVRQQLPEKYKEIFFDQSKNGYAGYIDGGASQEEFYKFIKPILEKMDGTEELLVKLNREDLLRKQRTFDNGSIPHQIHLGELHAILRRQEDFYPFLKDNREKIEKILTFRIPYYVGPLARGNSRFAWMTRKSEETITPWNFEEVVDKGASAQSFIERMTNFDKNLPNEKVLPKHSLLYEYFTVYNELTKVKYVTEGMRKPAFLSGEQKKAIVDLLFKTNRKVTVKQLKEDYFKKIECFDSVEISGVEDRFNASLGTYHDLLKIIKDKDFLDNEENEDILEDIVLTLTLFEDREMIEERLKTYAHLFDDKVMKQLKRRRYTGWGRLSRKLINGIRDKQSGKTILDFLKSDGFANRNFMQLIHDDSLTFKEDIQKAQVSGQGDSLHEHIANLAGSPAIKKGILQTVKVVDELVKVMGRHKPENIVIEMARENQTTQKGQKNSRERMKRIEEGIKELGSQILKEHPVENTQLQNEKLYLYYLQNGRDMYVDQELDINRLSDYDVDHIVPQSFLKDDSIDNKVLTRSDKARGKSDNVPSEEVVKKMKNYWRQLLNAKLITQRKFDNLTKAERGGLSELDKAGFIKRQLVETRQITKHVAQILDSRMNTKYDENDKLIREVKVITLKSKLVSDFRKDFQFYKVREINNYHHAHDAYLNAVVGTALIKKYPKLESEFVYGDYKVYDVRKMIAKSEQEIGKATAKYFFYSNIMNFFKTEITLANGEIRKRPLIETNGETGEIVWDKGRDFATVRKVLSMPQVNIVKKTEVQTGGFSKESILPKRNSDKLIARKKDWDPKKYGGFDSPTVAYSVLVVAKVEKGKSKKLKSVKELLGITIMERSSFEKNPIDFLEAKGYKEVKKDLIIKLPKYSLFELENGRKRMLASAGELQKGNELALPSKYVNFLYLASHYEKLKGSPEDNEQKQLFVEQHKHYLDEIIEQISEFSKRVILADANLDKVLSAYNKHRDKPIREQAENIIHLFTLTNLGAPAAFKYFDTTIDRKRYTSTKEVLDATLIHQSITGLYETRIDLSQLGGDGGGGGPAPGGLGIEDEYRLHETSTEPDVSLGSTWLSDFPQAWAETGGMGLAVRQAPLIIPLKATSTPVSIQQYPMSHEARLGIKPHIQRLLDQGILVPCQSPWNTPLLPVKKPGTNDYRPVQDLREVNKRVEDIHPTVPNPYNLLSGLPPSHQWYTVLDLKDAFFCLRLHPTSQPLFAFEWRDPGMGISGQLTWTRLPQGFKNSPTLFNEALHRDLADFRIQHPDLILLQYVDDILLAATSELDCQQGTRALLQTLGDLGYRASAKKAQICQKQVKYLGYLLREGQRWLTEARKETVMGQPVPKTPRQLREFLGKAGFCRLFIPGFAEMAAPLYPLTKPGTLFSWGPDQQKAYQEIKQALLTAPALGLPDLTKPFELFVDEKQGYAKGVLTQKLGPWRRPVAYLSKKLDPVAAGWPPCLRMVAAIAVLTKDAGKLTMGQPLVILAPHAVEALVKQPPDRWLSNARMTHYQAMLLDTDRVQFGPVVALNPATLLPLPEEGAPHDCLEILAETHGTRPDLTDQPIPDADHTWYTDGSSFLQEGQRKAGAAVTTETEVIWAGALPAGTSAQRAELIALTQALKMAEGKRLNVYTDSRYAFATAHIHGEIYRRRGWLTSEGREIKNKSEILALLKALFLPKRLSIIHCLGHQKGDSAEARGNRLADQAAREAAIKTPPDTSTLLIAGKRTADGSEFEKRTADGSEFESPKKKAKVE

SEQ ID NO: 2128 - protein, 2095 aa, synthetic construct
MPAAKRVKLDGGDKKYSIGLDIGTNSVGWAVITDEYKVPSKKFKVLGNTDRHSIKKNLIGALLFDSGETAEATRLKRTARRRYTRRKNRICYLQEIFSNEMAKVDDSFFHRLEESFLVEEDKKHERHPIFGNIVDEVAYHEKYPTIYHLRKKLVDSTDKADLRLIYLALAHMIKFRGHFLIEGDLNPDNSDVDKLFIQLVQTYNQLFEENPINASGVDAKAILSARLSKSRRLENLIAQLPGEKKNGLFGNLIALSLGLTPNFKSNFDLAEDAKLQLSKDTYDDDLDNLLAQIGDQYADLFLAAKNLSDAILLSDILRVNTEITKAPLSASMIKRYDEHHQDLTLLKALVRQQLPEKYKEIFFDQSKNGYAGYIDGGASQEEFYKFIKPILEKMDGTEELLVKLNREDLLRKQRTFDNGSIPHQIHLGELHAILRRQEDFYPFLKDNREKIEKILTFRIPYYVGPLARGNSRFAWMTRKSEETITPWNFEEVVDKGASAQSFIERMTNFDKNLPNEKVLPKHSLLYEYFTVYNELTKVKYVTEGMRKPAFLSGEQKKAIVDLLFKTNRKVTVKQLKEDYFKKIECFDSVEISGVEDRFNASLGTYHDLLKIIKDKDFLDNEENEDILEDIVLTLTLFEDREMIEERLKTYAHLFDDKVMKQLKRRRYTGWGRLSRKLINGIRDKQSGKTILDFLKSDGFANRNFMQLIHDDSLTFKEDIQKAQVSGQGDSLHEHIANLAGSPAIKKGILQTVKVVDELVKVMGRHKPENIVIEMARENQTTQKGQKNSRERMKRIEEGIKELGSQILKEHPVENTQLQNEKLYLYYLQNGRDMYVDQELDINRLSDYDVDHIVPQSFLKDDSIDNKVLTRSDKARGKSDNVPSEEVVKKMKNYWRQLLNAKLITQRKFDNLTKAERGGLSELDKAGFIKRQLVETRQITKHVAQILDSRMNTKYDENDKLIREVKVITLKSKLVSDFRKDFQFYKVREINNYHHAHDAYLNAVVGTALIKKYPKLESEFVYGDYKVYDVRKMIAKSEQEIGKATAKYFFYSNIMNFFKTEITLANGEIRKRPLIETNGETGEIVWDKGRDFATVRKVLSMPQVNIVKKTEVQTGGFSKESILPKRNSDKLIARKKDWDPKKYGGFDSPTVAYSVLVVAKVEKGKSKKLKSVKELLGITIMERSSFEKNPIDFLEAKGYKEVKKDLIIKLPKYSLFELENGRKRMLASAGELQKGNELALPSKYVNFLYLASHYEKLKGSPEDNEQKQLFVEQHKHYLDEIIEQISEFSKRVILADANLDKVLSAYNKHRDKPIREQAENIIHLFTLTNLGAPAAFKYFDTTIDRKRYTSTKEVLDATLIHQSITGLYETRIDLSQLGGDGGEAAAKEAAAKGGLGIEDEYRLHETSTEPDVSLGSTWLSDFPQAWAETGGMGLAVRQAPLIIPLKATSTPVSIQQYPMSHEARLGIKPHIQRLLDQGILVPCQSPWNTPLLPVKKPGTNDYRPVQDLREVNKRVEDIHPTVPNPYNLLSGLPPSHQWYTVLDLKDAFFCLRLHPTSQPLFAFEWRDPGMGISGQLTWTRLPQGFKNSPTLFNEALHRDLADFRIQHPDLILLQYVDDILLAATSELDCQQGTRALLQTLGDLGYRASAKKAQICQKQVKYLGYLLREGQRWLTEARKETVMGQPVPKTPRQLREFLGKAGFCRLFIPGFAEMAAPLYPLTKPGTLFSWGPDQQKAYQEIKQALLTAPALGLPDLTKPFELFVDEKQGYAKGVLTQKLGPWRRPVAYLSKKLDPVAAGWPPCLRMVAAIAVLTKDAGKLTMGQPLVILAPHAVEALVKQPPDRWLSNARMTHYQAMLLDTDRVQFGPVVALNPATLLPLPEEGAPHDCLEILAETHGTRPDLTDQPIPDADHTWYTDGSSFLQEGQRKAGAAVTTETEVIWAGALPAGTSAQRAELIALTQALKMAEGKRLNVYTDSRYAFATAHIHGEIYRRRGWLTSEGREIKNKSEILALLKALFLPKRLSIIHCLGHQKGDSAEARGNRLADQAAREAAIKTPPDTSTLLIAGKRTADGSEFEKRTADGSEFESPKKKAKVE

SEQ ID NO: 2129 - protein, 2096 aa, synthetic construct; identical to SEQ ID NO: 2059

SEQ ID NO: 2130 - protein, 2096 aa, synthetic construct
MPAAKRVKLDGGDKKYSIGLDIGTNSVGWAVITDEYKVPSKKFKVLGNTDRHSIKKNLIGALLFDSGETAEATRLKRTARRRYTRRKNRICYLQEIFSNEMAKVDDSFFHRLEESFLVEEDKKHERHPIFGNIVDEVAYHEKYPTIYHLRKKLVDSTDKADLRLIYLALAHMIKFRGHFLIEGDLNPDNSDVDKLFIQLVQTYNQLFEENPINASGVDAKAILSARLSKSRRLENLIAQLPGEKKNGLFGNLIALSLGLTPNFKSNFDLAEDAKLQLSKDTYDDDLDNLLAQIGDQYADLFLAAKNLSDAILLSDILRVNTEITKAPLSASMIKRYDEHHQDLTLLKALVRQQLPEKYKEIFFDQSKNGYAGYIDGGASQEEFYKFIKPILEKMDGTEELLVKLNREDLLRKQRTFDNGSIPHQIHLGELHAILRRQEDFYPFLKDNREKIEKILTFRIPYYVGPLARGNSRFAWMTRKSEETITPWNFEEVVDKGASAQSFIERMTNFDKNLPNEKVLPKHSLLYEYFTVYNELTKVKYVTEGMRKPAFLSGEQKKAIVDLLFKTNRKVTVKQLKEDYFKKIECFDSVEISGVEDRFNASLGTYHDLLKIIKDKDFLDNEENEDILEDIVLTLTLFEDREMIEERLKTYAHLFDDKVMKQLKRRRYTGWGRLSRKLINGIRDKQSGKTILDFLKSDGFANRNFMQLIHDDSLTFKEDIQKAQVSGQGDSLHEHIANLAGSPAIKKGILQTVKVVDELVKVMGRHKPENIVIEMARENQTTQKGQKNSRERMKRIEEGIKELGSQILKEHPVENTQLQNEKLYLYYLQNGRDMYVDQELDINRLSDYDVDHIVPQSFLKDDSIDNKVLTRSDKARGKSDNVPSEEVVKKMKNYWRQLLNAKLITQRKFDNLTKAERGGLSELDKAGFIKRQLVETRQITKHVAQILDSRMNTKYDENDKLIREVKVITLKSKLVSDFRKDFQFYKVREINNYHHAHDAYLNAVVGTALIKKYPKLESEFVYGDYKVYDVRKMIAKSEQEIGKATAKYFFYSNIMNFFKTEITLANGEIRKRPLIETNGETGEIVWDKGRDFATVRKVLSMPQVNIVKKTEVQTGGFSKESILPKRNSDKLIARKKDWDPKKYGGFDSPTVAYSVLVVAKVEKGKSKKLKSVKELLGITIMERSSFEKNPIDFLEAKGYKEVKKDLIIKLPKYSLFELENGRKRMLASAGELQKGNELALPSKYVNFLYLASHYEKLKGSPEDNEQKQLFVEQHKHYLDEIIEQISEFSKRVILADANLDKVLSAYNKHRDKPIREQAENIIHLFTLTNLGAPAAFKYFDTTIDRKRYTSTKEVLDATLIHQSITGLYETRIDLSQLGGDGGEAAAKPAPGGGGGLGIEDEYRLHETSTEPDVSLGSTWLSDFPQAWAETGGMGLAVRQAPLIIPLKATSTPVSIQQYPMSHEARLGIKPHIQRLLDQGILVPCQSPWNTPLLPVKKPGTNDYRPVQDLREVNKRVEDIHPTVPNPYNLLSGLPPSHQWYTVLDLKDAFFCLRLHPTSQPLFAFEWRDPGMGISGQLTWTRLPQGFKNSPTLFNEALHRDLADFRIQHPDLILLQYVDDILLAATSELDCQQGTRALLQTLGDLGYRASAKKAQICQKQVKYLGYLLREGQRWLTEARKETVMGQPVPKTPRQLREFLGKAGFCRLFIPGFAEMAAPLYPLTKPGTLFSWGPDQQKAYQEIKQALLTAPALGLPDLTKPFELFVDEKQGYAKGVLTQKLGPWRRPVAYLSKKLDPVAAGWPPCLRMVAAIAVLTKDAGKLTMGQPLVILAPHAVEALVKQPPDRWLSNARMTHYQAMLLDTDRVQFGPVVALNPATLLPLPEEGAPHDCLEILAETHGTRPDLTDQPIPDADHTWYTDGSSFLQEGQRKAGAAVTTETEVIWAGALPAGTSAQRAELIALTQALKMAEGKRLNVYTDSRYAFATAHIHGEIYRRRGWLTSEGREIKNKSEILALLKALFLPKRLSIIHCLGHQKGDSAEARGNRLADQAAREAAIKTPPDTSTLLIAGKRTADGSEFEKRTADGSEFESPKKKAKVE

SEQ ID NO: 2131 - protein, 2088 aa, synthetic construct
MPAAKRVKLDGGDKKYSIGLDIGTNSVGWAVITDEYKVPSKKFKVLGNTDRHSIKKNLIGALLFDSGETAEATRLKRTARRRYTRRKNRICYLQEIFSNEMAKVDDSFFHRLEESFLVEEDKKHERHPIFGNIVDEVAYHEKYPTIYHLRKKLVDSTDKADLRLIYLALAHMIKFRGHFLIEGDLNPDNSDVDKLFIQLVQTYNQLFEENPINASGVDAKAILSARLSKSRRLENLIAQLPGEKKNGLFGNLIALSLGLTPNFKSNFDLAEDAKLQLSKDTYDDDLDNLLAQIGDQYADLFLAAKNLSDAILLSDILRVNTEITKAPLSASMIKRYDEHHQDLTLLKALVRQQLPEKYKEIFFDQSKNGYAGYIDGGASQEEFYKFIKPILEKMDGTEELLVKLNREDLLRKQRTFDNGSIPHQIHLGELHAILRRQEDFYPFLKDNREKIEKILTFRIPYYVGPLARGNSRFAWMTRKSEETITPWNFEEVVDKGASAQSFIERMTNFDKNLPNEKVLPKHSLLYEYFTVYNELTKVKYVTEGMRKPAFLSGEQKKAIVDLLFKTNRKVTVKQLKEDYFKKIECFDSVEISGVEDRFNASLGTYHDLLKIIKDKDFLDNEENEDILEDIVLTLTLFEDREMIEERLKTYAHLFDDKVMKQLKRRRYTGWGRLSRKLINGIRDKQSGKTILDFLKSDGFANRNFMQLIHDDSLTFKEDIQKAQVSGQGDSLHEHIANLAGSPAIKKGILQTVKVVDELVKVMGRHKPENIVIEMARENQTTQKGQKNSRERMKRIEEGIKELGSQILKEHPVENTQLQNEKLYLYYLQNGRDMYVDQELDINRLSDYDVDHIVPQSFLKDDSIDNKVLTRSDKARGKSDNVPSEEVVKKMKNYWRQLLNAKLITQRKFDNLTKAERGGLSELDKAGFIKRQLVETRQITKHVAQILDSRMNTKYDENDKLIREVKVITLKSKLVSDFRKDFQFYKVREINNYHHAHDAYLNAVVGTALIKKYPKLESEFVYGDYKVYDVRKMIAKSEQEIGKATAKYFFYSNIMNFFKTEITLANGEIRKRPLIETNGETGEIVWDKGRDFATVRKVLSMPQVNIVKKTEVQTGGFSKESILPKRNSDKLIARKKDWDPKKYGGFDSPTVAYSVLVVAKVEKGKSKKLKSVKELLGITIMERSSFEKNPIDFLEAKGYKEVKKDLIIKLPKYSLFELENGRKRMLASAGELQKGNELALPSKYVNFLYLASHYEKLKGSPEDNEQKQLFVEQHKHYLDEIIEQISEFSKRVILADANLDKVLSAYNKHRDKPIREQAENIIHLFTLTNLGAPAAFKYFDTTIDRKRYTSTKEVLDATLIHQSITGLYETRIDLSQLGGDGGGGSGGLGIEDEYRLHETSTEPDVSLGSTWLSDFPQAWAETGGMGLAVRQAPLIIPLKATSTPVSIQQYPMSHEARLGIKPHIQRLLDQGILVPCQSPWNTPLLPVKKPGTNDYRPVQDLREVNKRVEDIHPTVPNPYNLLSGLPPSHQWYTVLDLKDAFFCLRLHPTSQPLFAFEWRDPGMGISGQLTWTRLPQGFKNSPTLFNEALHRDLADFRIQHPDLILLQYVDDILLAATSELDCQQGTRALLQTLGDLGYRASAKKAQICQKQVKYLGYLLREGQRWLTEARKETVMGQPVPKTPRQLREFLGKAGFCRLFIPGFAEMAAPLYPLTKPGTLFSWGPDQQKAYQEIKQALLTAPALGLPDLTKPFELFVDEKQGYAKGVLTQKLGPWRRPVAYLSKKLDPVAAGWPPCLRMVAAIAVLTKDAGKLTMGQPLVILAPHAVEALVKQPPDRWLSNARMTHYQAMLLDTDRVQFGPVVALNPATLLPLPEEGAPHDCLEILAETHGTRPDLTDQPIPDADHTWYTDGSSFLQEGQRKAGAAVTTETEVIWAGALPAGTSAQRAELIALTQALKMAEGKRLNVYTDSRYAFATAHIHGEIYRRRGWLTSEGREIKNKSEILALLKALFLPKRLSIIHCLGHQKGDSAEARGNRLADQAAREAAIKTPPDTSTLLIAGKRTADGSEFEKRTADGSEFESPKKKAKVE

SEQ ID NO: 2132 - protein, 2096 aa, synthetic construct
MPAAKRVKLDGGDKKYSIGLDIGTNSVGWAVITDEYKVPSKKFKVLGNTDRHSIKKNLIGALLFDSGETAEATRLKRTARRRYTRRKNRICYLQEIFSNEMAKVDDSFFHRLEESFLVEEDKKHERHPIFGNIVDEVAYHEKYPTIYHLRKKLVDSTDKADLRLIYLALAHMIKFRGHFLIEGDLNPDNSDVDKLFIQLVQTYNQLFEENPINASGVDAKAILSARLSKSRRLENLIAQLPGEKKNGLFGNLIALSLGLTPNFKSNFDLAEDAKLQLSKDTYDDDLDNLLAQIGDQYADLFLAAKNLSDAILLSDILRVNTEITKAPLSASMIKRYDEHHQDLTLLKALVRQQLPEKYKEIFFDQSKNGYAGYIDGGASQEEFYKFIKPILEKMDGTEELLVKLNREDLLRKQRTFDNGSIPHQIHLGELHAILRRQEDFYPFLKDNREKIEKILTFRIPYYVGPLARGNSRFAWMTRKSEETITPWNFEEVVDKGASAQSFIERMTNFDKNLPNEKVLPKHSLLYEYFTVYNELTKVKYVTEGMRKPAFLSGEQKKAIVDLLFKTNRKVTVKQLKEDYFKKIECFDSVEISGVEDRFNASLGTYHDLLKIIKDKDFLDNEENEDILEDIVLTLTLFEDREMIEERLKTYAHLFDDKVMKQLKRRRYTGWGRLSRKLINGIRDKQSGKTILDFLKSDGFANRNFMQLIHDDSLTFKEDIQKAQVSGQGDSLHEHIANLAGSPAIKKGILQTVKVVDELVKVMGRHKPENIVIEMARENQTTQKGQKNSRERMKRIEEGIKELGSQILKEHPVENTQLQNEKLYLYYLQNGRDMYVDQELDINRLSDYDVDHIVPQSFLKDDSIDNKVLTRSDKARGKSDNVPSEEVVKKMKNYWRQLLNAKLITQRKFDNLTKAERGGLSELDKAGFIKRQLVETRQITKHVAQILDSRMNTKYDENDKLIREVKVITLKSKLVSDFRKDFQFYKVREINNYHHAHDAYLNAVVGTALIKKYPKLESEFVYGDYKVYDVRKMIAKSEQEIGKATAKYFFYSNIMNFFKTEITLANGEIRKRPLIETNGETGEIVWDKGRDFATVRKVLSMPQVNIVKKTEVQTGGFSKESILPKRNSDKLIARKKDWDPKKYGGFDSPTVAYSVLVVAKVEKGKSKKLKSVKELLGITIMERSSFEKNPIDFLEAKGYKEVKKDLIIKLPKYSLFELENGRKRMLASAGELQKGNELALPSKYVNFLYLASHYEKLKGSPEDNEQKQLFVEQHKHYLDEIIEQISEFSKRVILADANLDKVLSAYNKHRDKPIREQAENIIHLFTLTNLGAPAAFKYFDTTIDRKRYTSTKEVLDATLIHQSITGLYETRIDLSQLGGDGGGGGEAAAKGGSGGLGIEDEYRLHETSTEPDVSLGSTWLSDFPQAWAETGGMGLAVRQAPLIIPLKATSTPVSIQQYPMSHEARLGIKPHIQRLLDQGILVPCQSPWNTPLLPVKKPGTNDYRPVQDLREVNKRVEDIHPTVPNPYNLLSGLPPSHQWYTVLDLKDAFFCLRLHPTSQPLFAFEWRDPGMGISGQLTWTRLPQGFKNSPTLFNEALHRDLADFRIQHPDLILLQYVDDILLAATSELDCQQGTRALLQTLGDLGYRASAKKAQICQKQVKYLGYLLREGQRWLTEARKETVMGQPVPKTPRQLREFLGKAGFCRLFIPGFAEMAAPLYPLTKPGTLFSWGPDQQKAYQEIKQALLTAPALGLPDLTKPFELFVDEKQGYAKGVLTQKLGPWRRPVAYLSKKLDPVAAGWPPCLRMVAAIAVLTKDAGKLTMGQPLVILAPHAVEALVKQPPDRWLSNARMTHYQAMLLDTDRVQFGPVVALNPATLLPLPEEGAPHDCLEILAETHGTRPDLTDQPIPDADHTWYTDGSSFLQEGQRKAGAAVTTETEVIWAGALPAGTSAQRAELIALTQALKMAEGKRLNVYTDSRYAFATAHIHGEIYRRRGWLTSEGREIKNKSEILALLKALFLPKRLSIIHCLGHQKGDSAEARGNRLADQAAREAAIKTPPDTSTLLIAGKRTADGSEFEKRTADGSEFESPKKKAKVE

SEQ ID NO: 2133 - protein, 2094 aa, synthetic construct
MPAAKRVKLDGGDKKYSIGLDIGTNSVGWAVITDEYKVPSKKFKVLGNTDRHSIKKNLIGALLFDSGETAEATRLKRTARRRYTRRKNRICYLQEIFSNEMAKVDDSFFHRLEESFLVEEDKKHERHPIFGNIVDEVAYHEKYPTIYHLRKKLVDSTDKADLRLIYLALAHMIKFRGHFLIEGDLNPDNSDVDKLFIQLVQTYNQLFEENPINASGVDAKAILSARLSKSRRLENLIAQLPGEKKNGLFGNLIALSLGLTPNFKSNFDLAEDAKLQLSKDTYDDDLDNLLAQIGDQYADLFLAAKNLSDAILLSDILRVNTEITKAPLSASMIKRYDEHHQDLTLLKALVRQQLPEKYKEIFFDQSKNGYAGYIDGGASQEEFYKFIKPILEKMDGTEELLVKLNREDLLRKQRTFDNGSIPHQIHLGELHAILRRQEDFYPFLKDNREKIEKILTFRIPYYVGPLARGNSRFAWMTRKSEETITPWNFEEVVDKGASAQSFIERMTNFDKNLPNEKVLPKHSLLYEYFTVYNELTKVKYVTEGMRKPAFLSGEQKKAIVDLLFKTNRKVTVKQLKEDYFKKIECFDSVEISGVEDRFNASLGTYHDLLKIIKDKDFLDNEENEDILEDIVLTLTLFEDREMIEERLKTYAHLFDDKVMKQLKRRRYTGWGRLSRKLINGIRDKQSGKTILDFLKSDGFANRNFMQLIHDDSLTFKEDIQKAQVSGQGDSLHEHIANLAGSPAIKKGILQTVKVVDELVKVMGRHKPENIVIEMARENQTTQKGQKNSRERMKRIEEGIKELGSQILKEHPVENTQLQNEKLYLYYLQNGRDMYVDQELDINRLSDYDVDHIVPQSFLKDDSIDNKVLTRSDKARGKSDNVPSEEVVKKMKNYWRQLLNAKLITQRKFDNLTKAERGGLSELDKAGFIKRQLVETRQITKHVAQILDSRMNTKYDENDKLIREVKVITLKSKLVSDFRKDFQFYKVREINNYHHAHDAYLNAVVGTALIKKYPKLESEFVYGDYKVYDVRKMIAKSEQEIGKATAKYFFYSNIMNFFKTEITLANGEIRKRPLIETNGETGEIVWDKGRDFATVRKVLSMPQVNIVKKTEVQTGGFSKESILPKRNSDKLIARKKDWDPKKYGGFDSPTVAYSVLVVAKVEKGKSKKLKSVKELLGITIMERSSFEKNPIDFLEAKGYKEVKKDLIIKLPKYSLFELENGRKRMLASAGELQKGNELALPSKYVNFLYLASHYEKLKGSPEDNEQKQLFVEQHKHYLDEIIEQISEFSKRVILADANLDKVLSAYNKHRDKPIREQAENIIHLFTLTNLGAPAAFKYFDTTIDRKRYTSTKEVLDATLIHQSITGLYETRIDLSQLGGDGGGGGGGSPAPGGLGIEDEYRLHETSTEPDVSLGSTWLSDFPQAWAETGGMGLAVRQAPLIIPLKATSTPVSIQQYPMSHEARLGIKPHIQRLLDQGILVPCQSPWNTPLLPVKKPGTNDYRPVQDLREVNKRVEDIHPTVPNPYNLLSGLPPSHQWYTVLDLKDAFFCLRLHPTSQPLFAFEWRDPGMGISGQLTWTRLPQGFKNSPTLFNEALHRDLADFRIQHPDLILLQYVDDILLAATSELDCQQGTRALLQTLGDLGYRASAKKAQICQKQVKYLGYLLREGQRWLTEARKETVMGQPVPKTPRQLREFLGKAGFCRLFIPGFAEMAAPLYPLTKPGTLFSWGPDQQKAYQEIKQALLTAPALGLPDLTKPFELFVDEKQGYAKGVLTQKLGPWRRPVAYLSKKLDPVAAGWPPCLRMVAAIAVLTKDAGKLTMGQPLVILAPHAVEALVKQPPDRWLSNARMTHYQAMLLDTDRVQFGPVVALNPATLLPLPEEGAPHDCLEILAETHGTRPDLTDQPIPDADHTWYTDGSSFLQEGQRKAGAAVTTETEVIWAGALPAGTSAQRAELIALTQALKMAEGKRLNVYTDSRYAFATAHIHGEIYRRRGWLTSEGREIKNKSEILALLKALFLPKRLSIIHCLGHQKGDSAEARGNRLADQAAREAAIKTPPDTSTLLIAGKRTADGSEFEKRTADGSEFESPKKKAKVE

SEQ ID NO: 2134 - protein, 2091 aa, synthetic construct
MPAAKRVKLDGGDKKYSIGLDIGTNSVGWAVITDEYKVPSKKFKVLGNTDRHSIKKNLIGALLFDSGETAEATRLKRTARRRYTRRKNRICYLQEIFSNEMAKVDDSFFHRLEESFLVEEDKKHERHPIFGNIVDEVAYHEKYPTIYHLRKKLVDSTDKADLRLIYLALAHMIKFRGHFLIEGDLNPDNSDVDKLFIQLVQTYNQLFEENPINASGVDAKAILSARLSKSRRLENLIAQLPGEKKNGLFGNLIALSLGLTPNFKSNFDLAEDAKLQLSKDTYDDDLDNLLAQIGDQYADLFLAAKNLSDAILLSDILRVNTEITKAPLSASMIKRYDEHHQDLTLLKALVRQQLPEKYKEIFFDQSKNGYAGYIDGGASQEEFYKFIKPILEKMDGTEELLVKLNREDLLRKQRTFDNGSIPHQIHLGELHAILRRQEDFYPFLKDNREKIEKILTFRIPYYVGPLARGNSRFAWMTRKSEETITPWNFEEVVDKGASAQSFIERMTNFDKNLPNEKVLPKHSLLYEYFTVYNELTKVKYVTEGMRKPAFLSGEQKKAIVDLLFKTNRKVTVKQLKEDYFKKIECFDSVEISGVEDRFNASLGTYHDLLKIIKDKDFLDNEENEDILEDIVLTLTLFEDREMIEERLKTYAHLFDDKVMKQLKRRRYTGWGRLSRKLINGIRDKQSGKTILDFLKSDGFANRNFMQLIHDDSLTFKEDIQKAQVSGQGDSLHEHIANLAGSPAIKKGILQTVKVVDELVKVMGRHKPENIVIEMARENQTTQKGQKNSRERMKRIEEGIKELGSQILKEHPVENTQLQNEKLYLYYLQNGRDMYVDQELDINRLSDYDVDHIVPQSFLKDDSIDNKVLTRSDKARGKSDNVPSEEVVKKMKNYWRQLLNAKLITQRKFDNLTKAERGGLSELDKAGFIKRQLVETRQITKHVAQILDSRMNTKYDENDKLIREVKVITLKSKLVSDFRKDFQFYKVREINNYHHAHDAYLNAVVGTALIKKYPKLESEFVYGDYKVYDVRKMIAKSEQEIGKATAKYFFYSNIMNFFKTEITLANGEIRKRPLIETNGETGEIVWDKGRDFATVRKVLSMPQVNIVKKTEVQTGGFSKESILPKRNSDKLIARKKDWDPKKYGGFDSPTVAYSVLVVAKVEKGKSKKLKSVKELLGITIMERSSFEKNPIDFLEAKGYKEVKKDLIIKLPKYSLFELENGRKRMLASAGELQKGNELALPSKYVNFLYLASHYEKLKGSPEDNEQKQLFVEQHKHYLDEIIEQISEFSKRVILADANLDKVLSAYNKHRDKPIREQAENIIHLFTLTNLGAPAAFKYFDTTIDRKRYTSTKEVLDATLIHQSITGLYETRIDLSQLGGDGGPAPGGGGGLGIEDEYRLHETSTEPDVSLGSTWLSDFPQAWAETGGMGLAVRQAPLIIPLKATSTPVSIQQYPMSHEARLGIKPHIQRLLDQGILVPCQSPWNTPLLPVKKPGTNDYRPVQDLREVNKRVEDIHPTVPNPYNLLSGLPPSHQWYTVLDLKDAFFCLRLHPTSQPLFAFEWRDPGMGISGQLTWTRLPQGFKNSPTLFNEALHRDLADFRIQHPDLILLQYVDDILLAATSELDCQQGTRALLQTLGDLGYRASAKKAQICQKQVKYLGYLLREGQRWLTEARKETVMGQPVPKTPRQLREFLGKAGFCRLFIPGFAEMAAPLYPLTKPGTLFSWGPDQQKAYQEIKQALLTAPALGLPDLTKPFELFVDEKQGYAKGVLTQKLGPWRRPVAYLSKKLDPVAAGWPPCLRMVAAIAVLTKDAGKLTMGQPLVILAPHAVEALVKQPPDRWLSNARMTHYQAMLLDTDRVQFGPVVALNPATLLPLPEEGAPHDCLEILAETHGTRPDLTDQPIPDADHTWYTDGSSFLQEGQRKAGAAVTTETEVIWAGALPAGTSAQRAELIALTQALKMAEGKRLNVYTDSRYAFATAHIHGEIYRRRGWLTSEGREIKNKSEILALLKALFLPKRLSIIHCLGHQKGDSAEARGNRLADQAAREAAIKTPPDTSTLLIAGKRTADGSEFEKRTADGSEFESPKKKAKVE

SEQ ID NO: 2135 - protein, 2096 aa, synthetic construct
MPAAKRVKLDGGDKKYSIGLDIGTNSVGWAVITDEYKVPSKKFKVLGNTDRHSIKKNLIGALLFDSGETAEATRLKRTARRRYTRRKNRICYLQEIFSNEMAKVDDSFFHRLEESFLVEEDKKHERHPIFGNIVDEVAYHEKYPTIYHLRKKLVDSTDKADLRLIYLALAHMIKFRGHFLIEGDLNPDNSDVDKLFIQLVQTYNQLFEENPINASGVDAKAILSARLSKSRRLENLIAQLPGEKKNGLFGNLIALSLGLTPNFKSNFDLAEDAKLQLSKDTYDDDLDNLLAQIGDQYADLFLAAKNLSDAILLSDILRVNTEITKAPLSASMIKRYDEHHQDLTLLKALVRQQLPEKYKEIFFDQSKNGYAGYIDGGASQEEFYKFIKPILEKMDGTEELLVKLNREDLLRKQRTFDNGSIPHQIHLGELHAILRRQEDFYPFLKDNREKIEKILTFRIPYYVGPLARGNSRFAWMTRKSEETITPWNFEEVVDKGASAQSFIERMTNFDKNLPNEKVLPKHSLLYEYFTVYNELTKVKYVTEGMRKPAFLSGEQKKAIVDLLFKTNRKVTVKQLKEDYFKKIECFDSVEISGVEDRFNASLGTYHDLLKIIKDKDFLDNEENEDILEDIVLTLTLFEDREMIEERLKTYAHLFDDKVMKQLKRRRYTGWGRLSRKLINGIRDKQSGKTILDFLKSDGFANRNFMQLIHDDSLTFKEDIQKAQVSGQGDSLHEHIANLAGSPAIKKGILQTVKVVDELVKVMGRHKPENIVIEMARENQTTQKGQKNSRERMKRIEEGIKELGSQILKEHPVENTQLQNEKLYLYYLQNGRDMYVDQELDINRLSDYDVDHIVPQSFLKDDSIDNKVLTRSDKARGKSDNVPSEEVVKKMKNYWRQLLNAKLITQRKFDNLTKAERGGLSELDKAGFIKRQLVETRQITKHVAQILDSRMNTKYDENDKLIREVKVITLKSKLVSDFRKDFQFYKVREINNYHHAHDAYLNAVVGTALIKKYPKLESEFVYGDYKVYDVRKMIAKSEQEIGKATAKYFFYSNIMNFFKTEITLANGEIRKRPLIETNGETGEIVWDKGRDFATVRKVLSMPQVNIVKKTEVQTGGFSKESILPKRNSDKLIARKKDWDPKKYGGFDSPTVAYSVLVVAKVEKGKSKKLKSVKELLGITIMERSSFEKNPIDFLEAKGYKEVKKDLIIKLPKYSLFELENGRKRMLASAGELQKGNELALPSKYVNFLYLASHYEKLKGSPEDNEQKQLFVEQHKHYLDEIIEQISEFSKRVILADANLDKVLSAYNKHRDKPIREQAENIIHLFTLTNLGAPAAFKYFDTTIDRKRYTSTKEVLDATLIHQSITGLYETRIDLSQLGGDGGGGGEAAAKPAPGGLGIEDEYRLHETSTEPDVSLGSTWLSDFPQAWAETGGMGLAVRQAPLIIPLKATSTPVSIQQYPMSHEARLGIKPHIQRLLDQGILVPCQSPWNTPLLPVKKPGTNDYRPVQDLREVNKRVEDIHPTVPNPYNLLSGLPPSHQWYTVLDLKDAFFCLRLHPTSQPLFAFEWRDPGMGISGQLTWTRLPQGFKNSPTLFNEALHRDLADFRIQHPDLILLQYVDDILLAATSELDCQQGTRALLQTLGDLGYRASAKKAQICQKQVKYLGYLLREGQRWLTEARKETVMGQPVPKTPRQLREFLGKAGFCRLFIPGFAEMAAPLYPLTKPGTLFSWGPDQQKAYQEIKQALLTAPALGLPDLTKPFELFVDEKQGYAKGVLTQKLGPWRRPVAYLSKKLDPVAAGWPPCLRMVAAIAVLTKDAGKLTMGQPLVILAPHAVEALVKQPPDRWLSNARMTHYQAMLLDTDRVQFGPVVALNPATLLPLPEEGAPHDCLEILAETHGTRPDLTDQPIPDADHTWYTDGSSFLQEGQRKAGAAVTTETEVIWAGALPAGTSAQRAELIALTQALKMAEGKRLNVYTDSRYAFATAHIHGEIYRRRGWLTSEGREIKNKSEILALLKALFLPKRLSIIHCLGHQKGDSAEARGNRLADQAAREAAIKTPPDTSTLLIAGKRTADGSEFEKRTADGSEFESPKKKAKVE

SEQ ID NO: 2136 - protein, 2091 aa, synthetic construct
MPAAKRVKLDGGDKKYSIGLDIGTNSVGWAVITDEYKVPSKKFKVLGNTDRHSIKKNLIGALLFDSGETAEATRLKRTARRRYTRRKNRICYLQEIFSNEMAKVDDSFFHRLEESFLVEEDKKHERHPIFGNIVDEVAYHEKYPTIYHLRKKLVDSTDKADLRLIYLALAHMIKFRGHFLIEGDLNPDNSDVDKLFIQLVQTYNQLFEENPINASGVDAKAILSARLSKSRRLENLIAQLPGEKKNGLFGNLIALSLGLTPNFKSNFDLAEDAKLQLSKDTYDDDLDNLLAQIGDQYADLFLAAKNLSDAILLSDILRVNTEITKAPLSASMIKRYDEHHQDLTLLKALVRQQLPEKYKEIFFDQSKNGYAGYIDGGASQEEFYKFIKPILEKMDGTEELLVKLNREDLLRKQRTFDNGSIPHQIHLGELHAILRRQEDFYPFLKDNREKIEKILTFRIPYYVGPLARGNSRFAWMTRKSEETITPWNFEEVVDKGASAQSFIERMTNFDKNLPNEKVLPKHSLLYEYFTVYNELTKVKYVTEGMRKPAFLSGEQKKAIVDLLFKTNRKVTVKQLKEDYFKKIECFDSVEISGVEDRFNASLGTYHDLLKIIKDKDFLDNEENEDILEDIVLTLTLFEDREMIEERLKTYAHLFDDKVMKQLKRRRYTGWGRLSRKLINGIRDKQSGKTILDFLKSDGFANRNFMQLIHDDSLTFKEDIQKAQVSGQGDSLHEHIANLAGSPAIKKGILQTVKVVDELVKVMGRHKPENIVIEMARENQTTQKGQKNSRERMKRIEEGIKELGSQILKEHPVENTQLQNEKLYLYYLQNGRDMYVDQELDINRLSDYDVDHIVPQSFLKDDSIDNKVLTRSDKARGKSDNVPSEEVVKKMKNYWRQLLNAKLITQRKFDNLTKAERGGLSELDKAGFIKRQLVETRQITKHVAQILDSRMNTKYDENDKLIREVKVITLKSKLVSDFRKDFQFYKVREINNYHHAHDAYLNAVVGTALIKKYPKLESEFVYGDYKVYDVRKMIAKSEQEIGKATAKYFFYSNIMNFFKTEITLANGEIRKRPLIETNGETGEIVWDKGRDFATVRKVLSMPQVNIVKKTEVQTGGFSKESILPKRNSDKLIARKKDWDPKKYGGFDSPTVAYSVLVVAKVEKGKSKKLKSVKELLGITIMERSSFEKNPIDFLEAKGYKEVKKDLIIKLPKYSLFELENGRKRMLASAGELQKGNELALPSKYVNFLYLASHYEKLKGSPEDNEQKQLFVEQHKHYLDEIIEQISEFSKRVILADANLDKVLSAYNKHRDKPIREQAENIIHLFTLTNLGAPAAFKYFDTTIDRKRYTSTKEVLDATLIHQSITGLYETRIDLSQLGGDGGGGSPAPGGLGIEDEYRLHETSTEPDVSLGSTWLSDFPQAWAETGGMGLAVRQAPLIIPLKATSTPVSIQQYPMSHEARLGIKPHIQRLLDQGILVPCQSPWNTPLLPVKKPGTNDYRPVQDLREVNKRVEDIHPTVPNPYNLLSGLPPSHQWYTVLDLKDAFFCLRLHPTSQPLFAFEWRDPGMGISGQLTWTRLPQGFKNSPTLFNEALHRDLADFRIQHPDLILLQYVDDILLAATSELDCQQGTRALLQTLGDLGYRASAKKAQICQKQVKYLGYLLREGQRWLTEARKETVMGQPVPKTPRQLREFLGKAGFCRLFIPGFAEMAAPLYPLTKPGTLFSWGPDQQKAYQEIKQALLTAPALGLPDLTKPFELFVDEKQGYAKGVLTQKLGPWRRPVAYLSKKLDPVAAGWPPCLRMVAAIAVLTKDAGKLTMGQPLVILAPHAVEALVKQPPDRWLSNARMTHYQAMLLDTDRVQFGPVVALNPATLLPLPEEGAPHDCLEILAETHGTRPDLTDQPIPDADHTWYTDGSSFLQEGQRKAGAAVTTETEVIWAGALPAGTSAQRAELIALTQALKMAEGKRLNVYTDSRYAFATAHIHGEIYRRRGWLTSEGREIKNKSEILALLKALFLPKRLSIIHCLGHQKGDSAEARGNRLADQAAREAAIKTPPDTSTLLIAGKRTADGSEFEKRTADGSEFESPKKKAKVE

SEQ ID NO: 2137 - protein, 2097 aa, synthetic construct
MPAAKRVKLDGGDKKYSIGLDIGTNSVGWAVITDEYKVPSKKFKVLGNTDRHSIKKNLIGALLFDSGETAEATRLKRTARRRYTRRKNRICYLQEIFSNEMAKVDDSFFHRLEESFLVEEDKKHERHPIFGNIVDEVAYHEKYPTIYHLRKKLVDSTDKADLRLIYLALAHMIKFRGHFLIEGDLNPDNSDVDKLFIQLVQTYNQLFEENPINASGVDAKAILSARLSKSRRLENLIAQLPGEKKNGLFGNLIALSLGLTPNFKSNFDLAEDAKLQLSKDTYDDDLDNLLAQIGDQYADLFLAAKNLSDAILLSDILRVNTEITKAPLSASMIKRYDEHHQDLTLLKALVRQQLPEKYKEIFFDQSKNGYAGYIDGGASQEEFYKFIKPILEKMDGTEELLVKLNREDLLRKQRTFDNGSIPHQIHLGELHAILRRQEDFYPFLKDNREKIEKILTFRIPYYVGPLARGNSRFAWMTRKSEETITPWNFEEVVDKGASAQSFIERMTNFDKNLPNEKVLPKHSLLYEYFTVYNELTKVKYVTEGMRKPAFLSGEQKKAIVDLLFKTNRKVTVKQLKEDYFKKIECFDSVEISGVEDRFNASLGTYHDLLKIIKDKDFLDNEENEDILEDIVLTLTLFEDREMIEERLKTYAHLFDDKVMKQLKRRRYTGWGRLSRKLINGIRDKQSGKTILDFLKSDGFANRNFMQLIHDDSLTFKEDIQKAQVSGQGDSLHEHIANLAGSPAIKKGILQTVKVVDELVKVMGRHKPENIVIEMARENQTTQKGQKNSRERMKRIEEGIKELGSQILKEHPVENTQLQNEKLYLYYLQNGRDMYVDQELDINRLSDYDVDHIVPQSFLKDDSIDNKVLTRSDKARGKSDNVPSEEVVKKMKNYWRQLLNAKLITQRKFDNLTKAERGGLSELDKAGFIKRQLVETRQITKHVAQILDSRMNTKYDENDKLIREVKVITLKSKLVSDFRKDFQFYKVREINNYHHAHDAYLNAVVGTALIKKYPKLESEFVYGDYKVYDVRKMIAKSEQEIGKATAKYFFYSNIMNFFKTEITLANGEIRKRPLIETNGETGEIVWDKGRDFATVRKVLSMPQVNIVKKTEVQTGGFSKESILPKRNSDKLIARKKDWDPKKYGGFDSPTVAYSVLVVAKVEKGKSKKLKSVKELLGITIMERSSFEKNPIDFLEAKGYKEVKKDLIIKLPKYSLFELENGRKRMLASAGELQKGNELALPSKYVNFLYLASHYEKLKGSPEDNEQKQLFVEQHKHYLDEIIEQISEFSKRVILADANLDKVLSAYNKHRDKPIREQAENIIHLFTLTNLGAPAAFKYFDTTIDRKRYTSTKEVLDATLIHQSITGLYETRIDLSQLGGDGGGGSGGSGGSGGSGGLGIEDEYRLHETSTEPDVSLGSTWLSDFPQAWAETGGMGLAVRQAPLIIPLKATSTPVSIQQYPMSHEARLGIKPHIQRLLDQGILVPCQSPWNTPLLPVKKPGTNDYRPVQDLREVNKRVEDIHPTVPNPYNLLSGLPPSHQWYTVLDLKDAFFCLRLHPTSQPLFAFEWRDPGMGISGQLTWTRLPQGFKNSPTLFNEALHRDLADFRIQHPDLILLQYVDDILLAATSELDCQQGTRALLQTLGDLGYRASAKKAQICQKQVKYLGYLLREGQRWLTEARKETVMGQPVPKTPRQLREFLGKAGFCRLFIPGFAEMAAPLYPLTKPGTLFSWGPDQQKAYQEIKQALLTAPALGLPDLTKPFELFVDEKQGYAKGVLTQKLGPWRRPVAYLSKKLDPVAAGWPPCLRMVAAIAVLTKDAGKLTMGQPLVILAPHAVEALVKQPPDRWLSNARMTHYQAMLLDTDRVQFGPVVALNPATLLPLPEEGAPHDCLEILAETHGTRPDLTDQPIPDADHTWYTDGSSFLQEGQRKAGAAVTTETEVIWAGALPAGTSAQRAELIALTQALKMAEGKRLNVYTDSRYAFATAHIHGEIYRRRGWLTSEGREIKNKSEILALLKALFLPKRLSIIHCLGHQKGDSAEARGNRLADQAAREAAIKTPPDTSTLLIAGKRTADGSEFEKRTADGSEFESPKKKAKVE

SEQ ID NO: 2138 - protein, 2094 aa, synthetic construct; identical to SEQ ID NO: 2061

SEQ ID NO: 2139 - protein, 2096 aa, synthetic construct
MPAAKRVKLDGGDKKYSIGLDIGTNSVGWAVITDEYKVPSKKFKVLGNTDRHSIKKNLIGALLFDSGETAEATRLKRTARRRYTRRKNRICYLQEIFSNEMAKVDDSFFHRLEESFLVEEDKKHERHPIFGNIVDEVAYHEKYPTIYHLRKKLVDSTDKADLRLIYLALAHMIKFRGHFLIEGDLNPDNSDVDKLFIQLVQTYNQLFEENPINASGVDAKAILSARLSKSRRLENLIAQLPGEKKNGLFGNLIALSLGLTPNFKSNFDLAEDAKLQLSKDTYDDDLDNLLAQIGDQYADLFLAAKNLSDAILLSDILRVNTEITKAPLSASMIKRYDEHHQDLTLLKALVRQQLPEKYKEIFFDQSKNGYAGYIDGGASQEEFYKFIKPILEKMDGTEELLVKLNREDLLRKQRTFDNGSIPHQIHLGELHAILRRQEDFYPFLKDNREKIEKILTFRIPYYVGPLARGNSRFAWMTRKSEETITPWNFEEVVDKGASAQSFIERMTNFDKNLPNEKVLPKHSLLYEYFTVYNELTKVKYVTEGMRKPAFLSGEQKKAIVDLLFKTNRKVTVKQLKEDYFKKIECFDSVEISGVEDRFNASLGTYHDLLKIIKDKDFLDNEENEDILEDIVLTLTLFEDREMIEERLKTYAHLFDDKVMKQLKRRRYTGWGRLSRKLINGIRDKQSGKTILDFLKSDGFANRNFMQLIHDDSLTFKEDIQKAQVSGQGDSLHEHIANLAGSPAIKKGILQTVKVVDELVKVMGRHKPENIVIEMARENQTTQKGQKNSRERMKRIEEGIKELGSQILKEHPVENTQLQNEKLYLYYLQNGRDMYVDQELDINRLSDYDVDHIVPQSFLKDDSIDNKVLTRSDKARGKSDNVPSEEVVKKMKNYWRQLLNAKLITQRKFDNLTKAERGGLSELDKAGFIKRQLVETRQITKHVAQILDSRMNTKYDENDKLIREVKVITLKSKLVSDFRKDFQFYKVREINNYHHAHDAYLNAVVGTALIKKYPKLESEFVYGDYKVYDVRKMIAKSEQEIGKATAKYFFYSNIMNFFKTEITLANGEIRKRPLIETNGETGEIVWDKGRDFATVRKVLSMPQVNIVKKTEVQTGGFSKESILPKRNSDKLIARKKDWDPKKYGGFDSPTVAYSVLVVAKVEKGKSKKLKSVKELLGITIMERSSFEKNPIDFLEAKGYKEVKKDLIIKLPKYSLFELENGRKRMLASAGELQKGNELALPSKYVNFLYLASHYEKLKGSPEDNEQKQLFVEQHKHYLDEIIEQISEFSKRVILADANLDKVLSAYNKHRDKPIREQAENIIHLFTLTNLGAPAAFKYFDTTIDRKRYTSTKEVLDATLIHQSITGLYETRIDLSQLGGDGGGGSPAPEAAAKGGLGIEDEYRLHETSTEPDVSLGSTWLSDFPQAWAETGGMGLAVRQAPLIIPLKATSTPVSIQQYPMSHEARLGIKPHIQRLLDQGILVPCQSPWNTPLLPVKKPGTNDYRPVQDLREVNKRVEDIHPTVPNPYNLLSGLPPSHQWYTVLDLKDAFFCLRLHPTSQPLFAFEWRDPGMGISGQLTWTRLPQGFKNSPTLFNEALHRDLADFRIQHPDLILLQYVDDILLAATSELDCQQGTRALLQTLGDLGYRASAKKAQICQKQVKYLGYLLREGQRWLTEARKETVMGQPVPKTPRQLREFLGKAGFCRLFIPGFAEMAAPLYPLTKPGTLFSWGPDQQKAYQEIKQALLTAPALGLPDLTKPFELFVDEKQGYAKGVLTQKLGPWRRPVAYLSKKLDPVAAGWPPCLRMVAAIAVLTKDAGKLTMGQPLVILAPHAVEALVKQPPDRWLSNARMTHYQAMLLDTDRVQFGPVVALNPATLLPLPEEGAPHDCLEILAETHGTRPDLTDQPIPDADHTWYTDGSSFLQEGQRKAGAAVTTETEVIWAGALPAGTSAQRAELIALTQALKMAEGKRLNVYTDSRYAFATAHIHGEIYRRRGWLTSEGREIKNKSEILALLKALFLPKRLSIIHCLGHQKGDSAEARGNRLADQAAREAAIKTPPDTSTLLIAGKRTADGSEFEKRTADGSEFESPKKKAKVE

SEQ ID NO: 2140 - protein, 2103 aa, synthetic construct
MPAAKRVKLDGGDKKYSIGLDIGTNSVGWAVITDEYKVPSKKFKVLGNTDRHSIKKNLIGALLFDSGETAEATRLKRTARRRYTRRKNRICYLQEIFSNEMAKVDDSFFHRLEESFLVEEDKKHERHPIFGNIVDEVAYHEKYPTIYHLRKKLVDSTDKADLRLIYLALAHMIKFRGHFLIEGDLNPDNSDVDKLFIQLVQTYNQLFEENPINASGVDAKAILSARLSKSRRLENLIAQLPGEKKNGLFGNLIALSLGLTPNFKSNFDLAEDAKLQLSKDTYDDDLDNLLAQIGDQYADLFLAAKNLSDAILLSDILRVNTEITKAPLSASMIKRYDEHHQDLTLLKALVRQQLPEKYKEIFFDQSKNGYAGYIDGGASQEEFYKFIKPILEKMDGTEELLVKLNREDLLRKQRTFDNGSIPHQIHLGELHAILRRQEDFYPFLKDNREKIEKILTFRIPYYVGPLARGNSRFAWMTRKSEETITPWNFEEVVDKGASAQSFIERMTNFDKNLPNEKVLPKHSLLYEYFTVYNELTKVKYVTEGMRKPAFLSGEQKKAIVDLLFKTNRKVTVKQLKEDYFKKIECFDSVEISGVEDRFNASLGTYHDLLKIIKDKDFLDNEENEDILEDIVLTLTLFEDREMIEERLKTYAHLFDDKVMKQLKRRRYTGWGRLSRKLINGIRDKQSGKTILDFLKSDGFANRNFMQLIHDDSLTFKEDIQKAQVSGQGDSLHEHIANLAGSPAIKKGILQTVKVVDELVKVMGRHKPENIVIEMARENQTTQKGQKNSRERMKRIEEGIKELGSQILKEHPVENTQLQNEKLYLYYLQNGRDMYVDQELDINRLSDYDVDHIVPQSFLKDDSIDNKVLTRSDKARGKSDNVPSEEVVKKMKNYWRQLLNAKLITQRKFDNLTKAERGGLSELDKAGFIKRQLVETRQITKHVAQILDSRMNTKYDENDKLIREVKVITLKSKLVSDFRKDFQFYKVREINNYHHAHDAYLNAVVGTALIKKYPKLESEFVYGDYKVYDVRKMIAKSEQEIGKATAKYFFYSNIMNFFKTEITLANGEIRKRPLIETNGETGEIVWDKGRDFATVRKVLSMPQVNIVKKTEVQTGGFSKESILPKRNSDKLIARKKDWDPKKYGGFDSPTVAYSVLVVAKVEKGKSKKLKSVKELLGITIMERSSFEKNPIDFLEAKGYKEVKKDLIIKLPKYSLFELENGRKRMLASAGELQKGNELALPSKYVNFLYLASHYEKLKGSPEDNEQKQLFVEQHKHYLDEIIEQISEFSKRVILADANLDKVLSAYNKHRDKPIREQAENIIHLFTLTNLGAPAAFKYFDTTIDRKRYTSTKEVLDATLIHQSITGLYETRIDLSQLGGDGGGSSGSSGSSGSSGSSGSSGGLGIEDEYRLHETSTEPDVSLGSTWLSDFPQAWAETGGMGLAVRQAPLIIPLKATSTPVSIQQYPMSHEARLGIKPHIQRLLDQGILVPCQSPWNTPLLPVKKPGTNDYRPVQDLREVNKRVEDIHPTVPNPYNLLSGLPPSHQWYTVLDLKDAFFCLRLHPTSQPLFAFEWRDPGMGISGQLTWTRLPQGFKNSPTLFNEALHRDLADFRIQHPDLILLQYVDDILLAATSELDCQQGTRALLQTLGDLGYRASAKKAQICQKQVKYLGYLLREGQRWLTEARKETVMGQPVPKTPRQLREFLGKAGFCRLFIPGFAEMAAPLYPLTKPGTLFSWGPDQQKAYQEIKQALLTAPALGLPDLTKPFELFVDEKQGYAKGVLTQKLGPWRRPVAYLSKKLDPVAAGWPPCLRMVAAIAVLTKDAGKLTMGQPLVILAPHAVEALVKQPPDRWLSNARMTHYQAMLLDTDRVQFGPVVALNPATLLPLPEEGAPHDCLEILAETHGTRPDLTDQPIPDADHTWYTDGSSFLQEGQRKAGAAVTTETEVIWAGALPAGTSAQRAELIALTQALKMAEGKRLNVYTDSRYAFATAHIHGEIYRRRGWLTSEGREIKNKSEILALLKALFLPKRLSIIHCLGHQKGDSAEARGNRLADQAAREAAIKTPPDTSTLLIAGKRTADGSEFEKRTADGSEFESPKKKAKVE

SEQ ID NO: 2141 - protein, 2096 aa, synthetic construct
MPAAKRVKLDGGDKKYSIGLDIGTNSVGWAVITDEYKVPSKKFKVLGNTDRHSIKKNLIGALLFDSGETAEATRLKRTARRRYTRRKNRICYLQEIFSNEMAKVDDSFFHRLEESFLVEEDKKHERHPIFGNIVDEVAYHEKYPTIYHLRKKLVDSTDKADLRLIYLALAHMIKFRGHFLIEGDLNPDNSDVDKLFIQLVQTYNQLFEENPINASGVDAKAILSARLSKSRRLENLIAQLPGEKKNGLFGNLIALSLGLTPNFKSNFDLAEDAKLQLSKDTYDDDLDNLLAQIGDQYADLFLAAKNLSDAILLSDILRVNTEITKAPLSASMIKRYDEHHQDLTLLKALVRQQLPEKYKEIFFDQSKNGYAGYIDGGASQEEFYKFIKPILEKMDGTEELLVKLNREDLLRKQRTFDNGSIPHQIHLGELHAILRRQEDFYPFLKDNREKIEKILTFRIPYYVGPLARGNSRFAWMTRKSEETITPWNFEEVVDKGASAQSFIERMTNFDKNLPNEKVLPKHSLLYEYFTVYNELTKVKYVTEGMRKPAFLSGEQKKAIVDLLFKTNRKVTVKQLKEDYFKKIECFDSVEISGVEDRFNASLGTYHDLLKIIKDKDFLDNEENEDILEDIVLTLTLFEDREMIEERLKTYAHLFDDKVMKQLKRRRYTGWGRLSRKLINGIRDKQSGKTILDFLKSDGFANRNFMQLIHDDSLTFKEDIQKAQVSGQGDSLHEHIANLAGSPAIKKGILQTVKVVDELVKVMGRHKPENIVIEMARENQTTQKGQKNSRERMKRIEEGIKELGSQILKEHPVENTQLQNEKLYLYYLQNGRDMYVDQELDINRLSDYDVDHIVPQSFLKDDSIDNKVLTRSDKARGKSDNVPSEEVVKKMKNYWRQLLNAKLITQRKFDNLTKAERGGLSELDKAGFIKRQLVETRQITKHVAQILDSRMNTKYDENDKLIREVKVITLKSKLVSDFRKDFQFYKVREINNYHHAHDAYLNAVVGTALIKKYPKLESEFVYGDYKVYDVRKMIAKSEQEIGKATAKYFFYSNIMNFFKTEITLANGEIRKRPLIETNGETGEIVWDKGRDFATVRKVLSMPQVNIVKKTEVQTGGFSKESILPKRNSDKLIARKKDWDPKKYGGFDSPTVAYSVLVVAKVEKGKSKKLKSVKELLGITIMERSSFEKNPIDFLEAKGYKEVKKDLIIKLPKYSLFELENGRKRMLASAGELQKGNELALPSKYVNFLYLASHYEKLKGSPEDNEQKQLFVEQHKHYLDEIIEQISEFSKRVILADANLDKVLSAYNKHRDKPIREQAENIIHLFTLTNLGAPAAFKYFDTTIDRKRYTSTKEVLDATLIHQSITGLYETRIDLSQLGGDGGEAAAKGSSGGGGGLGIEDEYRLHETSTEPDVSLGSTWLSDFPQAWAETGGMGLAVRQAPLIIPLKATSTPVSIQQYPMSHEARLGIKPHIQRLLDQGILVPCQSPWNTPLLPVKKPGTNDYRPVQDLREVNKRVEDIHPTVPNPYNLLSGLPPSHQWYTVLDLKDAFFCLRLHPTSQPLFAFEWRDPGMGISGQLTWTRLPQGFKNSPTLFNEALHRDLADFRIQHPDLILLQYVDDILLAATSELDCQQGTRALLQTLGDLGYRASAKKAQICQKQVKYLGYLLREGQRWLTEARKETVMGQPVPKTPRQLREFLGKAGFCRLFIPGFAEMAAPLYPLTKPGTLFSWGPDQQKAYQEIKQALLTAPALGLPDLTKPFELFVDEKQGYAKGVLTQKLGPWRRPVAYLSKKLDPVAAGWPPCLRMVAAIAVLTKDAGKLTMGQPLVILAPHAVEALVKQPPDRWLSNARMTHYQAMLLDTDRVQFGPVVALNPATLLPLPEEGAPHDCLEILAETHGTRPDLTDQPIPDADHTWYTDGSSFLQEGQRKAGAAVTTETEVIWAGALPAGTSAQRAELIALTQALKMAEGKRLNVYTDSRYAFATAHIHGEIYRRRGWLTSEGREIKNKSEILALLKALFLPKRLSIIHCLGHQKGDSAEARGNRLADQAAREAAIKTPPDTSTLLIAGKRTADGSEFEKRTADGSEFESPKKKAKVE

SEQ ID NO: 2142 - protein, 2094 aa, synthetic construct
MPAAKRVKLDGGDKKYSIGLDIGTNSVGWAVITDEYKVPSKKFKVLGNTDRHSIKKNLIGALLFDSGETAEATRLKRTARRRYTRRKNRICYLQEIFSNEMAKVDDSFFHRLEESFLVEEDKKHERHPIFGNIVDEVAYHEKYPTIYHLRKKLVDSTDKADLRLIYLALAHMIKFRGHFLIEGDLNPDNSDVDKLFIQLVQTYNQLFEENPINASGVDAKAILSARLSKSRRLENLIAQLPGEKKNGLFGNLIALSLGLTPNFKSNFDLAEDAKLQLSKDTYDDDLDNLLAQIGDQYADLFLAAKNLSDAILLSDILRVNTEITKAPLSASMIKRYDEHHQDLTLLKALVRQQLPEKYKEIFFDQSKNGYAGYIDGGASQEEFYKFIKPILEKMDGTEELLVKLNREDLLRKQRTFDNGSIPHQIHLGELHAILRRQEDFYPFLKDNREKIEKILTFRIPYYVGPLARGNSRFAWMTRKSEETITPWNFEEVVDKGASAQSFIERMTNFDKNLPNEKVLPKHSLLYEYFTVYNELTKVKYVTEGMRKPAFLSGEQKKAIVDLLFKTNRKVTVKQLKEDYFKKIECFDSVEISGVEDRFNASLGTYHDLLKIIKDKDFLDNEENEDILEDIVLTLTLFEDREMIEERLKTYAHLFDDKVMKQLKRRRYTGWGRLSRKLINGIRDKQSGKTILDFLKSDGFANRNFMQLIHDDSLTFKEDIQKAQVSGQGDSLHEHIANLAGSPAIKKGILQTVKVVDELVKVMGRHKPENIVIEMARENQTTQKGQKNSRERMKRIEEGIKELGSQILKEHPVENTQLQNEKLYLYYLQNGRDMYVDQELDINRLSDYDVDHIVPQSFLKDDSIDNKVLTRSDKARGKSDNVPSEEVVKKMKNYWRQLLNAKLITQRKFDNLTKAERGGLSELDKAGFIKRQLVETRQITKHVAQILDSRMNTKYDENDKLIREVKVITLKSKLVSDFRKDFQFYKVREINNYHHAHDAYLNAVVGTALIKKYPKLESEFVYGDYKVYDVRKMIAKSEQEIGKATAKYFFYSNIMNFFKTEITLANGEIRKRPLIETNGETGEIVWDKGRDFATVRKVLSMPQVNIVKKTEVQTGGFSKESILPKRNSDKLIARKKDWDPKKYGGFDSPTVAYSVLVVAKVEKGKSKKLKSVKELLGITIMERSSFEKNPIDFLEAKGYKEVKKDLIIKLPKYSLFELENGRKRMLASAGELQKGNELALPSKYVNFLYLASHYEKLKGSPEDNEQKQLFVEQHKHYLDEIIEQISEFSKRVILADANLDKVLSAYNKHRDKPIREQAENIIHLFTLTNLGAPAAFKYFDTTIDRKRYTSTKEVLDATLIHQSITGLYETRIDLSQLGGDGGGSSGSSGSSGGLGIEDEYRLHETSTEPDVSLGSTWLSDFPQAWAETGGMGLAVRQAPLIIPLKATSTPVSIQQYPMSHEARLGIKPHIQRLLDQGILVPCQSPWNTPLLPVKKPGTNDYRPVQDLREVNKRVEDIHPTVPNPYNLLSGLPPSHQWYTVLDLKDAFFCLRLHPTSQPLFAFEWRDPGMGISGQLTWTRLPQGFKNSPTLFNEALHRDLADFRIQHPDLILLQYVDDILLAATSELDCQQGTRALLQTLGDLGYRASAKKAQICQKQVKYLGYLLREGQRWLTEARKETVMGQPVPKTPRQLREFLGKAGFCRLFIPGFAEMAAPLYPLTKPGTLFSWGPDQQKAYQEIKQALLTAPALGLPDLTKPFELFVDEKQGYAKGVLTQKLGPWRRPVAYLSKKLDPVAAGWPPCLRMVAAIAVLTKDAGKLTMGQPLVILAPHAVEALVKQPPDRWLSNARMTHYQAMLLDTDRVQFGPVVALNPATLLPLPEEGAPHDCLEILAETHGTRPDLTDQPIPDADHTWYTDGSSFLQEGQRKAGAAVTTETEVIWAGALPAGTSAQRAELIALTQALKMAEGKRLNVYTDSRYAFATAHIHGEIYRRRGWLTSEGREIKNKSEILALLKALFLPKRLSIIHCLGHQKGDSAEARGNRLADQAAREAAIKTPPDTSTLLIAGKRTADGSEFEKRTADGSEFESPKKKAKVE

SEQ ID NO: 2143 - protein, 2094 aa, synthetic construct
MPAAKRVKLDGGDKKYSIGLDIGTNSVGWAVITDEYKVPSKKFKVLGNTDRHSIKKNLIGALLFDSGETAEATRLKRTARRRYTRRKNRICYLQEIFSNEMAKVDDSFFHRLEESFLVEEDKKHERHPIFGNIVDEVAYHEKYPTIYHLRKKLVDSTDKADLRLIYLALAHMIKFRGHFLIEGDLNPDNSDVDKLFIQLVQTYNQLFEENPINASGVDAKAILSARLSKSRRLENLIAQLPGEKKNGLFGNLIALSLGLTPNFKSNFDLAEDAKLQLSKDTYDDDLDNLLAQIGDQYADLFLAAKNLSDAILLSDILRVNTEITKAPLSASMIKRYDEHHQDLTLLKALVRQQLPEKYKEIFFDQSKNGYAGYIDGGASQEEFYKFIKPILEKMDGTEELLVKLNREDLLRKQRTFDNGSIPHQIHLGELHAILRRQEDFYPFLKDNREKIEKILTFRIPYYVGPLARGNSRFAWMTRKSEETITPWNFEEVVDKGASAQSFIERMTNFDKNLPNEKVLPKHSLLYEYFTVYNELTKVKYVTEGMRKPAFLSGEQKKAIVDLLFKTNRKVTVKQLKEDYFKKIECFDSVEISGVEDRFNASLGTYHDLLKIIKDKDFLDNEENEDILEDIVLTLTLFEDREMIEERLKTYAHLFDDKVMKQLKRRRYTGWGRLSRKLINGIRDKQSGKTILDFLKSDGFANRNFMQLIHDDSLTFKEDIQKAQVSGQGDSLHEHIANLAGSPAIKKGILQTVKVVDELVKVMGRHKPENIVIEMARENQTTQKGQKNSRERMKRIEEGIKELGSQILKEHPVENTQLQNEKLYLYYLQNGRDMYVDQELDINRLSDYDVDHIVPQSFLKDDSIDNKVLTRSDKARGKSDNVPSEEVVKKMKNYWRQLLNAKLITQRKFDNLTKAERGGLSELDKAGFIKRQLVETRQITKHVAQILDSRMNTKYDENDKLIREVKVITLKSKLVSDFRKDFQFYKVREINNYHHAHDAYLNAVVGTALIKKYPKLESEFVYGDYKVYDVRKMIAKSEQEIGKATAKYFFYSNIMNFFKTEITLANGEIRKRPLIETNGETGEIVWDKGRDFATVRKVLSMPQVNIVKKTEVQTGGFSKESILPKRNSDKLIARKKDWDPKKYGGFDSPTVAYSVLVVAKVEKGKSKKLKSVKELLGITIMERSSFEKNPIDFLEAKGYKEVKKDLIIKLPKYSLFELENGRKRMLASAGELQKGNELALPSKYVNFLYLASHYEKLKGSPEDNEQKQLFVEQHKHYLDEIIEQISEFSKRVILADANLDKVLSAYNKHRDKPIREQAENIIHLFTLTNLGAPAAFKYFDTTIDRKRYTSTKEVLDATLIHQSITGLYETRIDLSQLGGDGGGSSGGSPAPGGLGIEDEYRLHETSTEPDVSLGSTWLSDFPQAWAETGGMGLAVRQAPLIIPLKATSTPVSIQQYPMSHEARLGIKPHIQRLLDQGILVPCQSPWNTPLLPVKKPGTNDYRPVQDLREVNKRVEDIHPTVPNPYNLLSGLPPSHQWYTVLDLKDAFFCLRLHPTSQPLFAFEWRDPGMGISGQLTWTRLPQGFKNSPTLFNEALHRDLADFRIQHPDLILLQYVDDILLAATSELDCQQGTRALLQTLGDLGYRASAKKAQICQKQVKYLGYLLREGQRWLTEARKETVMGQPVPKTPRQLREFLGKAGFCRLFIPGFAEMAAPLYPLTKPGTLFSWGPDQQKAYQEIKQALLTAPALGLPDLTKPFELFVDEKQGYAKGVLTQKLGPWRRPVAYLSKKLDPVAAGWPPCLRMVAAIAVLTKDAGKLTMGQPLVILAPHAVEALVKQPPDRWLSNARMTHYQAMLLDTDRVQFGPVVALNPATLLPLPEEGAPHDCLEILAETHGTRPDLTDQPIPDADHTWYTDGSSFLQEGQRKAGAAVTTETEVIWAGALPAGTSAQRAELIALTQALKMAEGKRLNVYTDSRYAFATAHIHGEIYRRRGWLTSEGREIKNKSEILALLKALFLPKRLSIIHCLGHQKGDSAEARGNRLADQAAREAAIKTPPDTSTLLIAGKRTADGSEFEKRTADGSEFESPKKKAKVE

SEQ ID NO: 2144 - protein, 2090 aa, synthetic construct
MPAAKRVKLDGGDKKYSIGLDIGTNSVGWAVITDEYKVPSKKFKVLGNTDRHSIKKNLIGALLFDSGETAEATRLKRTARRRYTRRKNRICYLQEIFSNEMAKVDDSFFHRLEESFLVEEDKKHERHPIFGNIVDEVAYHEKYPTIYHLRKKLVDSTDKADLRLIYLALAHMIKFRGHFLIEGDLNPDNSDVDKLFIQLVQTYNQLFEENPINASGVDAKAILSARLSKSRRLENLIAQLPGEKKNGLFGNLIALSLGLTPNFKSNFDLAEDAKLQLSKDTYDDDLDNLLAQIGDQYADLFLAAKNLSDAILLSDILRVNTEITKAPLSASMIKRYDEHHQDLTLLKALVRQQLPEKYKEIFFDQSKNGYAGYIDGGASQEEFYKFIKPILEKMDGTEELLVKLNREDLLRKQRTFDNGSIPHQIHLGELHAILRRQEDFYPFLKDNREKIEKILTFRIPYYVGPLARGNSRFAWMTRKSEETITPWNFEEVVDKGASAQSFIERMTNFDKNLPNEKVLPKHSLLYEYFTVYNELTKVKYVTEGMRKPAFLSGEQKKAIVDLLFKTNRKVTVKQLKEDYFKKIECFDSVEISGVEDRFNASLGTYHDLLKIIKDKDFLDNEENEDILEDIVLTLTLFEDREMIEERLKTYAHLFDDKVMKQLKRRRYTGWGRLSRKLINGIRDKQSGKTILDFLKSDGFANRNFMQLIHDDSLTFKEDIQKAQVSGQGDSLHEHIANLAGSPAIKKGILQTVKVVDELVKVMGRHKPENIVIEMARENQTTQKGQKNSRERMKRIEEGIKELGSQILKEHPVENTQLQNEKLYLYYLQNGRDMYVDQELDINRLSDYDVDHIVPQSFLKDDSIDNKVLTRSDKARGKSDNVPSEEVVKKMKNYWRQLLNAKLITQRKFDNLTKAERGGLSELDKAGFIKRQLVETRQITKHVAQILDSRMNTKYDENDKLIREVKVITLKSKLVSDFRKDFQFYKVREINNYHHAHDAYLNAVVGTALIKKYPKLESEFVYGDYKVYDVRKMIAKSEQEIGKATAKYFFYSNIMNFFKTEITLANGEIRKRPLIETNGETGEIVWDKGRDFATVRKVLSMPQVNIVKKTEVQTGGFSKESILPKRNSDKLIARKKDWDPKKYGGFDSPTVAYSVLVVAKVEKGKSKKLKSVKELLGITIMERSSFEKNPIDFLEAKGYKEVKKDLIIKLPKYSLFELENGRKRMLASAGELQKGNELALPSKYVNFLYLASHYEKLKGSPEDNEQKQLFVEQHKHYLDEIIEQISEFSKRVILADANLDKVLSAYNKHRDKPIREQAENIIHLFTLTNLGAPAAFKYFDTTIDRKRYTSTKEVLDATLIHQSITGLYETRIDLSQLGGDGGPAPAPGGLGIEDEYRLHETSTEPDVSLGSTWLSDFPQAWAETGGMGLAVRQAPLIIPLKATSTPVSIQQYPMSHEARLGIKPHIQRLLDQGILVPCQSPWNTPLLPVKKPGTNDYRPVQDLREVNKRVEDIHPTVPNPYNLLSGLPPSHQWYTVLDLKDAFFCLRLHPTSQPLFAFEWRDPGMGISGQLTWTRLPQGFKNSPTLFNEALHRDLADFRIQHPDLILLQYVDDILLAATSELDCQQGTRALLQTLGDLGYRASAKKAQICQKQVKYLGYLLREGQRWLTEARKETVMGQPVPKTPRQLREFLGKAGFCRLFIPGFAEMAAPLYPLTKPGTLFSWGPDQQKAYQEIKQALLTAPALGLPDLTKPFELFVDEKQGYAKGVLTQKLGPWRRPVAYLSKKLDPVAAGWPPCLRMVAAIAVLTKDAGKLTMGQPLVILAPHAVEALVKQPPDRWLSNARMTHYQAMLLDTDRVQFGPVVALNPATLLPLPEEGAPHDCLEILAETHGTRPDLTDQPIPDADHTWYTDGSSFLQEGQRKAGAAVTTETEVIWAGALPAGTSAQRAELIALTQALKMAEGKRLNVYTDSRYAFATAHIHGEIYRRRGWLTSEGREIKNKSEILALLKALFLPKRLSIIHCLGHQKGDSAEARGNRLADQAAREAAIKTPPDTSTLLIAGKRTADGSEFEKRTADGSEFESPKKKAKVE

SEQ ID NO: 2145 - protein, 2096 aa, synthetic construct
MPAAKRVKLDGGDKKYSIGLDIGTNSVGWAVITDEYKVPSKKFKVLGNTDRHSIKKNLIGALLFDSGETAEATRLKRTARRRYTRRKNRICYLQEIFSNEMAKVDDSFFHRLEESFLVEEDKKHERHPIFGNIVDEVAYHEKYPTIYHLRKKLVDSTDKADLRLIYLALAHMIKFRGHFLIEGDLNPDNSDVDKLFIQLVQTYNQLFEENPINASGVDAKAILSARLSKSRRLENLIAQLPGEKKNGLFGNLIALSLGLTPNFKSNFDLAEDAKLQLSKDTYDDDLDNLLAQIGDQYADLFLAAKNLSDAILLSDILRVNTEITKAPLSASMIKRYDEHHQDLTLLKALVRQQLPEKYKEIFFDQSKNGYAGYIDGGASQEEFYKFIKPILEKMDGTEELLVKLNREDLLRKQRTFDNGSIPHQIHLGELHAILRRQEDFYPFLKDNREKIEKILTFRIPYYVGPLARGNSRFAWMTRKSEETITPWNFEEVVDKGASAQSFIERMTNFDKNLPNEKVLPKHSLLYEYFTVYNELTKVKYVTEGMRKPAFLSGEQKKAIVDLLFKTNRKVTVKQLKEDYFKKIECFDSVEISGVEDRFNASLGTYHDLLKIIKDKDFLDNEENEDILEDIVLTLTLFEDREMIEERLKTYAHLFDDKVMKQLKRRRYTGWGRLSRKLINGIRDKQSGKTILDFLKSDGFANRNFMQLIHDDSLTFKEDIQKAQVSGQGDSLHEHIANLAGSPAIKKGILQTVKVVDELVKVMGRHKPENIVIEMARENQTTQKGQKNSRERMKRIEEGIKELGSQILKEHPVENTQLQNEKLYLYYLQNGRDMYVDQELDINRLSDYDVDHIVPQSFLKDDSIDNKVLTRSDKARGKSDNVPSEEVVKKMKNYWRQLLNAKLITQRKFDNLTKAERGGLSELDKAGFIKRQLVETRQITKHVAQILDSRMNTKYDENDKLIREVKVITLKSKLVSDFRKDFQFYKVREINNYHHAHDAYLNAVVGTALIKKYPKLESEFVYGDYKVYDVRKMIAKSEQEIGKATAKYFFYSNIMNFFKTEITLANGEIRKRPLIETNGETGEIVWDKGRDFATVRKVLSMPQVNIVKKTEVQTGGFSKESILPKRNSDKLIARKKDWDPKKYGGFDSPTVAYSVLVVAKVEKGKSKKLKSVKELLGITIMERSSFEKNPIDFLEAKGYKEVKKDLIIKLPKYSLFELENGRKRMLASAGELQKGNELALPSKYVNFLYLASHYEKLKGSPEDNEQKQLFVEQHKHYLDEIIEQISEFSKRVILADANLDKVLSAYNKHRDKPIREQAENIIHLFTLTNLGAPAAFKYFDTTIDRKRYTSTKEVLDATLIHQSITGLYETRIDLSQLGGDGGGGGGSSEAAAKGGLGIEDEYRLHETSTEPDVSLGSTWLSDFPQAWAETGGMGLAVRQAPLIIPLKATSTPVSIQQYPMSHEARLGIKPHIQRLLDQGILVPCQSPWNTPLLPVKKPGTNDYRPVQDLREVNKRVEDIHPTVPNPYNLLSGLPPSHQWYTVLDLKDAFFCLRLHPTSQPLFAFEWRDPGMGISGQLTWTRLPQGFKNSPTLFNEALHRDLADFRIQHPDLILLQYVDDILLAATSELDCQQGTRALLQTLGDLGYRASAKKAQICQKQVKYLGYLLREGQRWLTEARKETVMGQPVPKTPRQLREFLGKAGFCRLFIPGFAEMAAPLYPLTKPGTLFSWGPDQQKAYQEIKQALLTAPALGLPDLTKPFELFVDEKQGYAKGVLTQKLGPWRRPVAYLSKKLDPVAAGWPPCLRMVAAIAVLTKDAGKLTMGQPLVILAPHAVEALVKQPPDRWLSNARMTHYQAMLLDTDRVQFGPVVALNPATLLPLPEEGAPHDCLEILAETHGTRPDLTDQPIPDADHTWYTDGSSFLQEGQRKAGAAVTTETEVIWAGALPAGTSAQRAELIALTQALKMAEGKRLNVYTDSRYAFATAHIHGEIYRRRGWLTSEGREIKNKSEILALLKALFLPKRLSIIHCLGHQKGDSAEARGNRLADQAAREAAIKTPPDTSTLLIAGKRTADGSEFEKRTADGSEFESPKKKAKVE

SEQ ID NO: 2146 - protein, 2096 aa, synthetic construct
MPAAKRVKLDGGDKKYSIGLDIGTNSVGWAVITDEYKVPSKKFKVLGNTDRHSIKKNLIGALLFDSGETAEATRLKRTARRRYTRRKNRICYLQEIFSNEMAKVDDSFFHRLEESFLVEEDKKHERHPIFGNIVDEVAYHEKYPTIYHLRKKLVDSTDKADLRLIYLALAHMIKFRGHFLIEGDLNPDNSDVDKLFIQLVQTYNQLFEENPINASGVDAKAILSARLSKSRRLENLIAQLPGEKKNGLFGNLIALSLGLTPNFKSNFDLAEDAKLQLSKDTYDDDLDNLLAQIGDQYADLFLAAKNLSDAILLSDILRVNTEITKAPLSASMIKRYDEHHQDLTLLKALVRQQLPEKYKEIFFDQSKNGYAGYIDGGASQEEFYKFIKPILEKMDGTEELLVKLNREDLLRKQRTFDNGSIPHQIHLGELHAILRRQEDFYPFLKDNREKIEKILTFRIPYYVGPLARGNSRFAWMTRKSEETITPWNFEEVVDKGASAQSFIERMTNFDKNLPNEKVLPKHSLLYEYFTVYNELTKVKYVTEGMRKPAFLSGEQKKAIVDLLFKTNRKVTVKQLKEDYFKKIECFDSVEISGVEDRFNASLGTYHDLLKIIKDKDFLDNEENEDILEDIVLTLTLFEDREMIEERLKTYAHLFDDKVMKQLKRRRYTGWGRLSRKLINGIRDKQSGKTILDFLKSDGFANRNFMQLIHDDSLTFKEDIQKAQVSGQGDSLHEHIANLAGSPAIKKGILQTVKVVDELVKVMGRHKPENIVIEMARENQTTQKGQKNSRERMKRIEEGIKELGSQILKEHPVENTQLQNEKLYLYYLQNGRDMYVDQELDINRLSDYDVDHIVPQSFLKDDSIDNKVLTRSDKARGKSDNVPSEEVVKKMKNYWRQLLNAKLITQRKFDNLTKAERGGLSELDKAGFIKRQLVETRQITKHVAQILDSRMNTKYDENDKLIREVKVITLKSKLVSDFRKDFQFYKVREINNYHHAHDAYLNAVVGTALIKKYPKLESEFVYGDYKVYDVRKMIAKSEQEIGKATAKYFFYSNIMNFFKTEITLANGEIRKRPLIETNGETGEIVWDKGRDFATVRKVLSMPQVNIVKKTEVQTGGFSKESILPKRNSDKLIARKKDWDPKKYGGFDSPTVAYSVLVVAKVEKGKSKKLKSVKELLGITIMERSSFEKNPIDFLEAKGYKEVKKDLIIKLPKYSLFELENGRKRMLASAGELQKGNELALPSKYVNFLYLASHYEKLKGSPEDNEQKQLFVEQHKHYLDEIIEQISEFSKRVILADANLDKVLSAYNKHRDKPIREQAENIIHLFTLTNLGAPAAFKYFDTTIDRKRYTSTKEVLDATLIHQSITGLYETRIDLSQLGGDGGGGSEAAAKPAPGGLGIEDEYRLHETSTEPDVSLGSTWLSDFPQAWAETGGMGLAVRQAPLIIPLKATSTPVSIQQYPMSHEARLGIKPHIQRLLDQGILVPCQSPWNTPLLPVKKPGTNDYRPVQDLREVNKRVEDIHPTVPNPYNLLSGLPPSHQWYTVLDLKDAFFCLRLHPTSQPLFAFEWRDPGMGISGQLTWTRLPQGFKNSPTLFNEALHRDLADFRIQHPDLILLQYVDDILLAATSELDCQQGTRALLQTLGDLGYRASAKKAQICQKQVKYLGYLLREGQRWLTEARKETVMGQPVPKTPRQLREFLGKAGFCRLFIPGFAEMAAPLYPLTKPGTLFSWGPDQQKAYQEIKQALLTAPALGLPDLTKPFELFVDEKQGYAKGVLTQKLGPWRRPVAYLSKKLDPVAAGWPPCLRMVAAIAVLTKDAGKLTMGQPLVILAPHAVEALVKQPPDRWLSNARMTHYQAMLLDTDRVQFGPVVALNPATLLPLPEEGAPHDCLEILAETHGTRPDLTDQPIPDADHTWYTDGSSFLQEGQRKAGAAVTTETEVIWAGALPAGTSAQRAELIALTQALKMAEGKRLNVYTDSRYAFATAHIHGEIYRRRGWLTSEGREIKNKSEILALLKALFLPKRLSIIHCLGHQKGDSAEARGNRLADQAAREAAIKTPPDTSTLLIAGKRTADGSEFEKRTADGSEFESPKKKAKVE

SEQ ID NO: 2147 - protein, 2093 aa, synthetic construct
MPAAKRVKLDGGDKKYSIGLDIGTNSVGWAVITDEYKVPSKKFKVLGNTDRHSIKKNLIGALLFDSGETAEATRLKRTARRRYTRRKNRICYLQEIFSNEMAKVDDSFFHRLEESFLVEEDKKHERHPIFGNIVDEVAYHEKYPTIYHLRKKLVDSTDKADLRLIYLALAHMIKFRGHFLIEGDLNPDNSDVDKLFIQLVQTYNQLFEENPINASGVDAKAILSARLSKSRRLENLIAQLPGEKKNGLFGNLIALSLGLTPNFKSNFDLAEDAKLQLSKDTYDDDLDNLLAQIGDQYADLFLAAKNLSDAILLSDILRVNTEITKAPLSASMIKRYDEHHQDLTLLKALVRQQLPEKYKEIFFDQSKNGYAGYIDGGASQEEFYKFIKPILEKMDGTEELLVKLNREDLLRKQRTFDNGSIPHQIHLGELHAILRRQEDFYPFLKDNREKIEKILTFRIPYYVGPLARGNSRFAWMTRKSEETITPWNFEEVVDKGASAQSFIERMTNFDKNLPNEKVLPKHSLLYEYFTVYNELTKVKYVTEGMRKPAFLSGEQKKAIVDLLFKTNRKVTVKQLKEDYFKKIECFDSVEISGVEDRFNASLGTYHDLLKIIKDKDFLDNEENEDILEDIVLTLTLFEDREMIEERLKTYAHLFDDKVMKQLKRRRYTGWGRLSRKLINGIRDKQSGKTILDFLKSDGFANRNFMQLIHDDSLTFKEDIQKAQVSGQGDSLHEHIANLAGSPAIKKGILQTVKVVDELVKVMGRHKPENIVIEMARENQTTQKGQKNSRERMKRIEEGIKELGSQILKEHPVENTQLQNEKLYLYYLQNGRDMYVDQELDINRLSDYDVDHIVPQSFLKDDSIDNKVLTRSDKARGKSDNVPSEEVVKKMKNYWRQLLNAKLITQRKFDNLTKAERGGLSELDKAGFIKRQLVETRQITKHVAQILDSRMNTKYDENDKLIREVKVITLKSKLVSDFRKDFQFYKVREINNYHHAHDAYLNAVVGTALIKKYPKLESEFVYGDYKVYDVRKMIAKSEQEIGKATAKYFFYSNIMNFFKTEITLANGEIRKRPLIETNGETGEIVWDKGRDFATVRKVLSMPQVNIVKKTEVQTGGFSKESILPKRNSDKLIARKKDWDPKKYGGFDSPTVAYSVLVVAKVEKGKSKKLKSVKELLGITIMERSSFEKNPIDFLEAKGYKEVKKDLIIKLPKYSLFELENGRKRMLASAGELQKGNELALPSKYVNFLYLASHYEKLKGSPEDNEQKQLFVEQHKHYLDEIIEQISEFSKRVILADANLDKVLSAYNKHRDKPIREQAENIIHLFTLTNLGAPAAFKYFDTTIDRKRYTSTKEVLDATLIHQSITGLYETRIDLSQLGGDGGEAAAKPAPGGLGIEDEYRLHETSTEPDVSLGSTWLSDFPQAWAETGGMGLAVRQAPLIIPLKATSTPVSIQQYPMSHEARLGIKPHIQRLLDQGILVPCQSPWNTPLLPVKKPGTNDYRPVQDLREVNKRVEDIHPTVPNPYNLLSGLPPSHQWYTVLDLKDAFFCLRLHPTSQPLFAFEWRDPGMGISGQLTWTRLPQGFKNSPTLFNEALHRDLADFRIQHPDLILLQYVDDILLAATSELDCQQGTRALLQTLGDLGYRASAKKAQICQKQVKYLGYLLREGQRWLTEARKETVMGQPVPKTPRQLREFLGKAGFCRLFIPGFAEMAAPLYPLTKPGTLFSWGPDQQKAYQEIKQALLTAPALGLPDLTKPFELFVDEKQGYAKGVLTQKLGPWRRPVAYLSKKLDPVAAGWPPCLRMVAAIAVLTKDAGKLTMGQPLVILAPHAVEALVKQPPDRWLSNARMTHYQAMLLDTDRVQFGPVVALNPATLLPLPEEGAPHDCLEILAETHGTRPDLTDQPIPDADHTWYTDGSSFLQEGQRKAGAAVTTETEVIWAGALPAGTSAQRAELIALTQALKMAEGKRLNVYTDSRYAFATAHIHGEIYRRRGWLTSEGREIKNKSEILALLKALFLPKRLSIIHCLGHQKGDSAEARGNRLADQAAREAAIKTPPDTSTLLIAGKRTADGSEFEKRTADGSEFESPKKKAKVE

SEQ ID NO: 2148 - protein, 2091 aa, synthetic construct
MPAAKRVKLDGGDKKYSIGLDIGTNSVGWAVITDEYKVPSKKFKVLGNTDRHSIKKNLIGALLFDSGETAEATRLKRTARRRYTRRKNRICYLQEIFSNEMAKVDDSFFHRLEESFLVEEDKKHERHPIFGNIVDEVAYHEKYPTIYHLRKKLVDSTDKADLRLIYLALAHMIKFRGHFLIEGDLNPDNSDVDKLFIQLVQTYNQLFEENPINASGVDAKAILSARLSKSRRLENLIAQLPGEKKNGLFGNLIALSLGLTPNFKSNFDLAEDAKLQLSKDTYDDDLDNLLAQIGDQYADLFLAAKNLSDAILLSDILRVNTEITKAPLSASMIKRYDEHHQDLTLLKALVRQQLPEKYKEIFFDQSKNGYAGYIDGGASQEEFYKFIKPILEKMDGTEELLVKLNREDLLRKQRTFDNGSIPHQIHLGELHAILRRQEDFYPFLKDNREKIEKILTFRIPYYVGPLARGNSRFAWMTRKSEETITPWNFEEVVDKGASAQSFIERMTNFDKNLPNEKVLPKHSLLYEYFTVYNELTKVKYVTEGMRKPAFLSGEQKKAIVDLLFKTNRKVTVKQLKEDYFKKIECFDSVEISGVEDRFNASLGTYHDLLKIIKDKDFLDNEENEDILEDIVLTLTLFEDREMIEERLKTYAHLFDDKVMKQLKRRRYTGWGRLSRKLINGIRDKQSGKTILDFLKSDGFANRNFMQLIHDDSLTFKEDIQKAQVSGQGDSLHEHIANLAGSPAIKKGILQTVKVVDELVKVMGRHKPENIVIEMARENQTTQKGQKNSRERMKRIEEGIKELGSQILKEHPVENTQLQNEKLYLYYLQNGRDMYVDQELDINRLSDYDVDHIVPQSFLKDDSIDNKVLTRSDKARGKSDNVPSEEVVKKMKNYWRQLLNAKLITQRKFDNLTKAERGGLSELDKAGFIKRQLVETRQITKHVAQILDSRMNTKYDENDKLIREVKVITLKSKLVSDFRKDFQFYKVREINNYHHAHDAYLNAVVGTALIKKYPKLESEFVYGDYKVYDVRKMIAKSEQEIGKATAKYFFYSNIMNFFKTEITLANGEIRKRPLIETNGETGEIVWDKGRDFATVRKVLSMPQVNIVKKTEVQTGGFSKESILPKRNSDKLIARKKDWDPKKYGGFDSPTVAYSVLVVAKVEKGKSKKLKSVKELLGITIMERSSFEKNPIDFLEAKGYKEVKKDLIIKLPKYSLFELENGRKRMLASAGELQKGNELALPSKYVNFLYLASHYEKLKGSPEDNEQKQLFVEQHKHYLDEIIEQISEFSKRVILADANLDKVLSAYNKHRDKPIREQAENIIHLFTLTNLGAPAAFKYFDTTIDRKRYTSTKEVLDATLIHQSITGLYETRIDLSQLGGDGGGGSGGGGGLGIEDEYRLHETSTEPDVSLGSTWLSDFPQAWAETGGMGLAVRQAPLIIPLKATSTPVSIQQYPMSHEARLGIKPHIQRLLDQGILVPCQSPWNTPLLPVKKPGTNDYRPVQDLREVNKRVEDIHPTVPNPYNLLSGLPPSHQWYTVLDLKDAFFCLRLHPTSQPLFAFEWRDPGMGISGQLTWTRLPQGFKNSPTLFNEALHRDLADFRIQHPDLILLQYVDDILLAATSELDCQQGTRALLQTLGDLGYRASAKKAQICQKQVKYLGYLLREGQRWLTEARKETVMGQPVPKTPRQLREFLGKAGFCRLFIPGFAEMAAPLYPLTKPGTLFSWGPDQQKAYQEIKQALLTAPALGLPDLTKPFELFVDEKQGYAKGVLTQKLGPWRRPVAYLSKKLDPVAAGWPPCLRMVAAIAVLTKDAGKLTMGQPLVILAPHAVEALVKQPPDRWLSNARMTHYQAMLLDTDRVQFGPVVALNPATLLPLPEEGAPHDCLEILAETHGTRPDLTDQPIPDADHTWYTDGSSFLQEGQRKAGAAVTTETEVIWAGALPAGTSAQRAELIALTQALKMAEGKRLNVYTDSRYAFATAHIHGEIYRRRGWLTSEGREIKNKSEILALLKALFLPKRLSIIHCLGHQKGDSAEARGNRLADQAAREAAIKTPPDTSTLLIAGKRTADGSEFEKRTADGSEFESPKKKAKVE

SEQ ID NO: 2149 - protein, 2096 aa, synthetic construct
MPAAKRVKLDGGDKKYSIGLDIGTNSVGWAVITDEYKVPSKKFKVLGNTDRHSIKKNLIGALLFDSGETAEATRLKRTARRRYTRRKNRICYLQEIFSNEMAKVDDSFFHRLEESFLVEEDKKHERHPIFGNIVDEVAYHEKYPTIYHLRKKLVDSTDKADLRLIYLALAHMIKFRGHFLIEGDLNPDNSDVDKLFIQLVQTYNQLFEENPINASGVDAKAILSARLSKSRRLENLIAQLPGEKKNGLFGNLIALSLGLTPNFKSNFDLAEDAKLQLSKDTYDDDLDNLLAQIGDQYADLFLAAKNLSDAILLSDILRVNTEITKAPLSASMIKRYDEHHQDLTLLKALVRQQLPEKYKEIFFDQSKNGYAGYIDGGASQEEFYKFIKPILEKMDGTEELLVKLNREDLLRKQRTFDNGSIPHQIHLGELHAILRRQEDFYPFLKDNREKIEKILTFRIPYYVGPLARGNSRFAWMTRKSEETITPWNFEEVVDKGASAQSFIERMTNFDKNLPNEKVLPKHSLLYEYFTVYNELTKVKYVTEGMRKPAFLSGEQKKAIVDLLFKTNRKVTVKQLKEDYFKKIECFDSVEISGVEDRFNASLGTYHDLLKIIKDKDFLDNEENEDILEDIVLTLTLFEDREMIEERLKTYAHLFDDKVMKQLKRRRYTGWGRLSRKLINGIRDKQSGKTILDFLKSDGFANRNFMQLIHDDSLTFKEDIQKAQVSGQGDSLHEHIANLAGSPAIKKGILQTVKVVDELVKVMGRHKPENIVIEMARENQTTQKGQKNSRERMKRIEEGIKELGSQILKEHPVENTQLQNEKLYLYYLQNGRDMYVDQELDINRLSDYDVDHIVPQSFLKDDSIDNKVLTRSDKARGKSDNVPSEEVVKKMKNYWRQLLNAKLITQRKFDNLTKAERGGLSELDKAGFIKRQLVETRQITKHVAQILDSRMNTKYDENDKLIREVKVITLKSKLVSDFRKDFQFYKVREINNYHHAHDAYLNAVVGTALIKKYPKLESEFVYGDYKVYDVRKMIAKSEQEIGKATAKYFFYSNIMNFFKTEITLANGEIRKRPLIETNGETGEIVWDKGRDFATVRKVLSMPQVNIVKKTEVQTGGFSKESILPKRNSDKLIARKKDWDPKKYGGFDSPTVAYSVLVVAKVEKGKSKKLKSVKELLGITIMERSSFEKNPIDFLEAKGYKEVKKDLIIKLPKYSLFELENGRKRMLASAGELQKGNELALPSKYVNFLYLASHYEKLKGSPEDNEQKQLFVEQHKHYLDEIIEQISEFSKRVILADANLDKVLSAYNKHRDKPIREQAENIIHLFTLTNLGAPAAFKYFDTTIDRKRYTSTKEVLDATLIHQSITGLYETRIDLSQLGGDGGGSSPAPEAAAKGGLGIEDEYRLHETSTEPDVSLGSTWLSDFPQAWAETGGMGLAVRQAPLIIPLKATSTPVSIQQYPMSHEARLGIKPHIQRLLDQGILVPCQSPWNTPLLPVKKPGTNDYRPVQDLREVNKRVEDIHPTVPNPYNLLSGLPPSHQWYTVLDLKDAFFCLRLHPTSQPLFAFEWRDPGMGISGQLTWTRLPQGFKNSPTLFNEALHRDLADFRIQHPDLILLQYVDDILLAATSELDCQQGTRALLQTLGDLGYRASAKKAQICQKQVKYLGYLLREGQRWLTEARKETVMGQPVPKTPRQLREFLGKAGFCRLFIPGFAEMAAPLYPLTKPGTLFSWGPDQQKAYQEIKQALLTAPALGLPDLTKPFELFVDEKQGYAKGVLTQKLGPWRRPVAYLSKKLDPVAAGWPPCLRMVAAIAVLTKDAGKLTMGQPLVILAPHAVEALVKQPPDRWLSNARMTHYQAMLLDTDRVQFGPVVALNPATLLPLPEEGAPHDCLEILAETHGTRPDLTDQPIPDADHTWYTDGSSFLQEGQRKAGAAVTTETEVIWAGALPAGTSAQRAELIALTQALKMAEGKRLNVYTDSRYAFATAHIHGEIYRRRGWLTSEGREIKNKSEILALLKALFLPKRLSIIHCLGHQKGDSAEARGNRLADQAAREAAIKTPPDTSTLLIAGKRTADGSEFEKRTADGSEFESPKKKAKVE

SEQ ID NO: 2150 - protein, 2091 aa, synthetic construct; identical to SEQ ID NO: 2057

SEQ ID NO: 2151 - protein, 2094 aa, synthetic construct
MPAAKRVKLDGGDKKYSIGLDIGTNSVGWAVITDEYKVPSKKFKVLGNTDRHSIKKNLIGALLFDSGETAEATRLKRTARRRYTRRKNRICYLQEIFSNEMAKVDDSFFHRLEESFLVEEDKKHERHPIFGNIVDEVAYHEKYPTIYHLRKKLVDSTDKADLRLIYLALAHMIKFRGHFLIEGDLNPDNSDVDKLFIQLVQTYNQLFEENPINASGVDAKAILSARLSKSRRLENLIAQLPGEKKNGLFGNLIALSLGLTPNFKSNFDLAEDAKLQLSKDTYDDDLDNLLAQIGDQYADLFLAAKNLSDAILLSDILRVNTEITKAPLSASMIKRYDEHHQDLTLLKALVRQQLPEKYKEIFFDQSKNGYAGYIDGGASQEEFYKFIKPILEKMDGTEELLVKLNREDLLRKQRTFDNGSIPHQIHLGELHAILRRQEDFYPFLKDNREKIEKILTFRIPYYVGPLARGNSRFAWMTRKSEETITPWNFEEVVDKGASAQSFIERMTNFDKNLPNEKVLPKHSLLYEYFTVYNELTKVKYVTEGMRKPAFLSGEQKKAIVDLLFKTNRKVTVKQLKEDYFKKIECFDSVEISGVEDRFNASLGTYHDLLKIIKDKDFLDNEENEDILEDIVLTLTLFEDREMIEERLKTYAHLFDDKVMKQLKRRRYTGWGRLSRKLINGIRDKQSGKTILDFLKSDGFANRNFMQLIHDDSLTFKEDIQKAQVSGQGDSLHEHIANLAGSPAIKKGILQTVKVVDELVKVMGRHKPENIVIEMARENQTTQKGQKNSRERMKRIEEGIKELGSQILKEHPVENTQLQNEKLYLYYLQNGRDMYVDQELDINRLSDYDVDHIVPQSFLKDDSIDNKVLTRSDKARGKSDNVPSEEVVKKMKNYWRQLLNAKLITQRKFDNLTKAERGGLSELDKAGFIKRQLVETRQITKHVAQILDSRMNTKYDENDKLIREVKVITLKSKLVSDFRKDFQFYKVREINNYHHAHDAYLNAVVGTALIKKYPKLESEFVYGDYKVYDVRKMIAKSEQEIGKATAKYFFYSNIMNFFKTEITLANGEIRKRPLIETNGETGEIVWDKGRDFATVRKVLSMPQVNIVKKTEVQTGGFSKESILPKRNSDKLIARKKDWDPKKYGGFDSPTVAYSVLVVAKVEKGKSKKLKSVKELLGITIMERSSFEKNPIDFLEAKGYKEVKKDLIIKLPKYSLFELENGRKRMLASAGELQKGNELALPSKYVNFLYLASHYEKLKGSPEDNEQKQLFVEQHKHYLDEIIEQISEFSKRVILADANLDKVLSAYNKHRDKPIREQAENIIHLFTLTNLGAPAAFKYFDTTIDRKRYTSTKEVLDATLIHQSITGLYETRIDLSQLGGDGGPAPGGGGGSGGLGIEDEYRLHETSTEPDVSLGSTWLSDFPQAWAETGGMGLAVRQAPLIIPLKATSTPVSIQQYPMSHEARLGIKPHIQRLLDQGILVPCQSPWNTPLLPVKKPGTNDYRPVQDLREVNKRVEDIHPTVPNPYNLLSGLPPSHQWYTVLDLKDAFFCLRLHPTSQPLFAFEWRDPGMGISGQLTWTRLPQGFKNSPTLFNEALHRDLADFRIQHPDLILLQYVDDILLAATSELDCQQGTRALLQTLGDLGYRASAKKAQICQKQVKYLGYLLREGQRWLTEARKETVMGQPVPKTPRQLREFLGKAGFCRLFIPGFAEMAAPLYPLTKPGTLFSWGPDQQKAYQEIKQALLTAPALGLPDLTKPFELFVDEKQGYAKGVLTQKLGPWRRPVAYLSKKLDPVAAGWPPCLRMVAAIAVLTKDAGKLTMGQPLVILAPHAVEALVKQPPDRWLSNARMTHYQAMLLDTDRVQFGPVVALNPATLLPLPEEGAPHDCLEILAETHGTRPDLTDQPIPDADHTWYTDGSSFLQEGQRKAGAAVTTETEVIWAGALPAGTSAQRAELIALTQALKMAEGKRLNVYTDSRYAFATAHIHGEIYRRRGWLTSEGREIKNKSEILALLKALFLPKRLSIIHCLGHQKGDSAEARGNRLADQAAREAAIKTPPDTSTLLIAGKRTADGSEFEKRTADGSEFESPKKKAKVE

SEQ ID NO: 2152 - protein, 2093 aa, synthetic construct
MPAAKRVKLDGGDKKYSIGLDIGTNSVGWAVITDEYKVPSKKFKVLGNTDRHSIKKNLIGALLFDSGETAEATRLKRTARRRYTRRKNRICYLQEIFSNEMAKVDDSFFHRLEESFLVEEDKKHERHPIFGNIVDEVAYHEKYPTIYHLRKKLVDSTDKADLRLIYLALAHMIKFRGHFLIEGDLNPDNSDVDKLFIQLVQTYNQLFEENPINASGVDAKAILSARLSKSRRLENLIAQLPGEKKNGLFGNLIALSLGLTPNFKSNFDLAEDAKLQLSKDTYDDDLDNLLAQIGDQYADLFLAAKNLSDAILLSDILRVNTEITKAPLSASMIKRYDEHHQDLTLLKALVRQQLPEKYKEIFFDQSKNGYAGYIDGGASQEEFYKFIKPILEKMDGTEELLVKLNREDLLRKQRTFDNGSIPHQIHLGELHAILRRQEDFYPFLKDNREKIEKILTFRIPYYVGPLARGNSRFAWMTRKSEETITPWNFEEVVDKGASAQSFIERMTNFDKNLPNEKVLPKHSLLYEYFTVYNELTKVKYVTEGMRKPAFLSGEQKKAIVDLLFKTNRKVTVKQLKEDYFKKIECFDSVEISGVEDRFNASLGTYHDLLKIIKDKDFLDNEENEDILEDIVLTLTLFEDREMIEERLKTYAHLFDDKVMKQLKRRRYTGWGRLSRKLINGIRDKQSGKTILDFLKSDGFANRNFMQLIHDDSLTFKEDIQKAQVSGQGDSLHEHIANLAGSPAIKKGILQTVKVVDELVKVMGRHKPENIVIEMARENQTTQKGQKNSRERMKRIEEGIKELGSQILKEHPVENTQLQNEKLYLYYLQNGRDMYVDQELDINRLSDYDVDHIVPQSFLKDDSIDNKVLTRSDKARGKSDNVPSEEVVKKMKNYWRQLLNAKLITQRKFDNLTKAERGGLSELDKAGFIKRQLVETRQITKHVAQILDSRMNTKYDENDKLIREVKVITLKSKLVSDFRKDFQFYKVREINNYHHAHDAYLNAVVGTALIKKYPKLESEFVYGDYKVYDVRKMIAKSEQEIGKATAKYFFYSNIMNFFKTEITLANGEIRKRPLIETNGETGEIVWDKGRDFATVRKVLSMPQVNIVKKTEVQTGGFSKESILPKRNSDKLIARKKDWDPKKYGGFDSPTVAYSVLVVAKVEKGKSKKLKSVKELLGITIMERSSFEKNPIDFLEAKGYKEVKKDLIIKLPKYSLFELENGRKRMLASAGELQKGNELALPSKYVNFLYLASHYEKLKGSPEDNEQKQLFVEQHKHYLDEIIEQISEFSKRVILADANLDKVLSAYNKHRDKPIREQAENIIHLFTLTNLGAPAAFKYFDTTIDRKRYTSTKEVLDATLIHQSITGLYETRIDLSQLGGDGGEAAAKGGGGGLGIEDEYRLHETSTEPDVSLGSTWLSDFPQAWAETGGMGLAVRQAPLIIPLKATSTPVSIQQYPMSHEARLGIKPHIQRLLDQGILVPCQSPWNTPLLPVKKPGTNDYRPVQDLREVNKRVEDIHPTVPNPYNLLSGLPPSHQWYTVLDLKDAFFCLRLHPTSQPLFAFEWRDPGMGISGQLTWTRLPQGFKNSPTLFNEALHRDLADFRIQHPDLILLQYVDDILLAATSELDCQQGTRALLQTLGDLGYRASAKKAQICQKQVKYLGYLLREGQRWLTEARKETVMGQPVPKTPRQLREFLGKAGFCRLFIPGFAEMAAPLYPLTKPGTLFSWGPDQQKAYQEIKQALLTAPALGLPDLTKPFELFVDEKQGYAKGVLTQKLGPWRRPVAYLSKKLDPVAAGWPPCLRMVAAIAVLTKDAGKLTMGQPLVILAPHAVEALVKQPPDRWLSNARMTHYQAMLLDTDRVQFGPVVALNPATLLPLPEEGAPHDCLEILAETHGTRPDLTDQPIPDADHTWYTDGSSFLQEGQRKAGAAVTTETEVIWAGALPAGTSAQRAELIALTQALKMAEGKRLNVYTDSRYAFATAHIHGEIYRRRGWLTSEGREIKNKSEILALLKALFLPKRLSIIHCLGHQKGDSAEARGNRLADQAAREAAIKTPPDTSTLLIAGKRTADGSEFEKRTADGSEFESPKKKAKVE

SEQ ID NO: 2153 - protein, 2094 aa, synthetic construct
MPAAKRVKLDGGDKKYSIGLDIGTNSVGWAVITDEYKVPSKKFKVLGNTDRHSIKKNLIGALLFDSGETAEATRLKRTARRRYTRRKNRICYLQEIFSNEMAKVDDSFFHRLEESFLVEEDKKHERHPIFGNIVDEVAYHEKYPTIYHLRKKLVDSTDKADLRLIYLALAHMIKFRGHFLIEGDLNPDNSDVDKLFIQLVQTYNQLFEENPINASGVDAKAILSARLSKSRRLENLIAQLPGEKKNGLFGNLIALSLGLTPNFKSNFDLAEDAKLQLSKDTYDDDLDNLLAQIGDQYADLFLAAKNLSDAILLSDILRVNTEITKAPLSASMIKRYDEHHQDLTLLKALVRQQLPEKYKEIFFDQSKNGYAGYIDGGASQEEFYKFIKPILEKMDGTEELLVKLNREDLLRKQRTFDNGSIPHQIHLGELHAILRRQEDFYPFLKDNREKIEKILTFRIPYYVGPLARGNSRFAWMTRKSEETITPWNFEEVVDKGASAQSFIERMTNFDKNLPNEKVLPKHSLLYEYFTVYNELTKVKYVTEGMRKPAFLSGEQKKAIVDLLFKTNRKVTVKQLKEDYFKKIECFDSVEISGVEDRFNASLGTYHDLLKIIKDKDFLDNEENEDILEDIVLTLTLFEDREMIEERLKTYAHLFDDKVMKQLKRRRYTGWGRLSRKLINGIRDKQSGKTILDFLKSDGFANRNFMQLIHDDSLTFKEDIQKAQVSGQGDSLHEHIANLAGSPAIKKGILQTVKVVDELVKVMGRHKPENIVIEMARENQTTQKGQKNSRERMKRIEEGIKELGSQILKEHPVENTQLQNEKLYLYYLQNGRDMYVDQELDINRLSDYDVDHIVPQSFLKDDSIDNKVLTRSDKARGKSDNVPSEEVVKKMKNYWRQLLNAKLITQRKFDNLTKAERGGLSELDKAGFIKRQLVETRQITKHVAQILDSRMNTKYDENDKLIREVKVITLKSKLVSDFRKDFQFYKVREINNYHHAHDAYLNAVVGTALIKKYPKLESEFVYGDYKVYDVRKMIAKSEQEIGKATAKYFFYSNIMNFFKTEITLANGEIRKRPLIETNGETGEIVWDKGRDFATVRKVLSMPQVNIVKKTEVQTGGFSKESILPKRNSDKLIARKKDWDPKKYGGFDSPTVAYSVLVVAKVEKGKSKKLKSVKELLGITIMERSSFEKNPIDFLEAKGYKEVKKDLIIKLPKYSLFELENGRKRMLASAGELQKGNELALPSKYVNFLYLASHYEKLKGSPEDNEQKQLFVEQHKHYLDEIIEQISEFSKRVILADANLDKVLSAYNKHRDKPIREQAENIIHLFTLTNLGAPAAFKYFDTTIDRKRYTSTKEVLDATLIHQSITGLYETRIDLSQLGGDGGPAPGGSGGGGGLGIEDEYRLHETSTEPDVSLGSTWLSDFPQAWAETGGMGLAVRQAPLIIPLKATSTPVSIQQYPMSHEARLGIKPHIQRLLDQGILVPCQSPWNTPLLPVKKPGTNDYRPVQDLREVNKRVEDIHPTVPNPYNLLSGLPPSHQWYTVLDLKDAFFCLRLHPTSQPLFAFEWRDPGMGISGQLTWTRLPQGFKNSPTLFNEALHRDLADFRIQHPDLILLQYVDDILLAATSELDCQQGTRALLQTLGDLGYRASAKKAQICQKQVKYLGYLLREGQRWLTEARKETVMGQPVPKTPRQLREFLGKAGFCRLFIPGFAEMAAPLYPLTKPGTLFSWGPDQQKAYQEIKQALLTAPALGLPDLTKPFELFVDEKQGYAKGVLTQKLGPWRRPVAYLSKKLDPVAAGWPPCLRMVAAIAVLTKDAGKLTMGQPLVILAPHAVEALVKQPPDRWLSNARMTHYQAMLLDTDRVQFGPVVALNPATLLPLPEEGAPHDCLEILAETHGTRPDLTDQPIPDADHTWYTDGSSFLQEGQRKAGAAVTTETEVIWAGALPAGTSAQRAELIALTQALKMAEGKRLNVYTDSRYAFATAHIHGEIYRRRGWLTSEGREIKNKSEILALLKALFLPKRLSIIHCLGHQKGDSAEARGNRLADQAAREAAIKTPPDTSTLLIAGKRTADGSEFEKRTADGSEFESPKKKAKVE

SEQ ID NO: 2154 - protein, 2094 aa, synthetic construct
MPAAKRVKLDGGDKKYSIGLDIGTNSVGWAVITDEYKVPSKKFKVLGNTDRHSIKKNLIGALLFDSGETAEATRLKRTARRRYTRRKNRICYLQEIFSNEMAKVDDSFFHRLEESFLVEEDKKHERHPIFGNIVDEVAYHEKYPTIYHLRKKLVDSTDKADLRLIYLALAHMIKFRGHFLIEGDLNPDNSDVDKLFIQLVQTYNQLFEENPINASGVDAKAILSARLSKSRRLENLIAQLPGEKKNGLFGNLIALSLGLTPNFKSNFDLAEDAKLQLSKDTYDDDLDNLLAQIGDQYADLFLAAKNLSDAILLSDILRVNTEITKAPLSASMIKRYDEHHQDLTLLKALVRQQLPEKYKEIFFDQSKNGYAGYIDGGASQEEFYKFIKPILEKMDGTEELLVKLNREDLLRKQRTFDNGSIPHQIHLGELHAILRRQEDFYPFLKDNREKIEKILTFRIPYYVGPLARGNSRFAWMTRKSEETITPWNFEEVVDKGASAQSFIERMTNFDKNLPNEKVLPKHSLLYEYFTVYNELTKVKYVTEGMRKPAFLSGEQKKAIVDLLFKTNRKVTVKQLKEDYFKKIECFDSVEISGVEDRFNASLGTYHDLLKIIKDKDFLDNEENEDILEDIVLTLTLFEDREMIEERLKTYAHLFDDKVMKQLKRRRYTGWGRLSRKLINGIRDKQSGKTILDFLKSDGFANRNFMQLIHDDSLTFKEDIQKAQVSGQGDSLHEHIANLAGSPAIKKGILQTVKVVDELVKVMGRHKPENIVIEMARENQTTQKGQKNSRERMKRIEEGIKELGSQILKEHPVENTQLQNEKLYLYYLQNGRDMYVDQELDINRLSDYDVDHIVPQSFLKDDSIDNKVLTRSDKARGKSDNVPSEEVVKKMKNYWRQLLNAKLITQRKFDNLTKAERGGLSELDKAGFIKRQLVETRQITKHVAQILDSRMNTKYDENDKLIREVKVITLKSKLVSDFRKDFQFYKVREINNYHHAHDAYLNAVVGTALIKKYPKLESEFVYGDYKVYDVRKMIAKSEQEIGKATAKYFFYSNIMNFFKTEITLANGEIRKRPLIETNGETGEIVWDKGRDFATVRKVLSMPQVNIVKKTEVQTGGFSKESILPKRNSDKLIARKKDWDPKKYGGFDSPTVAYSVLVVAKVEKGKSKKLKSVKELLGITIMERSSFEKNPIDFLEAKGYKEVKKDLIIKLPKYSLFELENGRKRMLASAGELQKGNELALPSKYVNFLYLASHYEKLKGSPEDNEQKQLFVEQHKHYLDEIIEQISEFSKRVILADANLDKVLSAYNKHRDKPIREQAENIIHLFTLTNLGAPAAFKYFDTTIDRKRYTSTKEVLDATLIHQSITGLYETRIDLSQLGGDGGGGGPAPGGSGGLGIEDEYRLHETSTEPDVSLGSTWLSDFPQAWAETGGMGLAVRQAPLIIPLKATSTPVSIQQYPMSHEARLGIKPHIQRLLDQGILVPCQSPWNTPLLPVKKPGTNDYRPVQDLREVNKRVEDIHPTVPNPYNLLSGLPPSHQWYTVLDLKDAFFCLRLHPTSQPLFAFEWRDPGMGISGQLTWTRLPQGFKNSPTLFNEALHRDLADFRIQHPDLILLQYVDDILLAATSELDCQQGTRALLQTLGDLGYRASAKKAQICQKQVKYLGYLLREGQRWLTEARKETVMGQPVPKTPRQLREFLGKAGFCRLFIPGFAEMAAPLYPLTKPGTLFSWGPDQQKAYQEIKQALLTAPALGLPDLTKPFELFVDEKQGYAKGVLTQKLGPWRRPVAYLSKKLDPVAAGWPPCLRMVAAIAVLTKDAGKLTMGQPLVILAPHAVEALVKQPPDRWLSNARMTHYQAMLLDTDRVQFGPVVALNPATLLPLPEEGAPHDCLEILAETHGTRPDLTDQPIPDADHTWYTDGSSFLQEGQRKAGAAVTTETEVIWAGALPAGTSAQRAELIALTQALKMAEGKRLNVYTDSRYAFATAHIHGEIYRRRGWLTSEGREIKNKSEILALLKALFLPKRLSIIHCLGHQKGDSAEARGNRLADQAAREAAIKTPPDTSTLLIAGKRTADGSEFEKRTADGSEFESPKKKAKVE

SEQ ID NO: 2155 - protein, 2097 aa, synthetic construct; identical to SEQ ID NO: 2056

SEQ ID NO: 2156 - protein, 2094 aa, synthetic construct
MPAAKRVKLDGGDKKYSIGLDIGTNSVGWAVITDEYKVPSKKFKVLGNTDRHSIKKNLIGALLFDSGETAEATRLKRTARRRYTRRKNRICYLQEIFSNEMAKVDDSFFHRLEESFLVEEDKKHERHPIFGNIVDEVAYHEKYPTIYHLRKKLVDSTDKADLRLIYLALAHMIKFRGHFLIEGDLNPDNSDVDKLFIQLVQTYNQLFEENPINASGVDAKAILSARLSKSRRLENLIAQLPGEKKNGLFGNLIALSLGLTPNFKSNFDLAEDAKLQLSKDTYDDDLDNLLAQIGDQYADLFLAAKNLSDAILLSDILRVNTEITKAPLSASMIKRYDEHHQDLTLLKALVRQQLPEKYKEIFFDQSKNGYAGYIDGGASQEEFYKFIKPILEKMDGTEELLVKLNREDLLRKQRTFDNGSIPHQIHLGELHAILRRQEDFYPFLKDNREKIEKILTFRIPYYVGPLARGNSRFAWMTRKSEETITPWNFEEVVDKGASAQSFIERMTNFDKNLPNEKVLPKHSLLYEYFTVYNELTKVKYVTEGMRKPAFLSGEQKKAIVDLLFKTNRKVTVKQLKEDYFKKIECFDSVEISGVEDRFNASLGTYHDLLKIIKDKDFLDNEENEDILEDIVLTLTLFEDREMIEERLKTYAHLFDDKVMKQLKRRRYTGWGRLSRKLINGIRDKQSGKTILDFLKSDGFANRNFMQLIHDDSLTFKEDIQKAQVSGQGDSLHEHIANLAGSPAIKKGILQTVKVVDELVKVMGRHKPENIVIEMARENQTTQKGQKNSRERMKRIEEGIKELGSQILKEHPVENTQLQNEKLYLYYLQNGRDMYVDQELDINRLSDYDVDHIVPQSFLKDDSIDNKVLTRSDKARGKSDNVPSEEVVKKMKNYWRQLLNAKLITQRKFDNLTKAERGGLSELDKAGFIKRQLVETRQITKHVAQILDSRMNTKYDENDKLIREVKVITLKSKLVSDFRKDFQFYKVREINNYHHAHDAYLNAVVGTALIKKYPKLESEFVYGDYKVYDVRKMIAKSEQEIGKATAKYFFYSNIMNFFKTEITLANGEIRKRPLIETNGETGEIVWDKGRDFATVRKVLSMPQVNIVKKTEVQTGGFSKESILPKRNSDKLIARKKDWDPKKYGGFDSPTVAYSVLVVAKVEKGKSKKLKSVKELLGITIMERSSFEKNPIDFLEAKGYKEVKKDLIIKLPKYSLFELENGRKRMLASAGELQKGNELALPSKYVNFLYLASHYEKLKGSPEDNEQKQLFVEQHKHYLDEIIEQISEFSKRVILADANLDKVLSAYNKHRDKPIREQAENIIHLFTLTNLGAPAAFKYFDTTIDRKRYTSTKEVLDATLIHQSITGLYETRIDLSQLGGDGGGSSPAPGGSGGLGIEDEYRLHETSTEPDVSLGSTWLSDFPQAWAETGGMGLAVRQAPLIIPLKATSTPVSIQQYPMSHEARLGIKPHIQRLLDQGILVPCQSPWNTPLLPVKKPGTNDYRPVQDLREVNKRVEDIHPTVPNPYNLLSGLPPSHQWYTVLDLKDAFFCLRLHPTSQPLFAFEWRDPGMGISGQLTWTRLPQGFKNSPTLFNEALHRDLADFRIQHPDLILLQYVDDILLAATSELDCQQGTRALLQTLGDLGYRASAKKAQICQKQVKYLGYLLREGQRWLTEARKETVMGQPVPKTPRQLREFLGKAGFCRLFIPGFAEMAAPLYPLTKPGTLFSWGPDQQKAYQEIKQALLTAPALGLPDLTKPFELFVDEKQGYAKGVLTQKLGPWRRPVAYLSKKLDPVAAGWPPCLRMVAAIAVLTKDAGKLTMGQPLVILAPHAVEALVKQPPDRWLSNARMTHYQAMLLDTDRVQFGPVVALNPATLLPLPEEGAPHDCLEILAETHGTRPDLTDQPIPDADHTWYTDGSSFLQEGQRKAGAAVTTETEVIWAGALPAGTSAQRAELIALTQALKMAEGKRLNVYTDSRYAFATAHIHGEIYRRRGWLTSEGREIKNKSEILALLKALFLPKRLSIIHCLGHQKGDSAEARGNRLADQAAREAAIKTPPDTSTLLIAGKRTADGSEFEKRTADGSEFESPKKKAKVE

SEQ ID NO: 2157 - protein, 2095 aa, synthetic construct
MPAAKRVKLDGGDKKYSIGLDIGTNSVGWAVITDEYKVPSKKFKVLGNTDRHSIKKNLIGALLFDSGETAEATRLKRTARRRYTRRKNRICYLQEIFSNEMAKVDDSFFHRLEESFLVEEDKKHERHPIFGNIVDEVAYHEKYPTIYHLRKKLVDSTDKADLRLIYLALAHMIKFRGHFLIEGDLNPDNSDVDKLFIQLVQTYNQLFEENPINASGVDAKAILSARLSKSRRLENLIAQLPGEKKNGLFGNLIALSLGLTPNFKSNFDLAEDAKLQLSKDTYDDDLDNLLAQIGDQYADLFLAAKNLSDAILLSDILRVNTEITKAPLSASMIKRYDEHHQDLTLLKALVRQQLPEKYKEIFFDQSKNGYAGYIDGGASQEEFYKFIKPILEKMDGTEELLVKLNREDLLRKQRTFDNGSIPHQIHLGELHAILRRQEDFYPFLKDNREKIEKILTFRIPYYVGPLARGNSRFAWMTRKSEETITPWNFEEVVDKGASAQSFIERMTNFDKNLPNEKVLPKHSLLYEYFTVYNELTKVKYVTEGMRKPAFLSGEQKKAIVDLLFKTNRKVTVKQLKEDYFKKIECFDSVEISGVEDRFNASLGTYHDLLKIIKDKDFLDNEENEDILEDIVLTLTLFEDREMIEERLKTYAHLFDDKVMKQLKRRRYTGWGRLSRKLINGIRDKQSGKTILDFLKSDGFANRNFMQLIHDDSLTFKEDIQKAQVSGQGDSLHEHIANLAGSPAIKKGILQTVKVVDELVKVMGRHKPENIVIEMARENQTTQKGQKNSRERMKRIEEGIKELGSQILKEHPVENTQLQNEKLYLYYLQNGRDMYVDQELDINRLSDYDVDHIVPQSFLKDDSIDNKVLTRSDKARGKSDNVPSEEVVKKMKNYWRQLLNAKLITQRKFDNLTKAERGGLSELDKAGFIKRQLVETRQITKHVAQILDSRMNTKYDENDKLIREVKVITLKSKLVSDFRKDFQFYKVREINNYHHAHDAYLNAVVGTALIKKYPKLESEFVYGDYKVYDVRKMIAKSEQEIGKATAKYFFYSNIMNFFKTEITLANGEIRKRPLIETNGETGEIVWDKGRDFATVRKVLSMPQVNIVKKTEVQTGGFSKESILPKRNSDKLIARKKDWDPKKYGGFDSPTVAYSVLVVAKVEKGKSKKLKSVKELLGITIMERSSFEKNPIDFLEAKGYKEVKKDLIIKLPKYSLFELENGRKRMLASAGELQKGNELALPSKYVNFLYLASHYEKLKGSPEDNEQKQLFVEQHKHYLDEIIEQISEFSKRVILADANLDKVLSAYNKHRDKPIREQAENIIHLFTLTNLGAPAAFKYFDTTIDRKRYTSTKEVLDATLIHQSITGLYETRIDLSQLGGDGGGGGGSGGGGSGGLGIEDEYRLHETSTEPDVSLGSTWLSDFPQAWAETGGMGLAVRQAPLIIPLKATSTPVSIQQYPMSHEARLGIKPHIQRLLDQGILVPCQSPWNTPLLPVKKPGTNDYRPVQDLREVNKRVEDIHPTVPNPYNLLSGLPPSHQWYTVLDLKDAFFCLRLHPTSQPLFAFEWRDPGMGISGQLTWTRLPQGFKNSPTLFNEALHRDLADFRIQHPDLILLQYVDDILLAATSELDCQQGTRALLQTLGDLGYRASAKKAQICQKQVKYLGYLLREGQRWLTEARKETVMGQPVPKTPRQLREFLGKAGFCRLFIPGFAEMAAPLYPLTKPGTLFSWGPDQQKAYQEIKQALLTAPALGLPDLTKPFELFVDEKQGYAKGVLTQKLGPWRRPVAYLSKKLDPVAAGWPPCLRMVAAIAVLTKDAGKLTMGQPLVILAPHAVEALVKQPPDRWLSNARMTHYQAMLLDTDRVQFGPVVALNPATLLPLPEEGAPHDCLEILAETHGTRPDLTDQPIPDADHTWYTDGSSFLQEGQRKAGAAVTTETEVIWAGALPAGTSAQRAELIALTQALKMAEGKRLNVYTDSRYAFATAHIHGEIYRRRGWLTSEGREIKNKSEILALLKALFLPKRLSIIHCLGHQKGDSAEARGNRLADQAAREAAIKTPPDTSTLLIAGKRTADGSEFEKRTADGSEFESPKKKAKVE

SEQ ID NO: 2158 - protein, 2091 aa, synthetic construct
MPAAKRVKLDGGDKKYSIGLDIGTNSVGWAVITDEYKVPSKKFKVLGNTDRHSIKKNLIGALLFDSGETAEATRLKRTARRRYTRRKNRICYLQEIFSNEMAKVDDSFFHRLEESFLVEEDKKHERHPIFGNIVDEVAYHEKYPTIYHLRKKLVDSTDKADLRLIYLALAHMIKFRGHFLIEGDLNPDNSDVDKLFIQLVQTYNQLFEENPINASGVDAKAILSARLSKSRRLENLIAQLPGEKKNGLFGNLIALSLGLTPNFKSNFDLAEDAKLQLSKDTYDDDLDNLLAQIGDQYADLFLAAKNLSDAILLSDILRVNTEITKAPLSASMIKRYDEHHQDLTLLKALVRQQLPEKYKEIFFDQSKNGYAGYIDGGASQEEFYKFIKPILEKMDGTEELLVKLNREDLLRKQRTFDNGSIPHQIHLGELHAILRRQEDFYPFLKDNREKIEKILTFRIPYYVGPLARGNSRFAWMTRKSEETITPWNFEEVVDKGASAQSFIERMTNFDKNLPNEKVLPKHSLLYEYFTVYNELTKVKYVTEGMRKPAFLSGEQKKAIVDLLFKTNRKVTVKQLKEDYFKKIECFDSVEISGVEDRFNASLGTYHDLLKIIKDKDFLDNEENEDILEDIVLTLTLFEDREMIEERLKTYAHLFDDKVMKQLKRRRYTGWGRLSRKLINGIRDKQSGKTILDFLKSDGFANRNFMQLIHDDSLTFKEDIQKAQVSGQGDSLHEHIANLAGSPAIKKGILQTVKVVDELVKVMGRHKPENIVIEMARENQTTQKGQKNSRERMKRIEEGIKELGSQILKEHPVENTQLQNEKLYLYYLQNGRDMYVDQELDINRLSDYDVDHIVPQSFLKDDSIDNKVLTRSDKARGKSDNVPSEEVVKKMKNYWRQLLNAKLITQRKFDNLTKAERGGLSELDKAGFIKRQLVETRQITKHVAQILDSRMNTKYDENDKLIREVKVITLKSKLVSDFRKDFQFYKVREINNYHHAHDAYLNAVVGTALIKKYPKLESEFVYGDYKVYDVRKMIAKSEQEIGKATAKYFFYSNIMNFFKTEITLANGEIRKRPLIETNGETGEIVWDKGRDFATVRKVLSMPQVNIVKKTEVQTGGFSKESILPKRNSDKLIARKKDWDPKKYGGFDSPTVAYSVLVVAKVEKGKSKKLKSVKELLGITIMERSSFEKNPIDFLEAKGYKEVKKDLIIKLPKYSLFELENGRKRMLASAGELQKGNELALPSKYVNFLYLASHYEKLKGSPEDNEQKQLFVEQHKHYLDEIIEQISEFSKRVILADANLDKVLSAYNKHRDKPIREQAENIIHLFTLTNLGAPAAFKYFDTTIDRKRYTSTKEVLDATLIHQSITGLYETRIDLSQLGGDGGGGSGSSGGLGIEDEYRLHETSTEPDVSLGSTWLSDFPQAWAETGGMGLAVRQAPLIIPLKATSTPVSIQQYPMSHEARLGIKPHIQRLLDQGILVPCQSPWNTPLLPVKKPGTNDYRPVQDLREVNKRVEDIHPTVPNPYNLLSGLPPSHQWYTVLDLKDAFFCLRLHPTSQPLFAFEWRDPGMGISGQLTWTRLPQGFKNSPTLFNEALHRDLADFRIQHPDLILLQYVDDILLAATSELDCQQGTRALLQTLGDLGYRASAKKAQICQKQVKYLGYLLREGQRWLTEARKETVMGQPVPKTPRQLREFLGKAGFCRLFIPGFAEMAAPLYPLTKPGTLFSWGPDQQKAYQEIKQALLTAPALGLPDLTKPFELFVDEKQGYAKGVLTQKLGPWRRPVAYLSKKLDPVAAGWPPCLRMVAAIAVLTKDAGKLTMGQPLVILAPHAVEALVKQPPDRWLSNARMTHYQAMLLDTDRVQFGPVVALNPATLLPLPEEGAPHDCLEILAETHGTRPDLTDQPIPDADHTWYTDGSSFLQEGQRKAGAAVTTETEVIWAGALPAGTSAQRAELIALTQALKMAEGKRLNVYTDSRYAFATAHIHGEIYRRRGWLTSEGREIKNKSEILALLKALFLPKRLSIIHCLGHQKGDSAEARGNRLADQAAREAAIKTPPDTSTLLIAGKRTADGSEFEKRTADGSEFESPKKKAKVE

SEQ ID NO: 2159 - protein, 2096 aa, synthetic construct; identical to SEQ ID NO: 2055

SEQ ID NO: 2160 - protein, 2094 aa, synthetic construct
MPAAKRVKLDGGDKKYSIGLDIGTNSVGWAVITDEYKVPSKKFKVLGNTDRHSIKKNLIGALLFDSGETAEATRLKRTARRRYTRRKNRICYLQEIFSNEMAKVDDSFFHRLEESFLVEEDKKHERHPIFGNIVDEVAYHEKYPTIYHLRKKLVDSTDKADLRLIYLALAHMIKFRGHFLIEGDLNPDNSDVDKLFIQLVQTYNQLFEENPINASGVDAKAILSARLSKSRRLENLIAQLPGEKKNGLFGNLIALSLGLTPNFKSNFDLAEDAKLQLSKDTYDDDLDNLLAQIGDQYADLFLAAKNLSDAILLSDILRVNTEITKAPLSASMIKRYDEHHQDLTLLKALVRQQLPEKYKEIFFDQSKNGYAGYIDGGASQEEFYKFIKPILEKMDGTEELLVKLNREDLLRKQRTFDNGSIPHQIHLGELHAILRRQEDFYPFLKDNREKIEKILTFRIPYYVGPLARGNSRFAWMTRKSEETITPWNFEEVVDKGASAQSFIERMTNFDKNLPNEKVLPKHSLLYEYFTVYNELTKVKYVTEGMRKPAFLSGEQKKAIVDLLFKTNRKVTVKQLKEDYFKKIECFDSVEISGVEDRFNASLGTYHDLLKIIKDKDFLDNEENEDILEDIVLTLTLFEDREMIEERLKTYAHLFDDKVMKQLKRRRYTGWGRLSRKLINGIRDKQSGKTILDFLKSDGFANRNFMQLIHDDSLTFKEDIQKAQVSGQGDSLHEHIANLAGSPAIKKGILQTVKVVDELVKVMGRHKPENIVIEMARENQTTQKGQKNSRERMKRIEEGIKELGSQILKEHPVENTQLQNEKLYLYYLQNGRDMYVDQELDINRLSDYDVDHIVPQSFLKDDSIDNKVLTRSDKARGKSDNVPSEEVVKKMKNYWRQLLNAKLITQRKFDNLTKAERGGLSELDKAGFIKRQLVETRQITKHVAQILDSRMNTKYDENDKLIREVKVITLKSKLVSDFRKDFQFYKVREINNYHHAHDAYLNAVVGTALIKKYPKLESEFVYGDYKVYDVRKMIAKSEQEIGKATAKYFFYSNIMNFFKTEITLANGEIRKRPLIETNGETGEIVWDKGRDFATVRKVLSMPQVNIVKKTEVQTGGFSKESILPKRNSDKLIARKKDWDPKKYGGFDSPTVAYSVLVVAKVEKGKSKKLKSVKELLGITIMERSSFEKNPIDFLEAKGYKEVKKDLIIKLPKYSLFELENGRKRMLASAGELQKGNELALPSKYVNFLYLASHYEKLKGSPEDNEQKQLFVEQHKHYLDEIIEQISEFSKRVILADANLDKVLSAYNKHRDKPIREQAENIIHLFTLTNLGAPAAFKYFDTTIDRKRYTSTKEVLDATLIHQSITGLYETRIDLSQLGGDGGGGGGGSGSSGGLGIEDEYRLHETSTEPDVSLGSTWLSDFPQAWAETGGMGLAVRQAPLIIPLKATSTPVSIQQYPMSHEARLGIKPHIQRLLDQGILVPCQSPWNTPLLPVKKPGTNDYRPVQDLREVNKRVEDIHPTVPNPYNLLSGLPPSHQWYTVLDLKDAFFCLRLHPTSQPLFAFEWRDPGMGISGQLTWTRLPQGFKNSPTLFNEALHRDLADFRIQHPDLILLQYVDDILLAATSELDCQQGTRALLQTLGDLGYRASAKKAQICQKQVKYLGYLLREGQRWLTEARKETVMGQPVPKTPRQLREFLGKAGFCRLFIPGFAEMAAPLYPLTKPGTLFSWGPDQQKAYQEIKQALLTAPALGLPDLTKPFELFVDEKQGYAKGVLTQKLGPWRRPVAYLSKKLDPVAAGWPPCLRMVAAIAVLTKDAGKLTMGQPLVILAPHAVEALVKQPPDRWLSNARMTHYQAMLLDTDRVQFGPVVALNPATLLPLPEEGAPHDCLEILAETHGTRPDLTDQPIPDADHTWYTDGSSFLQEGQRKAGAAVTTETEVIWAGALPAGTSAQRAELIALTQALKMAEGKRLNVYTDSRYAFATAHIHGEIYRRRGWLTSEGREIKNKSEILALLKALFLPKRLSIIHCLGHQKGDSAEARGNRLADQAAREAAIKTPPDTSTLLIAGKRTADGSEFEKRTADGSEFESPKKKAKVE

SEQ ID NO: 2161 - protein, 2096 aa, synthetic construct
MPAAKRVKLDGGDKKYSIGLDIGTNSVGWAVITDEYKVPSKKFKVLGNTDRHSIKKNLIGALLFDSGETAEATRLKRTARRRYTRRKNRICYLQEIFSNEMAKVDDSFFHRLEESFLVEEDKKHERHPIFGNIVDEVAYHEKYPTIYHLRKKLVDSTDKADLRLIYLALAHMIKFRGHFLIEGDLNPDNSDVDKLFIQLVQTYNQLFEENPINASGVDAKAILSARLSKSRRLENLIAQLPGEKKNGLFGNLIALSLGLTPNFKSNFDLAEDAKLQLSKDTYDDDLDNLLAQIGDQYADLFLAAKNLSDAILLSDILRVNTEITKAPLSASMIKRYDEHHQDLTLLKALVRQQLPEKYKEIFFDQSKNGYAGYIDGGASQEEFYKFIKPILEKMDGTEELLVKLNREDLLRKQRTFDNGSIPHQIHLGELHAILRRQEDFYPFLKDNREKIEKILTFRIPYYVGPLARGNSRFAWMTRKSEETITPWNFEEVVDKGASAQSFIERMTNFDKNLPNEKVLPKHSLLYEYFTVYNELTKVKYVTEGMRKPAFLSGEQKKAIVDLLFKTNRKVTVKQLKEDYFKKIECFDSVEISGVEDRFNASLGTYHDLLKIIKDKDFLDNEENEDILEDIVLTLTLFEDREMIEERLKTYAHLFDDKVMKQLKRRRYTGWGRLSRKLINGIRDKQSGKTILDFLKSDGFANRNFMQLIHDDSLTFKEDIQKAQVSGQGDSLHEHIANLAGSPAIKKGILQTVKVVDELVKVMGRHKPENIVIEMARENQTTQKGQKNSRERMKRIEEGIKELGSQILKEHPVENTQLQNEKLYLYYLQNGRDMYVDQELDINRLSDYDVDHIVPQSFLKDDSIDNKVLTRSDKARGKSDNVPSEEVVKKMKNYWRQLLNAKLITQRKFDNLTKAERGGLSELDKAGFIKRQLVETRQITKHVAQILDSRMNTKYDENDKLIREVKVITLKSKLVSDFRKDFQFYKVREINNYHHAHDAYLNAVVGTALIKKYPKLESEFVYGDYKVYDVRKMIAKSEQEIGKATAKYFFYSNIMNFFKTEITLANGEIRKRPLIETNGETGEIVWDKGRDFATVRKVLSMPQVNIVKKTEVQTGGFSKESILPKRNSDKLIARKKDWDPKKYGGFDSPTVAYSVLVVAKVEKGKSKKLKSVKELLGITIMERSSFEKNPIDFLEAKGYKEVKKDLIIKLPKYSLFELENGRKRMLASAGELQKGNELALPSKYVNFLYLASHYEKLKGSPEDNEQKQLFVEQHKHYLDEIIEQISEFSKRVILADANLDKVLSAYNKHRDKPIREQAENIIHLFTLTNLGAPAAFKYFDTTIDRKRYTSTKEVLDATLIHQSITGLYETRIDLSQLGGDGGEAAAKGGGGGSGGLGIEDEYRLHETSTEPDVSLGSTWLSDFPQAWAETGGMGLAVRQAPLIIPLKATSTPVSIQQYPMSHEARLGIKPHIQRLLDQGILVPCQSPWNTPLLPVKKPGTNDYRPVQDLREVNKRVEDIHPTVPNPYNLLSGLPPSHQWYTVLDLKDAFFCLRLHPTSQPLFAFEWRDPGMGISGQLTWTRLPQGFKNSPTLFNEALHRDLADFRIQHPDLILLQYVDDILLAATSELDCQQGTRALLQTLGDLGYRASAKKAQICQKQVKYLGYLLREGQRWLTEARKETVMGQPVPKTPRQLREFLGKAGFCRLFIPGFAEMAAPLYPLTKPGTLFSWGPDQQKAYQEIKQALLTAPALGLPDLTKPFELFVDEKQGYAKGVLTQKLGPWRRPVAYLSKKLDPVAAGWPPCLRMVAAIAVLTKDAGKLTMGQPLVILAPHAVEALVKQPPDRWLSNARMTHYQAMLLDTDRVQFGPVVALNPATLLPLPEEGAPHDCLEILAETHGTRPDLTDQPIPDADHTWYTDGSSFLQEGQRKAGAAVTTETEVIWAGALPAGTSAQRAELIALTQALKMAEGKRLNVYTDSRYAFATAHIHGEIYRRRGWLTSEGREIKNKSEILALLKALFLPKRLSIIHCLGHQKGDSAEARGNRLADQAAREAAIKTPPDTSTLLIAGKRTADGSEFEKRTADGSEFESPKKKAKVE

SEQ ID NO: 2162 - protein, 2091 aa, synthetic construct
MPAAKRVKLDGGDKKYSIGLDIGTNSVGWAVITDEYKVPSKKFKVLGNTDRHSIKKNLIGALLFDSGETAEATRLKRTARRRYTRRKNRICYLQEIFSNEMAKVDDSFFHRLEESFLVEEDKKHERHPIFGNIVDEVAYHEKYPTIYHLRKKLVDSTDKADLRLIYLALAHMIKFRGHFLIEGDLNPDNSDVDKLFIQLVQTYNQLFEENPINASGVDAKAILSARLSKSRRLENLIAQLPGEKKNGLFGNLIALSLGLTPNFKSNFDLAEDAKLQLSKDTYDDDLDNLLAQIGDQYADLFLAAKNLSDAILLSDILRVNTEITKAPLSASMIKRYDEHHQDLTLLKALVRQQLPEKYKEIFFDQSKNGYAGYIDGGASQEEFYKFIKPILEKMDGTEELLVKLNREDLLRKQRTFDNGSIPHQIHLGELHAILRRQEDFYPFLKDNREKIEKILTFRIPYYVGPLARGNSRFAWMTRKSEETITPWNFEEVVDKGASAQSFIERMTNFDKNLPNEKVLPKHSLLYEYFTVYNELTKVKYVTEGMRKPAFLSGEQKKAIVDLLFKTNRKVTVKQLKEDYFKKIECFDSVEISGVEDRFNASLGTYHDLLKIIKDKDFLDNEENEDILEDIVLTLTLFEDREMIEERLKTYAHLFDDKVMKQLKRRRYTGWGRLSRKLINGIRDKQSGKTILDFLKSDGFANRNFMQLIHDDSLTFKEDIQKAQVSGQGDSLHEHIANLAGSPAIKKGILQTVKVVDELVKVMGRHKPENIVIEMARENQTTQKGQKNSRERMKRIEEGIKELGSQILKEHPVENTQLQNEKLYLYYLQNGRDMYVDQELDINRLSDYDVDHIVPQSFLKDDSIDNKVLTRSDKARGKSDNVPSEEVVKKMKNYWRQLLNAKLITQRKFDNLTKAERGGLSELDKAGFIKRQLVETRQITKHVAQILDSRMNTKYDENDKLIREVKVITLKSKLVSDFRKDFQFYKVREINNYHHAHDAYLNAVVGTALIKKYPKLESEFVYGDYKVYDVRKMIAKSEQEIGKATAKYFFYSNIMNFFKTEITLANGEIRKRPLIETNGETGEIVWDKGRDFATVRKVLSMPQVNIVKKTEVQTGGFSKESILPKRNSDKLIARKKDWDPKKYGGFDSPTVAYSVLVVAKVEKGKSKKLKSVKELLGITIMERSSFEKNPIDFLEAKGYKEVKKDLIIKLPKYSLFELENGRKRMLASAGELQKGNELALPSKYVNFLYLASHYEKLKGSPEDNEQKQLFVEQHKHYLDEIIEQISEFSKRVILADANLDKVLSAYNKHRDKPIREQAENIIHLFTLTNLGAPAAFKYFDTTIDRKRYTSTKEVLDATLIHQSITGLYETRIDLSQLGGDGGPAPGGSGGLGIEDEYRLHETSTEPDVSLGSTWLSDFPQAWAETGGMGLAVRQAPLIIPLKATSTPVSIQQYPMSHEARLGIKPHIQRLLDQGILVPCQSPWNTPLLPVKKPGTNDYRPVQDLREVNKRVEDIHPTVPNPYNLLSGLPPSHQWYTVLDLKDAFFCLRLHPTSQPLFAFEWRDPGMGISGQLTWTRLPQGFKNSPTLFNEALHRDLADFRIQHPDLILLQYVDDILLAATSELDCQQGTRALLQTLGDLGYRASAKKAQICQKQVKYLGYLLREGQRWLTEARKETVMGQPVPKTPRQLREFLGKAGFCRLFIPGFAEMAAPLYPLTKPGTLFSWGPDQQKAYQEIKQALLTAPALGLPDLTKPFELFVDEKQGYAKGVLTQKLGPWRRPVAYLSKKLDPVAAGWPPCLRMVAAIAVLTKDAGKLTMGQPLVILAPHAVEALVKQPPDRWLSNARMTHYQAMLLDTDRVQFGPVVALNPATLLPLPEEGAPHDCLEILAETHGTRPDLTDQPIPDADHTWYTDGSSFLQEGQRKAGAAVTTETEVIWAGALPAGTSAQRAELIALTQALKMAEGKRLNVYTDSRYAFATAHIHGEIYRRRGWLTSEGREIKNKSEILALLKALFLPKRLSIIHCLGHQKGDSAEARGNRLADQAAREAAIKTPPDTSTLLIAGKRTADGSEFEKRTADGSEFESPKKKAKVE

SEQ ID NO: 2163 - protein, 2096 aa, synthetic construct
MPAAKRVKLDGGDKKYSIGLDIGTNSVGWAVITDEYKVPSKKFKVLGNTDRHSIKKNLIGALLFDSGETAEATRLKRTARRRYTRRKNRICYLQEIFSNEMAKVDDSFFHRLEESFLVEEDKKHERHPIFGNIVDEVAYHEKYPTIYHLRKKLVDSTDKADLRLIYLALAHMIKFRGHFLIEGDLNPDNSDVDKLFIQLVQTYNQLFEENPINASGVDAKAILSARLSKSRRLENLIAQLPGEKKNGLFGNLIALSLGLTPNFKSNFDLAEDAKLQLSKDTYDDDLDNLLAQIGDQYADLFLAAKNLSDAILLSDILRVNTEITKAPLSASMIKRYDEHHQDLTLLKALVRQQLPEKYKEIFFDQSKNGYAGYIDGGASQEEFYKFIKPILEKMDGTEELLVKLNREDLLRKQRTFDNGSIPHQIHLGELHAILRRQEDFYPFLKDNREKIEKILTFRIPYYVGPLARGNSRFAWMTRKSEETITPWNFEEVVDKGASAQSFIERMTNFDKNLPNEKVLPKHSLLYEYFTVYNELTKVKYVTEGMRKPAFLSGEQKKAIVDLLFKTNRKVTVKQLKEDYFKKIECFDSVEISGVEDRFNASLGTYHDLLKIIKDKDFLDNEENEDILEDIVLTLTLFEDREMIEERLKTYAHLFDDKVMKQLKRRRYTGWGRLSRKLINGIRDKQSGKTILDFLKSDGFANRNFMQLIHDDSLTFKEDIQKAQVSGQGDSLHEHIANLAGSPAIKKGILQTVKVVDELVKVMGRHKPENIVIEMARENQTTQKGQKNSRERMKRIEEGIKELGSQILKEHPVENTQLQNEKLYLYYLQNGRDMYVDQELDINRLSDYDVDHIVPQSFLKDDSIDNKVLTRSDKARGKSDNVPSEEVVKKMKNYWRQLLNAKLITQRKFDNLTKAERGGLSELDKAGFIKRQLVETRQITKHVAQILDSRMNTKYDENDKLIREVKVITLKSKLVSDFRKDFQFYKVREINNYHHAHDAYLNAVVGTALIKKYPKLESEFVYGDYKVYDVRKMIAKSEQEIGKATAKYFFYSNIMNFFKTEITLANGEIRKRPLIETNGETGEIVWDKGRDFATVRKVLSMPQVNIVKKTEVQTGGFSKESILPKRNSDKLIARKKDWDPKKYGGFDSPTVAYSVLVVAKVEKGKSKKLKSVKELLGITIMERSSFEKNPIDFLEAKGYKEVKKDLIIKLPKYSLFELENGRKRMLASAGELQKGNELALPSKYVNFLYLASHYEKLKGSPEDNEQKQLFVEQHKHYLDEIIEQISEFSKRVILADANLDKVLSAYNKHRDKPIREQAENIIHLFTLTNLGAPAAFKYFDTTIDRKRYTSTKEVLDATLIHQSITGLYETRIDLSQLGGDGGEAAAKPAPGSSGGLGIEDEYRLHETSTEPDVSLGSTWLSDFPQAWAETGGMGLAVRQAPLIIPLKATSTPVSIQQYPMSHEARLGIKPHIQRLLDQGILVPCQSPWNTPLLPVKKPGTNDYRPVQDLREVNKRVEDIHPTVPNPYNLLSGLPPSHQWYTVLDLKDAFFCLRLHPTSQPLFAFEWRDPGMGISGQLTWTRLPQGFKNSPTLFNEALHRDLADFRIQHPDLILLQYVDDILLAATSELDCQQGTRALLQTLGDLGYRASAKKAQICQKQVKYLGYLLREGQRWLTEARKETVMGQPVPKTPRQLREFLGKAGFCRLFIPGFAEMAAPLYPLTKPGTLFSWGPDQQKAYQEIKQALLTAPALGLPDLTKPFELFVDEKQGYAKGVLTQKLGPWRRPVAYLSKKLDPVAAGWPPCLRMVAAIAVLTKDAGKLTMGQPLVILAPHAVEALVKQPPDRWLSNARMTHYQAMLLDTDRVQFGPVVALNPATLLPLPEEGAPHDCLEILAETHGTRPDLTDQPIPDADHTWYTDGSSFLQEGQRKAGAAVTTETEVIWAGALPAGTSAQRAELIALTQALKMAEGKRLNVYTDSRYAFATAHIHGEIYRRRGWLTSEGREIKNKSEILALLKALFLPKRLSIIHCLGHQKGDSAEARGNRLADQAAREAAIKTPPDTSTLLIAGKRTADGSEFEKRTADGSEFESPKKKAKVE

SEQ ID NO: 2164 - protein, 2100 aa, synthetic construct
MPAAKRVKLDGGDKKYSIGLDIGTNSVGWAVITDEYKVPSKKFKVLGNTDRHSIKKNLIGALLFDSGETAEATRLKRTARRRYTRRKNRICYLQEIFSNEMAKVDDSFFHRLEESFLVEEDKKHERHPIFGNIVDEVAYHEKYPTIYHLRKKLVDSTDKADLRLIYLALAHMIKFRGHFLIEGDLNPDNSDVDKLFIQLVQTYNQLFEENPINASGVDAKAILSARLSKSRRLENLIAQLPGEKKNGLFGNLIALSLGLTPNFKSNFDLAEDAKLQLSKDTYDDDLDNLLAQIGDQYADLFLAAKNLSDAILLSDILRVNTEITKAPLSASMIKRYDEHHQDLTLLKALVRQQLPEKYKEIFFDQSKNGYAGYIDGGASQEEFYKFIKPILEKMDGTEELLVKLNREDLLRKQRTFDNGSIPHQIHLGELHAILRRQEDFYPFLKDNREKIEKILTFRIPYYVGPLARGNSRFAWMTRKSEETITPWNFEEVVDKGASAQSFIERMTNFDKNLPNEKVLPKHSLLYEYFTVYNELTKVKYVTEGMRKPAFLSGEQKKAIVDLLFKTNRKVTVKQLKEDYFKKIECFDSVEISGVEDRFNASLGTYHDLLKIIKDKDFLDNEENEDILEDIVLTLTLFEDREMIEERLKTYAHLFDDKVMKQLKRRRYTGWGRLSRKLINGIRDKQSGKTILDFLKSDGFANRNFMQLIHDDSLTFKEDIQKAQVSGQGDSLHEHIANLAGSPAIKKGILQTVKVVDELVKVMGRHKPENIVIEMARENQTTQKGQKNSRERMKRIEEGIKELGSQILKEHPVENTQLQNEKLYLYYLQNGRDMYVDQELDINRLSDYDVDHIVPQSFLKDDSIDNKVLTRSDKARGKSDNVPSEEVVKKMKNYWRQLLNAKLITQRKFDNLTKAERGGLSELDKAGFIKRQLVETRQITKHVAQILDSRMNTKYDENDKLIREVKVITLKSKLVSDFRKDFQFYKVREINNYHHAHDAYLNAVVGTALIKKYPKLESEFVYGDYKVYDVRKMIAKSEQEIGKATAKYFFYSNIMNFFKTEITLANGEIRKRPLIETNGETGEIVWDKGRDFATVRKVLSMPQVNIVKKTEVQTGGFSKESILPKRNSDKLIARKKDWDPKKYGGFDSPTVAYSVLVVAKVEKGKSKKLKSVKELLGITIMERSSFEKNPIDFLEAKGYKEVKKDLIIKLPKYSLFELENGRKRMLASAGELQKGNELALPSKYVNFLYLASHYEKLKGSPEDNEQKQLFVEQHKHYLDEIIEQISEFSKRVILADANLDKVLSAYNKHRDKPIREQAENIIHLFTLTNLGAPAAFKYFDTTIDRKRYTSTKEVLDATLIHQSITGLYETRIDLSQLGGDGGGSSGSSGSSGSSGSSGGLGIEDEYRLHETSTEPDVSLGSTWLSDFPQAWAETGGMGLAVRQAPLIIPLKATSTPVSIQQYPMSHEARLGIKPHIQRLLDQGILVPCQSPWNTPLLPVKKPGTNDYRPVQDLREVNKRVEDIHPTVPNPYNLLSGLPPSHQWYTVLDLKDAFFCLRLHPTSQPLFAFEWRDPGMGISGQLTWTRLPQGFKNSPTLFNEALHRDLADFRIQHPDLILLQYVDDILLAATSELDCQQGTRALLQTLGDLGYRASAKKAQICQKQVKYLGYLLREGQRWLTEARKETVMGQPVPKTPRQLREFLGKAGFCRLFIPGFAEMAAPLYPLTKPGTLFSWGPDQQKAYQEIKQALLTAPALGLPDLTKPFELFVDEKQGYAKGVLTQKLGPWRRPVAYLSKKLDPVAAGWPPCLRMVAAIAVLTKDAGKLTMGQPLVILAPHAVEALVKQPPDRWLSNARMTHYQAMLLDTDRVQFGPVVALNPATLLPLPEEGAPHDCLEILAETHGTRPDLTDQPIPDADHTWYTDGSSFLQEGQRKAGAAVTTETEVIWAGALPAGTSAQRAELIALTQALKMAEGKRLNVYTDSRYAFATAHIHGEIYRRRGWLTSEGREIKNKSEILALLKALFLPKRLSIIHCLGHQKGDSAEARGNRLADQAAREAAIKTPPDTSTLLIAGKRTADGSEFEKRTADGSEFESPKKKAKVE

SEQ ID NO: 2165 - protein, 2094 aa, synthetic construct
MPAAKRVKLDGGDKKYSIGLDIGTNSVGWAVITDEYKVPSKKFKVLGNTDRHSIKKNLIGALLFDSGETAEATRLKRTARRRYTRRKNRICYLQEIFSNEMAKVDDSFFHRLEESFLVEEDKKHERHPIFGNIVDEVAYHEKYPTIYHLRKKLVDSTDKADLRLIYLALAHMIKFRGHFLIEGDLNPDNSDVDKLFIQLVQTYNQLFEENPINASGVDAKAILSARLSKSRRLENLIAQLPGEKKNGLFGNLIALSLGLTPNFKSNFDLAEDAKLQLSKDTYDDDLDNLLAQIGDQYADLFLAAKNLSDAILLSDILRVNTEITKAPLSASMIKRYDEHHQDLTLLKALVRQQLPEKYKEIFFDQSKNGYAGYIDGGASQEEFYKFIKPILEKMDGTEELLVKLNREDLLRKQRTFDNGSIPHQIHLGELHAILRRQEDFYPFLKDNREKIEKILTFRIPYYVGPLARGNSRFAWMTRKSEETITPWNFEEVVDKGASAQSFIERMTNFDKNLPNEKVLPKHSLLYEYFTVYNELTKVKYVTEGMRKPAFLSGEQKKAIVDLLFKTNRKVTVKQLKEDYFKKIECFDSVEISGVEDRFNASLGTYHDLLKIIKDKDFLDNEENEDILEDIVLTLTLFEDREMIEERLKTYAHLFDDKVMKQLKRRRYTGWGRLSRKLINGIRDKQSGKTILDFLKSDGFANRNFMQLIHDDSLTFKEDIQKAQVSGQGDSLHEHIANLAGSPAIKKGILQTVKVVDELVKVMGRHKPENIVIEMARENQTTQKGQKNSRERMKRIEEGIKELGSQILKEHPVENTQLQNEKLYLYYLQNGRDMYVDQELDINRLSDYDVDHIVPQSFLKDDSIDNKVLTRSDKARGKSDNVPSEEVVKKMKNYWRQLLNAKLITQRKFDNLTKAERGGLSELDKAGFIKRQLVETRQITKHVAQILDSRMNTKYDENDKLIREVKVITLKSKLVSDFRKDFQFYKVREINNYHHAHDAYLNAVVGTALIKKYPKLESEFVYGDYKVYDVRKMIAKSEQEIGKATAKYFFYSNIMNFFKTEITLANGEIRKRPLIETNGETGEIVWDKGRDFATVRKVLSMPQVNIVKKTEVQTGGFSKESILPKRNSDKLIARKKDWDPKKYGGFDSPTVAYSVLVVAKVEKGKSKKLKSVKELLGITIMERSSFEKNPIDFLEAKGYKEVKKDLIIKLPKYSLFELENGRKRMLASAGELQKGNELALPSKYVNFLYLASHYEKLKGSPEDNEQKQLFVEQHKHYLDEIIEQISEFSKRVILADANLDKVLSAYNKHRDKPIREQAENIIHLFTLTNLGAPAAFKYFDTTIDRKRYTSTKEVLDATLIHQSITGLYETRIDLSQLGGDGGGSSGGSGGGGGLGIEDEYRLHETSTEPDVSLGSTWLSDFPQAWAETGGMGLAVRQAPLIIPLKATSTPVSIQQYPMSHEARLGIKPHIQRLLDQGILVPCQSPWNTPLLPVKKPGTNDYRPVQDLREVNKRVEDIHPTVPNPYNLLSGLPPSHQWYTVLDLKDAFFCLRLHPTSQPLFAFEWRDPGMGISGQLTWTRLPQGFKNSPTLFNEALHRDLADFRIQHPDLILLQYVDDILLAATSELDCQQGTRALLQTLGDLGYRASAKKAQICQKQVKYLGYLLREGQRWLTEARKETVMGQPVPKTPRQLREFLGKAGFCRLFIPGFAEMAAPLYPLTKPGTLFSWGPDQQKAYQEIKQALLTAPALGLPDLTKPFELFVDEKQGYAKGVLTQKLGPWRRPVAYLSKKLDPVAAGWPPCLRMVAAIAVLTKDAGKLTMGQPLVILAPHAVEALVKQPPDRWLSNARMTHYQAMLLDTDRVQFGPVVALNPATLLPLPEEGAPHDCLEILAETHGTRPDLTDQPIPDADHTWYTDGSSFLQEGQRKAGAAVTTETEVIWAGALPAGTSAQRAELIALTQALKMAEGKRLNVYTDSRYAFATAHIHGEIYRRRGWLTSEGREIKNKSEILALLKALFLPKRLSIIHCLGHQKGDSAEARGNRLADQAAREAAIKTPPDTSTLLIAGKRTADGSEFEKRTADGSEFESPKKKAKVE

SEQ ID NO: 2166 - protein, 2094 aa, synthetic construct; identical to SEQ ID NO: 2051

SEQ ID NO: 2167 - protein, 2092 aa, synthetic construct
MPAAKRVKLDGGDKKYSIGLDIGTNSVGWAVITDEYKVPSKKFKVLGNTDRHSIKKNLIGALLFDSGETAEATRLKRTARRRYTRRKNRICYLQEIFSNEMAKVDDSFFHRLEESFLVEEDKKHERHPIFGNIVDEVAYHEKYPTIYHLRKKLVDSTDKADLRLIYLALAHMIKFRGHFLIEGDLNPDNSDVDKLFIQLVQTYNQLFEENPINASGVDAKAILSARLSKSRRLENLIAQLPGEKKNGLFGNLIALSLGLTPNFKSNFDLAEDAKLQLSKDTYDDDLDNLLAQIGDQYADLFLAAKNLSDAILLSDILRVNTEITKAPLSASMIKRYDEHHQDLTLLKALVRQQLPEKYKEIFFDQSKNGYAGYIDGGASQEEFYKFIKPILEKMDGTEELLVKLNREDLLRKQRTFDNGSIPHQIHLGELHAILRRQEDFYPFLKDNREKIEKILTFRIPYYVGPLARGNSRFAWMTRKSEETITPWNFEEVVDKGASAQSFIERMTNFDKNLPNEKVLPKHSLLYEYFTVYNELTKVKYVTEGMRKPAFLSGEQKKAIVDLLFKTNRKVTVKQLKEDYFKKIECFDSVEISGVEDRFNASLGTYHDLLKIIKDKDFLDNEENEDILEDIVLTLTLFEDREMIEERLKTYAHLFDDKVMKQLKRRRYTGWGRLSRKLINGIRDKQSGKTILDFLKSDGFANRNFMQLIHDDSLTFKEDIQKAQVSGQGDSLHEHIANLAGSPAIKKGILQTVKVVDELVKVMGRHKPENIVIEMARENQTTQKGQKNSRERMKRIEEGIKELGSQILKEHPVENTQLQNEKLYLYYLQNGRDMYVDQELDINRLSDYDVDHIVPQSFLKDDSIDNKVLTRSDKARGKSDNVPSEEVVKKMKNYWRQLLNAKLITQRKFDNLTKAERGGLSELDKAGFIKRQLVETRQITKHVAQILDSRMNTKYDENDKLIREVKVITLKSKLVSDFRKDFQFYKVREINNYHHAHDAYLNAVVGTALIKKYPKLESEFVYGDYKVYDVRKMIAKSEQEIGKATAKYFFYSNIMNFFKTEITLANGEIRKRPLIETNGETGEIVWDKGRDFATVRKVLSMPQVNIVKKTEVQTGGFSKESILPKRNSDKLIARKKDWDPKKYGGFDSPTVAYSVLVVAKVEKGKSKKLKSVKELLGITIMERSSFEKNPIDFLEAKGYKEVKKDLIIKLPKYSLFELENGRKRMLASAGELQKGNELALPSKYVNFLYLASHYEKLKGSPEDNEQKQLFVEQHKHYLDEIIEQISEFSKRVILADANLDKVLSAYNKHRDKPIREQAENIIHLFTLTNLGAPAAFKYFDTTIDRKRYTSTKEVLDATLIHQSITGLYETRIDLSQLGGDGGPAPAPAPGGLGIEDEYRLHETSTEPDVSLGSTWLSDFPQAWAETGGMGLAVRQAPLIIPLKATSTPVSIQQYPMSHEARLGIKPHIQRLLDQGILVPCQSPWNTPLLPVKKPGTNDYRPVQDLREVNKRVEDIHPTVPNPYNLLSGLPPSHQWYTVLDLKDAFFCLRLHPTSQPLFAFEWRDPGMGISGQLTWTRLPQGFKNSPTLFNEALHRDLADFRIQHPDLILLQYVDDILLAATSELDCQQGTRALLQTLGDLGYRASAKKAQICQKQVKYLGYLLREGQRWLTEARKETVMGQPVPKTPRQLREFLGKAGFCRLFIPGFAEMAAPLYPLTKPGTLFSWGPDQQKAYQEIKQALLTAPALGLPDLTKPFELFVDEKQGYAKGVLTQKLGPWRRPVAYLSKKLDPVAAGWPPCLRMVAAIAVLTKDAGKLTMGQPLVILAPHAVEALVKQPPDRWLSNARMTHYQAMLLDTDRVQFGPVVALNPATLLPLPEEGAPHDCLEILAETHGTRPDLTDQPIPDADHTWYTDGSSFLQEGQRKAGAAVTTETEVIWAGALPAGTSAQRAELIALTQALKMAEGKRLNVYTDSRYAFATAHIHGEIYRRRGWLTSEGREIKNKSEILALLKALFLPKRLSIIHCLGHQKGDSAEARGNRLADQAAREAAIKTPPDTSTLLIAGKRTADGSEFEKRTADGSEFESPKKKAKVE

SEQ ID NO: 2168 - protein, 2096 aa, synthetic construct
MPAAKRVKLDGGDKKYSIGLDIGTNSVGWAVITDEYKVPSKKFKVLGNTDRHSIKKNLIGALLFDSGETAEATRLKRTARRRYTRRKNRICYLQEIFSNEMAKVDDSFFHRLEESFLVEEDKKHERHPIFGNIVDEVAYHEKYPTIYHLRKKLVDSTDKADLRLIYLALAHMIKFRGHFLIEGDLNPDNSDVDKLFIQLVQTYNQLFEENPINASGVDAKAILSARLSKSRRLENLIAQLPGEKKNGLFGNLIALSLGLTPNFKSNFDLAEDAKLQLSKDTYDDDLDNLLAQIGDQYADLFLAAKNLSDAILLSDILRVNTEITKAPLSASMIKRYDEHHQDLTLLKALVRQQLPEKYKEIFFDQSKNGYAGYIDGGASQEEFYKFIKPILEKMDGTEELLVKLNREDLLRKQRTFDNGSIPHQIHLGELHAILRRQEDFYPFLKDNREKIEKILTFRIPYYVGPLARGNSRFAWMTRKSEETITPWNFEEVVDKGASAQSFIERMTNFDKNLPNEKVLPKHSLLYEYFTVYNELTKVKYVTEGMRKPAFLSGEQKKAIVDLLFKTNRKVTVKQLKEDYFKKIECFDSVEISGVEDRFNASLGTYHDLLKIIKDKDFLDNEENEDILEDIVLTLTLFEDREMIEERLKTYAHLFDDKVMKQLKRRRYTGWGRLSRKLINGIRDKQSGKTILDFLKSDGFANRNFMQLIHDDSLTFKEDIQKAQVSGQGDSLHEHIANLAGSPAIKKGILQTVKVVDELVKVMGRHKPENIVIEMARENQTTQKGQKNSRERMKRIEEGIKELGSQILKEHPVENTQLQNEKLYLYYLQNGRDMYVDQELDINRLSDYDVDHIVPQSFLKDDSIDNKVLTRSDKARGKSDNVPSEEVVKKMKNYWRQLLNAKLITQRKFDNLTKAERGGLSELDKAGFIKRQLVETRQITKHVAQILDSRMNTKYDENDKLIREVKVITLKSKLVSDFRKDFQFYKVREINNYHHAHDAYLNAVVGTALIKKYPKLESEFVYGDYKVYDVRKMIAKSEQEIGKATAKYFFYSNIMNFFKTEITLANGEIRKRPLIETNGETGEIVWDKGRDFATVRKVLSMPQVNIVKKTEVQTGGFSKESILPKRNSDKLIARKKDWDPKKYGGFDSPTVAYSVLVVAKVEKGKSKKLKSVKELLGITIMERSSFEKNPIDFLEAKGYKEVKKDLIIKLPKYSLFELENGRKRMLASAGELQKGNELALPSKYVNFLYLASHYEKLKGSPEDNEQKQLFVEQHKHYLDEIIEQISEFSKRVILADANLDKVLSAYNKHRDKPIREQAENIIHLFTLTNLGAPAAFKYFDTTIDRKRYTSTKEVLDATLIHQSITGLYETRIDLSQLGGDGGGGSEAAAKGSSGGLGIEDEYRLHETSTEPDVSLGSTWLSDFPQAWAETGGMGLAVRQAPLIIPLKATSTPVSIQQYPMSHEARLGIKPHIQRLLDQGILVPCQSPWNTPLLPVKKPGTNDYRPVQDLREVNKRVEDIHPTVPNPYNLLSGLPPSHQWYTVLDLKDAFFCLRLHPTSQPLFAFEWRDPGMGISGQLTWTRLPQGFKNSPTLFNEALHRDLADFRIQHPDLILLQYVDDILLAATSELDCQQGTRALLQTLGDLGYRASAKKAQICQKQVKYLGYLLREGQRWLTEARKETVMGQPVPKTPRQLREFLGKAGFCRLFIPGFAEMAAPLYPLTKPGTLFSWGPDQQKAYQEIKQALLTAPALGLPDLTKPFELFVDEKQGYAKGVLTQKLGPWRRPVAYLSKKLDPVAAGWPPCLRMVAAIAVLTKDAGKLTMGQPLVILAPHAVEALVKQPPDRWLSNARMTHYQAMLLDTDRVQFGPVVALNPATLLPLPEEGAPHDCLEILAETHGTRPDLTDQPIPDADHTWYTDGSSFLQEGQRKAGAAVTTETEVIWAGALPAGTSAQRAELIALTQALKMAEGKRLNVYTDSRYAFATAHIHGEIYRRRGWLTSEGREIKNKSEILALLKALFLPKRLSIIHCLGHQKGDSAEARGNRLADQAAREAAIKTPPDTSTLLIAGKRTADGSEFEKRTADGSEFESPKKKAKVE

SEQ ID NO: 2169 - protein, 2090 aa, synthetic construct
MPAAKRVKLDGGDKKYSIGLDIGTNSVGWAVITDEYKVPSKKFKVLGNTDRHSIKKNLIGALLFDSGETAEATRLKRTARRRYTRRKNRICYLQEIFSNEMAKVDDSFFHRLEESFLVEEDKKHERHPIFGNIVDEVAYHEKYPTIYHLRKKLVDSTDKADLRLIYLALAHMIKFRGHFLIEGDLNPDNSDVDKLFIQLVQTYNQLFEENPINASGVDAKAILSARLSKSRRLENLIAQLPGEKKNGLFGNLIALSLGLTPNFKSNFDLAEDAKLQLSKDTYDDDLDNLLAQIGDQYADLFLAAKNLSDAILLSDILRVNTEITKAPLSASMIKRYDEHHQDLTLLKALVRQQLPEKYKEIFFDQSKNGYAGYIDGGASQEEFYKFIKPILEKMDGTEELLVKLNREDLLRKQRTFDNGSIPHQIHLGELHAILRRQEDFYPFLKDNREKIEKILTFRIPYYVGPLARGNSRFAWMTRKSEETITPWNFEEVVDKGASAQSFIERMTNFDKNLPNEKVLPKHSLLYEYFTVYNELTKVKYVTEGMRKPAFLSGEQKKAIVDLLFKTNRKVTVKQLKEDYFKKIECFDSVEISGVEDRFNASLGTYHDLLKIIKDKDFLDNEENEDILEDIVLTLTLFEDREMIEERLKTYAHLFDDKVMKQLKRRRYTGWGRLSRKLINGIRDKQSGKTILDFLKSDGFANRNFMQLIHDDSLTFKEDIQKAQVSGQGDSLHEHIANLAGSPAIKKGILQTVKVVDELVKVMGRHKPENIVIEMARENQTTQKGQKNSRERMKRIEEGIKELGSQILKEHPVENTQLQNEKLYLYYLQNGRDMYVDQELDINRLSDYDVDHIVPQSFLKDDSIDNKVLTRSDKARGKSDNVPSEEVVKKMKNYWRQLLNAKLITQRKFDNLTKAERGGLSELDKAGFIKRQLVETRQITKHVAQILDSRMNTKYDENDKLIREVKVITLKSKLVSDFRKDFQFYKVREINNYHHAHDAYLNAVVGTALIKKYPKLESEFVYGDYKVYDVRKMIAKSEQEIGKATAKYFFYSNIMNFFKTEITLANGEIRKRPLIETNGETGEIVWDKGRDFATVRKVLSMPQVNIVKKTEVQTGGFSKESILPKRNSDKLIARKKDWDPKKYGGFDSPTVAYSVLVVAKVEKGKSKKLKSVKELLGITIMERSSFEKNPIDFLEAKGYKEVKKDLIIKLPKYSLFELENGRKRMLASAGELQKGNELALPSKYVNFLYLASHYEKLKGSPEDNEQKQLFVEQHKHYLDEIIEQISEFSKRVILADANLDKVLSAYNKHRDKPIREQAENIIHLFTLTNLGAPAAFKYFDTTIDRKRYTSTKEVLDATLIHQSITGLYETRIDLSQLGGDGGGGGGGGGLGIEDEYRLHETSTEPDVSLGSTWLSDFPQAWAETGGMGLAVRQAPLIIPLKATSTPVSIQQYPMSHEARLGIKPHIQRLLDQGILVPCQSPWNTPLLPVKKPGTNDYRPVQDLREVNKRVEDIHPTVPNPYNLLSGLPPSHQWYTVLDLKDAFFCLRLHPTSQPLFAFEWRDPGMGISGQLTWTRLPQGFKNSPTLFNEALHRDLADFRIQHPDLILLQYVDDILLAATSELDCQQGTRALLQTLGDLGYRASAKKAQICQKQVKYLGYLLREGQRWLTEARKETVMGQPVPKTPRQLREFLGKAGFCRLFIPGFAEMAAPLYPLTKPGTLFSWGPDQQKAYQEIKQALLTAPALGLPDLTKPFELFVDEKQGYAKGVLTQKLGPWRRPVAYLSKKLDPVAAGWPPCLRMVAAIAVLTKDAGKLTMGQPLVILAPHAVEALVKQPPDRWLSNARMTHYQAMLLDTDRVQFGPVVALNPATLLPLPEEGAPHDCLEILAETHGTRPDLTDQPIPDADHTWYTDGSSFLQEGQRKAGAAVTTETEVIWAGALPAGTSAQRAELIALTQALKMAEGKRLNVYTDSRYAFATAHIHGEIYRRRGWLTSEGREIKNKSEILALLKALFLPKRLSIIHCLGHQKGDSAEARGNRLADQAAREAAIKTPPDTSTLLIAGKRTADGSEFEKRTADGSEFESPKKKAKVE

SEQ ID NO: 2170 - protein, 2091 aa, synthetic construct
MPAAKRVKLDGGDKKYSIGLDIGTNSVGWAVITDEYKVPSKKFKVLGNTDRHSIKKNLIGALLFDSGETAEATRLKRTARRRYTRRKNRICYLQEIFSNEMAKVDDSFFHRLEESFLVEEDKKHERHPIFGNIVDEVAYHEKYPTIYHLRKKLVDSTDKADLRLIYLALAHMIKFRGHFLIEGDLNPDNSDVDKLFIQLVQTYNQLFEENPINASGVDAKAILSARLSKSRRLENLIAQLPGEKKNGLFGNLIALSLGLTPNFKSNFDLAEDAKLQLSKDTYDDDLDNLLAQIGDQYADLFLAAKNLSDAILLSDILRVNTEITKAPLSASMIKRYDEHHQDLTLLKALVRQQLPEKYKEIFFDQSKNGYAGYIDGGASQEEFYKFIKPILEKMDGTEELLVKLNREDLLRKQRTFDNGSIPHQIHLGELHAILRRQEDFYPFLKDNREKIEKILTFRIPYYVGPLARGNSRFAWMTRKSEETITPWNFEEVVDKGASAQSFIERMTNFDKNLPNEKVLPKHSLLYEYFTVYNELTKVKYVTEGMRKPAFLSGEQKKAIVDLLFKTNRKVTVKQLKEDYFKKIECFDSVEISGVEDRFNASLGTYHDLLKIIKDKDFLDNEENEDILEDIVLTLTLFEDREMIEERLKTYAHLFDDKVMKQLKRRRYTGWGRLSRKLINGIRDKQSGKTILDFLKSDGFANRNFMQLIHDDSLTFKEDIQKAQVSGQGDSLHEHIANLAGSPAIKKGILQTVKVVDELVKVMGRHKPENIVIEMARENQTTQKGQKNSRERMKRIEEGIKELGSQILKEHPVENTQLQNEKLYLYYLQNGRDMYVDQELDINRLSDYDVDHIVPQSFLKDDSIDNKVLTRSDKARGKSDNVPSEEVVKKMKNYWRQLLNAKLITQRKFDNLTKAERGGLSELDKAGFIKRQLVETRQITKHVAQILDSRMNTKYDENDKLIREVKVITLKSKLVSDFRKDFQFYKVREINNYHHAHDAYLNAVVGTALIKKYPKLESEFVYGDYKVYDVRKMIAKSEQEIGKATAKYFFYSNIMNFFKTEITLANGEIRKRPLIETNGETGEIVWDKGRDFATVRKVLSMPQVNIVKKTEVQTGGFSKESILPKRNSDKLIARKKDWDPKKYGGFDSPTVAYSVLVVAKVEKGKSKKLKSVKELLGITIMERSSFEKNPIDFLEAKGYKEVKKDLIIKLPKYSLFELENGRKRMLASAGELQKGNELALPSKYVNFLYLASHYEKLKGSPEDNEQKQLFVEQHKHYLDEIIEQISEFSKRVILADANLDKVLSAYNKHRDKPIREQAENIIHLFTLTNLGAPAAFKYFDTTIDRKRYTSTKEVLDATLIHQSITGLYETRIDLSQLGGDGGGSSGGGGGLGIEDEYRLHETSTEPDVSLGSTWLSDFPQAWAETGGMGLAVRQAPLIIPLKATSTPVSIQQYPMSHEARLGIKPHIQRLLDQGILVPCQSPWNTPLLPVKKPGTNDYRPVQDLREVNKRVEDIHPTVPNPYNLLSGLPPSHQWYTVLDLKDAFFCLRLHPTSQPLFAFEWRDPGMGISGQLTWTRLPQGFKNSPTLFNEALHRDLADFRIQHPDLILLQYVDDILLAATSELDCQQGTRALLQTLGDLGYRASAKKAQICQKQVKYLGYLLREGQRWLTEARKETVMGQPVPKTPRQLREFLGKAGFCRLFIPGFAEMAAPLYPLTKPGTLFSWGPDQQKAYQEIKQALLTAPALGLPDLTKPFELFVDEKQGYAKGVLTQKLGPWRRPVAYLSKKLDPVAAGWPPCLRMVAAIAVLTKDAGKLTMGQPLVILAPHAVEALVKQPPDRWLSNARMTHYQAMLLDTDRVQFGPVVALNPATLLPLPEEGAPHDCLEILAETHGTRPDLTDQPIPDADHTWYTDGSSFLQEGQRKAGAAVTTETEVIWAGALPAGTSAQRAELIALTQALKMAEGKRLNVYTDSRYAFATAHIHGEIYRRRGWLTSEGREIKNKSEILALLKALFLPKRLSIIHCLGHQKGDSAEARGNRLADQAAREAAIKTPPDTSTLLIAGKRTADGSEFEKRTADGSEFESPKKKAKVE

SEQ ID NO: 2171 - protein, 2091 aa, synthetic construct
MPAAKRVKLDGGDKKYSIGLDIGTNSVGWAVITDEYKVPSKKFKVLGNTDRHSIKKNLIGALLFDSGETAEATRLKRTARRRYTRRKNRICYLQEIFSNEMAKVDDSFFHRLEESFLVEEDKKHERHPIFGNIVDEVAYHEKYPTIYHLRKKLVDSTDKADLRLIYLALAHMIKFRGHFLIEGDLNPDNSDVDKLFIQLVQTYNQLFEENPINASGVDAKAILSARLSKSRRLENLIAQLPGEKKNGLFGNLIALSLGLTPNFKSNFDLAEDAKLQLSKDTYDDDLDNLLAQIGDQYADLFLAAKNLSDAILLSDILRVNTEITKAPLSASMIKRYDEHHQDLTLLKALVRQQLPEKYKEIFFDQSKNGYAGYIDGGASQEEFYKFIKPILEKMDGTEELLVKLNREDLLRKQRTFDNGSIPHQIHLGELHAILRRQEDFYPFLKDNREKIEKILTFRIPYYVGPLARGNSRFAWMTRKSEETITPWNFEEVVDKGASAQSFIERMTNFDKNLPNEKVLPKHSLLYEYFTVYNELTKVKYVTEGMRKPAFLSGEQKKAIVDLLFKTNRKVTVKQLKEDYFKKIECFDSVEISGVEDRFNASLGTYHDLLKIIKDKDFLDNEENEDILEDIVLTLTLFEDREMIEERLKTYAHLFDDKVMKQLKRRRYTGWGRLSRKLINGIRDKQSGKTILDFLKSDGFANRNFMQLIHDDSLTFKEDIQKAQVSGQGDSLHEHIANLAGSPAIKKGILQTVKVVDELVKVMGRHKPENIVIEMARENQTTQKGQKNSRERMKRIEEGIKELGSQILKEHPVENTQLQNEKLYLYYLQNGRDMYVDQELDINRLSDYDVDHIVPQSFLKDDSIDNKVLTRSDKARGKSDNVPSEEVVKKMKNYWRQLLNAKLITQRKFDNLTKAERGGLSELDKAGFIKRQLVETRQITKHVAQILDSRMNTKYDENDKLIREVKVITLKSKLVSDFRKDFQFYKVREINNYHHAHDAYLNAVVGTALIKKYPKLESEFVYGDYKVYDVRKMIAKSEQEIGKATAKYFFYSNIMNFFKTEITLANGEIRKRPLIETNGETGEIVWDKGRDFATVRKVLSMPQVNIVKKTEVQTGGFSKESILPKRNSDKLIARKKDWDPKKYGGFDSPTVAYSVLVVAKVEKGKSKKLKSVKELLGITIMERSSFEKNPIDFLEAKGYKEVKKDLIIKLPKYSLFELENGRKRMLASAGELQKGNELALPSKYVNFLYLASHYEKLKGSPEDNEQKQLFVEQHKHYLDEIIEQISEFSKRVILADANLDKVLSAYNKHRDKPIREQAENIIHLFTLTNLGAPAAFKYFDTTIDRKRYTSTKEVLDATLIHQSITGLYETRIDLSQLGGDGGGSSGGSGGLGIEDEYRLHETSTEPDVSLGSTWLSDFPQAWAETGGMGLAVRQAPLIIPLKATSTPVSIQQYPMSHEARLGIKPHIQRLLDQGILVPCQSPWNTPLLPVKKPGTNDYRPVQDLREVNKRVEDIHPTVPNPYNLLSGLPPSHQWYTVLDLKDAFFCLRLHPTSQPLFAFEWRDPGMGISGQLTWTRLPQGFKNSPTLFNEALHRDLADFRIQHPDLILLQYVDDILLAATSELDCQQGTRALLQTLGDLGYRASAKKAQICQKQVKYLGYLLREGQRWLTEARKETVMGQPVPKTPRQLREFLGKAGFCRLFIPGFAEMAAPLYPLTKPGTLFSWGPDQQKAYQEIKQALLTAPALGLPDLTKPFELFVDEKQGYAKGVLTQKLGPWRRPVAYLSKKLDPVAAGWPPCLRMVAAIAVLTKDAGKLTMGQPLVILAPHAVEALVKQPPDRWLSNARMTHYQAMLLDTDRVQFGPVVALNPATLLPLPEEGAPHDCLEILAETHGTRPDLTDQPIPDADHTWYTDGSSFLQEGQRKAGAAVTTETEVIWAGALPAGTSAQRAELIALTQALKMAEGKRLNVYTDSRYAFATAHIHGEIYRRRGWLTSEGREIKNKSEILALLKALFLPKRLSIIHCLGHQKGDSAEARGNRLADQAAREAAIKTPPDTSTLLIAGKRTADGSEFEKRTADGSEFESPKKKAKVE

SEQ ID NO: 2172 - protein, 2094 aa, synthetic construct
MPAAKRVKLDGGDKKYSIGLDIGTNSVGWAVITDEYKVPSKKFKVLGNTDRHSIKKNLIGALLFDSGETAEATRLKRTARRRYTRRKNRICYLQEIFSNEMAKVDDSFFHRLEESFLVEEDKKHERHPIFGNIVDEVAYHEKYPTIYHLRKKLVDSTDKADLRLIYLALAHMIKFRGHFLIEGDLNPDNSDVDKLFIQLVQTYNQLFEENPINASGVDAKAILSARLSKSRRLENLIAQLPGEKKNGLFGNLIALSLGLTPNFKSNFDLAEDAKLQLSKDTYDDDLDNLLAQIGDQYADLFLAAKNLSDAILLSDILRVNTEITKAPLSASMIKRYDEHHQDLTLLKALVRQQLPEKYKEIFFDQSKNGYAGYIDGGASQEEFYKFIKPILEKMDGTEELLVKLNREDLLRKQRTFDNGSIPHQIHLGELHAILRRQEDFYPFLKDNREKIEKILTFRIPYYVGPLARGNSRFAWMTRKSEETITPWNFEEVVDKGASAQSFIERMTNFDKNLPNEKVLPKHSLLYEYFTVYNELTKVKYVTEGMRKPAFLSGEQKKAIVDLLFKTNRKVTVKQLKEDYFKKIECFDSVEISGVEDRFNASLGTYHDLLKIIKDKDFLDNEENEDILEDIVLTLTLFEDREMIEERLKTYAHLFDDKVMKQLKRRRYTGWGRLSRKLINGIRDKQSGKTILDFLKSDGFANRNFMQLIHDDSLTFKEDIQKAQVSGQGDSLHEHIANLAGSPAIKKGILQTVKVVDELVKVMGRHKPENIVIEMARENQTTQKGQKNSRERMKRIEEGIKELGSQILKEHPVENTQLQNEKLYLYYLQNGRDMYVDQELDINRLSDYDVDHIVPQSFLKDDSIDNKVLTRSDKARGKSDNVPSEEVVKKMKNYWRQLLNAKLITQRKFDNLTKAERGGLSELDKAGFIKRQLVETRQITKHVAQILDSRMNTKYDENDKLIREVKVITLKSKLVSDFRKDFQFYKVREINNYHHAHDAYLNAVVGTALIKKYPKLESEFVYGDYKVYDVRKMIAKSEQEIGKATAKYFFYSNIMNFFKTEITLANGEIRKRPLIETNGETGEIVWDKGRDFATVRKVLSMPQVNIVKKTEVQTGGFSKESILPKRNSDKLIARKKDWDPKKYGGFDSPTVAYSVLVVAKVEKGKSKKLKSVKELLGITIMERSSFEKNPIDFLEAKGYKEVKKDLIIKLPKYSLFELENGRKRMLASAGELQKGNELALPSKYVNFLYLASHYEKLKGSPEDNEQKQLFVEQHKHYLDEIIEQISEFSKRVILADANLDKVLSAYNKHRDKPIREQAENIIHLFTLTNLGAPAAFKYFDTTIDRKRYTSTKEVLDATLIHQSITGLYETRIDLSQLGGDGGGGSGGGGSSGGLGIEDEYRLHETSTEPDVSLGSTWLSDFPQAWAETGGMGLAVRQAPLIIPLKATSTPVSIQQYPMSHEARLGIKPHIQRLLDQGILVPCQSPWNTPLLPVKKPGTNDYRPVQDLREVNKRVEDIHPTVPNPYNLLSGLPPSHQWYTVLDLKDAFFCLRLHPTSQPLFAFEWRDPGMGISGQLTWTRLPQGFKNSPTLFNEALHRDLADFRIQHPDLILLQYVDDILLAATSELDCQQGTRALLQTLGDLGYRASAKKAQICQKQVKYLGYLLREGQRWLTEARKETVMGQPVPKTPRQLREFLGKAGFCRLFIPGFAEMAAPLYPLTKPGTLFSWGPDQQKAYQEIKQALLTAPALGLPDLTKPFELFVDEKQGYAKGVLTQKLGPWRRPVAYLSKKLDPVAAGWPPCLRMVAAIAVLTKDAGKLTMGQPLVILAPHAVEALVKQPPDRWLSNARMTHYQAMLLDTDRVQFGPVVALNPATLLPLPEEGAPHDCLEILAETHGTRPDLTDQPIPDADHTWYTDGSSFLQEGQRKAGAAVTTETEVIWAGALPAGTSAQRAELIALTQALKMAEGKRLNVYTDSRYAFATAHIHGEIYRRRGWLTSEGREIKNKSEILALLKALFLPKRLSIIHCLGHQKGDSAEARGNRLADQAAREAAIKTPPDTSTLLIAGKRTADGSEFEKRTADGSEFESPKKKAKVE

SEQ ID NO: 2173 - protein, 2096 aa, synthetic construct
MPAAKRVKLDGGDKKYSIGLDIGTNSVGWAVITDEYKVPSKKFKVLGNTDRHSIKKNLIGALLFDSGETAEATRLKRTARRRYTRRKNRICYLQEIFSNEMAKVDDSFFHRLEESFLVEEDKKHERHPIFGNIVDEVAYHEKYPTIYHLRKKLVDSTDKADLRLIYLALAHMIKFRGHFLIEGDLNPDNSDVDKLFIQLVQTYNQLFEENPINASGVDAKAILSARLSKSRRLENLIAQLPGEKKNGLFGNLIALSLGLTPNFKSNFDLAEDAKLQLSKDTYDDDLDNLLAQIGDQYADLFLAAKNLSDAILLSDILRVNTEITKAPLSASMIKRYDEHHQDLTLLKALVRQQLPEKYKEIFFDQSKNGYAGYIDGGASQEEFYKFIKPILEKMDGTEELLVKLNREDLLRKQRTFDNGSIPHQIHLGELHAILRRQEDFYPFLKDNREKIEKILTFRIPYYVGPLARGNSRFAWMTRKSEETITPWNFEEVVDKGASAQSFIERMTNFDKNLPNEKVLPKHSLLYEYFTVYNELTKVKYVTEGMRKPAFLSGEQKKAIVDLLFKTNRKVTVKQLKEDYFKKIECFDSVEISGVEDRFNASLGTYHDLLKIIKDKDFLDNEENEDILEDIVLTLTLFEDREMIEERLKTYAHLFDDKVMKQLKRRRYTGWGRLSRKLINGIRDKQSGKTILDFLKSDGFANRNFMQLIHDDSLTFKEDIQKAQVSGQGDSLHEHIANLAGSPAIKKGILQTVKVVDELVKVMGRHKPENIVIEMARENQTTQKGQKNSRERMKRIEEGIKELGSQILKEHPVENTQLQNEKLYLYYLQNGRDMYVDQELDINRLSDYDVDHIVPQSFLKDDSIDNKVLTRSDKARGKSDNVPSEEVVKKMKNYWRQLLNAKLITQRKFDNLTKAERGGLSELDKAGFIKRQLVETRQITKHVAQILDSRMNTKYDENDKLIREVKVITLKSKLVSDFRKDFQFYKVREINNYHHAHDAYLNAVVGTALIKKYPKLESEFVYGDYKVYDVRKMIAKSEQEIGKATAKYFFYSNIMNFFKTEITLANGEIRKRPLIETNGETGEIVWDKGRDFATVRKVLSMPQVNIVKKTEVQTGGFSKESILPKRNSDKLIARKKDWDPKKYGGFDSPTVAYSVLVVAKVEKGKSKKLKSVKELLGITIMERSSFEKNPIDFLEAKGYKEVKKDLIIKLPKYSLFELENGRKRMLASAGELQKGNELALPSKYVNFLYLASHYEKLKGSPEDNEQKQLFVEQHKHYLDEIIEQISEFSKRVILADANLDKVLSAYNKHRDKPIREQAENIIHLFTLTNLGAPAAFKYFDTTIDRKRYTSTKEVLDATLIHQSITGLYETRIDLSQLGGDGGEAAAKGGGGSSGGLGIEDEYRLHETSTEPDVSLGSTWLSDFPQAWAETGGMGLAVRQAPLIIPLKATSTPVSIQQYPMSHEARLGIKPHIQRLLDQGILVPCQSPWNTPLLPVKKPGTNDYRPVQDLREVNKRVEDIHPTVPNPYNLLSGLPPSHQWYTVLDLKDAFFCLRLHPTSQPLFAFEWRDPGMGISGQLTWTRLPQGFKNSPTLFNEALHRDLADFRIQHPDLILLQYVDDILLAATSELDCQQGTRALLQTLGDLGYRASAKKAQICQKQVKYLGYLLREGQRWLTEARKETVMGQPVPKTPRQLREFLGKAGFCRLFIPGFAEMAAPLYPLTKPGTLFSWGPDQQKAYQEIKQALLTAPALGLPDLTKPFELFVDEKQGYAKGVLTQKLGPWRRPVAYLSKKLDPVAAGWPPCLRMVAAIAVLTKDAGKLTMGQPLVILAPHAVEALVKQPPDRWLSNARMTHYQAMLLDTDRVQFGPVVALNPATLLPLPEEGAPHDCLEILAETHGTRPDLTDQPIPDADHTWYTDGSSFLQEGQRKAGAAVTTETEVIWAGALPAGTSAQRAELIALTQALKMAEGKRLNVYTDSRYAFATAHIHGEIYRRRGWLTSEGREIKNKSEILALLKALFLPKRLSIIHCLGHQKGDSAEARGNRLADQAAREAAIKTPPDTSTLLIAGKRTADGSEFEKRTADGSEFESPKKKAKVE

SEQ ID NO: 2174 - protein, 2096 aa, synthetic construct
MPAAKRVKLDGGDKKYSIGLDIGTNSVGWAVITDEYKVPSKKFKVLGNTDRHSIKKNLIGALLFDSGETAEATRLKRTARRRYTRRKNRICYLQEIFSNEMAKVDDSFFHRLEESFLVEEDKKHERHPIFGNIVDEVAYHEKYPTIYHLRKKLVDSTDKADLRLIYLALAHMIKFRGHFLIEGDLNPDNSDVDKLFIQLVQTYNQLFEENPINASGVDAKAILSARLSKSRRLENLIAQLPGEKKNGLFGNLIALSLGLTPNFKSNFDLAEDAKLQLSKDTYDDDLDNLLAQIGDQYADLFLAAKNLSDAILLSDILRVNTEITKAPLSASMIKRYDEHHQDLTLLKALVRQQLPEKYKEIFFDQSKNGYAGYIDGGASQEEFYKFIKPILEKMDGTEELLVKLNREDLLRKQRTFDNGSIPHQIHLGELHAILRRQEDFYPFLKDNREKIEKILTFRIPYYVGPLARGNSRFAWMTRKSEETITPWNFEEVVDKGASAQSFIERMTNFDKNLPNEKVLPKHSLLYEYFTVYNELTKVKYVTEGMRKPAFLSGEQKKAIVDLLFKTNRKVTVKQLKEDYFKKIECFDSVEISGVEDRFNASLGTYHDLLKIIKDKDFLDNEENEDILEDIVLTLTLFEDREMIEERLKTYAHLFDDKVMKQLKRRRYTGWGRLSRKLINGIRDKQSGKTILDFLKSDGFANRNFMQLIHDDSLTFKEDIQKAQVSGQGDSLHEHIANLAGSPAIKKGILQTVKVVDELVKVMGRHKPENIVIEMARENQTTQKGQKNSRERMKRIEEGIKELGSQILKEHPVENTQLQNEKLYLYYLQNGRDMYVDQELDINRLSDYDVDHIVPQSFLKDDSIDNKVLTRSDKARGKSDNVPSEEVVKKMKNYWRQLLNAKLITQRKFDNLTKAERGGLSELDKAGFIKRQLVETRQITKHVAQILDSRMNTKYDENDKLIREVKVITLKSKLVSDFRKDFQFYKVREINNYHHAHDAYLNAVVGTALIKKYPKLESEFVYGDYKVYDVRKMIAKSEQEIGKATAKYFFYSNIMNFFKTEITLANGEIRKRPLIETNGETGEIVWDKGRDFATVRKVLSMPQVNIVKKTEVQTGGFSKESILPKRNSDKLIARKKDWDPKKYGGFDSPTVAYSVLVVAKVEKGKSKKLKSVKELLGITIMERSSFEKNPIDFLEAKGYKEVKKDLIIKLPKYSLFELENGRKRMLASAGELQKGNELALPSKYVNFLYLASHYEKLKGSPEDNEQKQLFVEQHKHYLDEIIEQISEFSKRVILADANLDKVLSAYNKHRDKPIREQAENIIHLFTLTNLGAPAAFKYFDTTIDRKRYTSTKEVLDATLIHQSITGLYETRIDLSQLGGDGGGGGEAAAKGSSGGLGIEDEYRLHETSTEPDVSLGSTWLSDFPQAWAETGGMGLAVRQAPLIIPLKATSTPVSIQQYPMSHEARLGIKPHIQRLLDQGILVPCQSPWNTPLLPVKKPGTNDYRPVQDLREVNKRVEDIHPTVPNPYNLLSGLPPSHQWYTVLDLKDAFFCLRLHPTSQPLFAFEWRDPGMGISGQLTWTRLPQGFKNSPTLFNEALHRDLADFRIQHPDLILLQYVDDILLAATSELDCQQGTRALLQTLGDLGYRASAKKAQICQKQVKYLGYLLREGQRWLTEARKETVMGQPVPKTPRQLREFLGKAGFCRLFIPGFAEMAAPLYPLTKPGTLFSWGPDQQKAYQEIKQALLTAPALGLPDLTKPFELFVDEKQGYAKGVLTQKLGPWRRPVAYLSKKLDPVAAGWPPCLRMVAAIAVLTKDAGKLTMGQPLVILAPHAVEALVKQPPDRWLSNARMTHYQAMLLDTDRVQFGPVVALNPATLLPLPEEGAPHDCLEILAETHGTRPDLTDQPIPDADHTWYTDGSSFLQEGQRKAGAAVTTETEVIWAGALPAGTSAQRAELIALTQALKMAEGKRLNVYTDSRYAFATAHIHGEIYRRRGWLTSEGREIKNKSEILALLKALFLPKRLSIIHCLGHQKGDSAEARGNRLADQAAREAAIKTPPDTSTLLIAGKRTADGSEFEKRTADGSEFESPKKKAKVE

SEQ ID NO: 2175 - protein, 2096 aa, synthetic construct
MPAAKRVKLDGGDKKYSIGLDIGTNSVGWAVITDEYKVPSKKFKVLGNTDRHSIKKNLIGALLFDSGETAEATRLKRTARRRYTRRKNRICYLQEIFSNEMAKVDDSFFHRLEESFLVEEDKKHERHPIFGNIVDEVAYHEKYPTIYHLRKKLVDSTDKADLRLIYLALAHMIKFRGHFLIEGDLNPDNSDVDKLFIQLVQTYNQLFEENPINASGVDAKAILSARLSKSRRLENLIAQLPGEKKNGLFGNLIALSLGLTPNFKSNFDLAEDAKLQLSKDTYDDDLDNLLAQIGDQYADLFLAAKNLSDAILLSDILRVNTEITKAPLSASMIKRYDEHHQDLTLLKALVRQQLPEKYKEIFFDQSKNGYAGYIDGGASQEEFYKFIKPILEKMDGTEELLVKLNREDLLRKQRTFDNGSIPHQIHLGELHAILRRQEDFYPFLKDNREKIEKILTFRIPYYVGPLARGNSRFAWMTRKSEETITPWNFEEVVDKGASAQSFIERMTNFDKNLPNEKVLPKHSLLYEYFTVYNELTKVKYVTEGMRKPAFLSGEQKKAIVDLLFKTNRKVTVKQLKEDYFKKIECFDSVEISGVEDRFNASLGTYHDLLKIIKDKDFLDNEENEDILEDIVLTLTLFEDREMIEERLKTYAHLFDDKVMKQLKRRRYTGWGRLSRKLINGIRDKQSGKTILDFLKSDGFANRNFMQLIHDDSLTFKEDIQKAQVSGQGDSLHEHIANLAGSPAIKKGILQTVKVVDELVKVMGRHKPENIVIEMARENQTTQKGQKNSRERMKRIEEGIKELGSQILKEHPVENTQLQNEKLYLYYLQNGRDMYVDQELDINRLSDYDVDHIVPQSFLKDDSIDNKVLTRSDKARGKSDNVPSEEVVKKMKNYWRQLLNAKLITQRKFDNLTKAERGGLSELDKAGFIKRQLVETRQITKHVAQILDSRMNTKYDENDKLIREVKVITLKSKLVSDFRKDFQFYKVREINNYHHAHDAYLNAVVGTALIKKYPKLESEFVYGDYKVYDVRKMIAKSEQEIGKATAKYFFYSNIMNFFKTEITLANGEIRKRPLIETNGETGEIVWDKGRDFATVRKVLSMPQVNIVKKTEVQTGGFSKESILPKRNSDKLIARKKDWDPKKYGGFDSPTVAYSVLVVAKVEKGKSKKLKSVKELLGITIMERSSFEKNPIDFLEAKGYKEVKKDLIIKLPKYSLFELENGRKRMLASAGELQKGNELALPSKYVNFLYLASHYEKLKGSPEDNEQKQLFVEQHKHYLDEIIEQISEFSKRVILADANLDKVLSAYNKHRDKPIREQAENIIHLFTLTNLGAPAAFKYFDTTIDRKRYTSTKEVLDATLIHQSITGLYETRIDLSQLGGDGGGGSGGGEAAAKGGLGIEDEYRLHETSTEPDVSLGSTWLSDFPQAWAETGGMGLAVRQAPLIIPLKATSTPVSIQQYPMSHEARLGIKPHIQRLLDQGILVPCQSPWNTPLLPVKKPGTNDYRPVQDLREVNKRVEDIHPTVPNPYNLLSGLPPSHQWYTVLDLKDAFFCLRLHPTSQPLFAFEWRDPGMGISGQLTWTRLPQGFKNSPTLFNEALHRDLADFRIQHPDLILLQYVDDILLAATSELDCQQGTRALLQTLGDLGYRASAKKAQICQKQVKYLGYLLREGQRWLTEARKETVMGQPVPKTPRQLREFLGKAGFCRLFIPGFAEMAAPLYPLTKPGTLFSWGPDQQKAYQEIKQALLTAPALGLPDLTKPFELFVDEKQGYAKGVLTQKLGPWRRPVAYLSKKLDPVAAGWPPCLRMVAAIAVLTKDAGKLTMGQPLVILAPHAVEALVKQPPDRWLSNARMTHYQAMLLDTDRVQFGPVVALNPATLLPLPEEGAPHDCLEILAETHGTRPDLTDQPIPDADHTWYTDGSSFLQEGQRKAGAAVTTETEVIWAGALPAGTSAQRAELIALTQALKMAEGKRLNVYTDSRYAFATAHIHGEIYRRRGWLTSEGREIKNKSEILALLKALFLPKRLSIIHCLGHQKGDSAEARGNRLADQAAREAAIKTPPDTSTLLIAGKRTADGSEFEKRTADGSEFESPKKKAKVE

SEQ ID NO: 2176 - protein, 2091 aa, synthetic construct
MPAAKRVKLDGGDKKYSIGLDIGTNSVGWAVITDEYKVPSKKFKVLGNTDRHSIKKNLIGALLFDSGETAEATRLKRTARRRYTRRKNRICYLQEIFSNEMAKVDDSFFHRLEESFLVEEDKKHERHPIFGNIVDEVAYHEKYPTIYHLRKKLVDSTDKADLRLIYLALAHMIKFRGHFLIEGDLNPDNSDVDKLFIQLVQTYNQLFEENPINASGVDAKAILSARLSKSRRLENLIAQLPGEKKNGLFGNLIALSLGLTPNFKSNFDLAEDAKLQLSKDTYDDDLDNLLAQIGDQYADLFLAAKNLSDAILLSDILRVNTEITKAPLSASMIKRYDEHHQDLTLLKALVRQQLPEKYKEIFFDQSKNGYAGYIDGGASQEEFYKFIKPILEKMDGTEELLVKLNREDLLRKQRTFDNGSIPHQIHLGELHAILRRQEDFYPFLKDNREKIEKILTFRIPYYVGPLARGNSRFAWMTRKSEETITPWNFEEVVDKGASAQSFIERMTNFDKNLPNEKVLPKHSLLYEYFTVYNELTKVKYVTEGMRKPAFLSGEQKKAIVDLLFKTNRKVTVKQLKEDYFKKIECFDSVEISGVEDRFNASLGTYHDLLKIIKDKDFLDNEENEDILEDIVLTLTLFEDREMIEERLKTYAHLFDDKVMKQLKRRRYTGWGRLSRKLINGIRDKQSGKTILDFLKSDGFANRNFMQLIHDDSLTFKEDIQKAQVSGQGDSLHEHIANLAGSPAIKKGILQTVKVVDELVKVMGRHKPENIVIEMARENQTTQKGQKNSRERMKRIEEGIKELGSQILKEHPVENTQLQNEKLYLYYLQNGRDMYVDQELDINRLSDYDVDHIVPQSFLKDDSIDNKVLTRSDKARGKSDNVPSEEVVKKMKNYWRQLLNAKLITQRKFDNLTKAERGGLSELDKAGFIKRQLVETRQITKHVAQILDSRMNTKYDENDKLIREVKVITLKSKLVSDFRKDFQFYKVREINNYHHAHDAYLNAVVGTALIKKYPKLESEFVYGDYKVYDVRKMIAKSEQEIGKATAKYFFYSNIMNFFKTEITLANGEIRKRPLIETNGETGEIVWDKGRDFATVRKVLSMPQVNIVKKTEVQTGGFSKESILPKRNSDKLIARKKDWDPKKYGGFDSPTVAYSVLVVAKVEKGKSKKLKSVKELLGITIMERSSFEKNPIDFLEAKGYKEVKKDLIIKLPKYSLFELENGRKRMLASAGELQKGNELALPSKYVNFLYLASHYEKLKGSPEDNEQKQLFVEQHKHYLDEIIEQISEFSKRVILADANLDKVLSAYNKHRDKPIREQAENIIHLFTLTNLGAPAAFKYFDTTIDRKRYTSTKEVLDATLIHQSITGLYETRIDLSQLGGDGGGSSGSSGGLGIEDEYRLHETSTEPDVSLGSTWLSDFPQAWAETGGMGLAVRQAPLIIPLKATSTPVSIQQYPMSHEARLGIKPHIQRLLDQGILVPCQSPWNTPLLPVKKPGTNDYRPVQDLREVNKRVEDIHPTVPNPYNLLSGLPPSHQWYTVLDLKDAFFCLRLHPTSQPLFAFEWRDPGMGISGQLTWTRLPQGFKNSPTLFNEALHRDLADFRIQHPDLILLQYVDDILLAATSELDCQQGTRALLQTLGDLGYRASAKKAQICQKQVKYLGYLLREGQRWLTEARKETVMGQPVPKTPRQLREFLGKAGFCRLFIPGFAEMAAPLYPLTKPGTLFSWGPDQQKAYQEIKQALLTAPALGLPDLTKPFELFVDEKQGYAKGVLTQKLGPWRRPVAYLSKKLDPVAAGWPPCLRMVAAIAVLTKDAGKLTMGQPLVILAPHAVEALVKQPPDRWLSNARMTHYQAMLLDTDRVQFGPVVALNPATLLPLPEEGAPHDCLEILAETHGTRPDLTDQPIPDADHTWYTDGSSFLQEGQRKAGAAVTTETEVIWAGALPAGTSAQRAELIALTQALKMAEGKRLNVYTDSRYAFATAHIHGEIYRRRGWLTSEGREIKNKSEILALLKALFLPKRLSIIHCLGHQKGDSAEARGNRLADQAAREAAIKTPPDTSTLLIAGKRTADGSEFEKRTADGSEFESPKKKAKVE

SEQ ID NO: 2177 - protein, 2096 aa, synthetic construct
MPAAKRVKLDGGDKKYSIGLDIGTNSVGWAVITDEYKVPSKKFKVLGNTDRHSIKKNLIGALLFDSGETAEATRLKRTARRRYTRRKNRICYLQEIFSNEMAKVDDSFFHRLEESFLVEEDKKHERHPIFGNIVDEVAYHEKYPTIYHLRKKLVDSTDKADLRLIYLALAHMIKFRGHFLIEGDLNPDNSDVDKLFIQLVQTYNQLFEENPINASGVDAKAILSARLSKSRRLENLIAQLPGEKKNGLFGNLIALSLGLTPNFKSNFDLAEDAKLQLSKDTYDDDLDNLLAQIGDQYADLFLAAKNLSDAILLSDILRVNTEITKAPLSASMIKRYDEHHQDLTLLKALVRQQLPEKYKEIFFDQSKNGYAGYIDGGASQEEFYKFIKPILEKMDGTEELLVKLNREDLLRKQRTFDNGSIPHQIHLGELHAILRRQEDFYPFLKDNREKIEKILTFRIPYYVGPLARGNSRFAWMTRKSEETITPWNFEEVVDKGASAQSFIERMTNFDKNLPNEKVLPKHSLLYEYFTVYNELTKVKYVTEGMRKPAFLSGEQKKAIVDLLFKTNRKVTVKQLKEDYFKKIECFDSVEISGVEDRFNASLGTYHDLLKIIKDKDFLDNEENEDILEDIVLTLTLFEDREMIEERLKTYAHLFDDKVMKQLKRRRYTGWGRLSRKLINGIRDKQSGKTILDFLKSDGFANRNFMQLIHDDSLTFKEDIQKAQVSGQGDSLHEHIANLAGSPAIKKGILQTVKVVDELVKVMGRHKPENIVIEMARENQTTQKGQKNSRERMKRIEEGIKELGSQILKEHPVENTQLQNEKLYLYYLQNGRDMYVDQELDINRLSDYDVDHIVPQSFLKDDSIDNKVLTRSDKARGKSDNVPSEEVVKKMKNYWRQLLNAKLITQRKFDNLTKAERGGLSELDKAGFIKRQLVETRQITKHVAQILDSRMNTKYDENDKLIREVKVITLKSKLVSDFRKDFQFYKVREINNYHHAHDAYLNAVVGTALIKKYPKLESEFVYGDYKVYDVRKMIAKSEQEIGKATAKYFFYSNIMNFFKTEITLANGEIRKRPLIETNGETGEIVWDKGRDFATVRKVLSMPQVNIVKKTEVQTGGFSKESILPKRNSDKLIARKKDWDPKKYGGFDSPTVAYSVLVVAKVEKGKSKKLKSVKELLGITIMERSSFEKNPIDFLEAKGYKEVKKDLIIKLPKYSLFELENGRKRMLASAGELQKGNELALPSKYVNFLYLASHYEKLKGSPEDNEQKQLFVEQHKHYLDEIIEQISEFSKRVILADANLDKVLSAYNKHRDKPIREQAENIIHLFTLTNLGAPAAFKYFDTTIDRKRYTSTKEVLDATLIHQSITGLYETRIDLSQLGGDGGGSSEAAAKGGSGGLGIEDEYRLHETSTEPDVSLGSTWLSDFPQAWAETGGMGLAVRQAPLIIPLKATSTPVSIQQYPMSHEARLGIKPHIQRLLDQGILVPCQSPWNTPLLPVKKPGTNDYRPVQDLREVNKRVEDIHPTVPNPYNLLSGLPPSHQWYTVLDLKDAFFCLRLHPTSQPLFAFEWRDPGMGISGQLTWTRLPQGFKNSPTLFNEALHRDLADFRIQHPDLILLQYVDDILLAATSELDCQQGTRALLQTLGDLGYRASAKKAQICQKQVKYLGYLLREGQRWLTEARKETVMGQPVPKTPRQLREFLGKAGFCRLFIPGFAEMAAPLYPLTKPGTLFSWGPDQQKAYQEIKQALLTAPALGLPDLTKPFELFVDEKQGYAKGVLTQKLGPWRRPVAYLSKKLDPVAAGWPPCLRMVAAIAVLTKDAGKLTMGQPLVILAPHAVEALVKQPPDRWLSNARMTHYQAMLLDTDRVQFGPVVALNPATLLPLPEEGAPHDCLEILAETHGTRPDLTDQPIPDADHTWYTDGSSFLQEGQRKAGAAVTTETEVIWAGALPAGTSAQRAELIALTQALKMAEGKRLNVYTDSRYAFATAHIHGEIYRRRGWLTSEGREIKNKSEILALLKALFLPKRLSIIHCLGHQKGDSAEARGNRLADQAAREAAIKTPPDTSTLLIAGKRTADGSEFEKRTADGSEFESPKKKAKVE

SEQ ID NO: 2178 - protein, 2096 aa, synthetic construct
MPAAKRVKLDGGDKKYSIGLDIGTNSVGWAVITDEYKVPSKKFKVLGNTDRHSIKKNLIGALLFDSGETAEATRLKRTARRRYTRRKNRICYLQEIFSNEMAKVDDSFFHRLEESFLVEEDKKHERHPIFGNIVDEVAYHEKYPTIYHLRKKLVDSTDKADLRLIYLALAHMIKFRGHFLIEGDLNPDNSDVDKLFIQLVQTYNQLFEENPINASGVDAKAILSARLSKSRRLENLIAQLPGEKKNGLFGNLIALSLGLTPNFKSNFDLAEDAKLQLSKDTYDDDLDNLLAQIGDQYADLFLAAKNLSDAILLSDILRVNTEITKAPLSASMIKRYDEHHQDLTLLKALVRQQLPEKYKEIFFDQSKNGYAGYIDGGASQEEFYKFIKPILEKMDGTEELLVKLNREDLLRKQRTFDNGSIPHQIHLGELHAILRRQEDFYPFLKDNREKIEKILTFRIPYYVGPLARGNSRFAWMTRKSEETITPWNFEEVVDKGASAQSFIERMTNFDKNLPNEKVLPKHSLLYEYFTVYNELTKVKYVTEGMRKPAFLSGEQKKAIVDLLFKTNRKVTVKQLKEDYFKKIECFDSVEISGVEDRFNASLGTYHDLLKIIKDKDFLDNEENEDILEDIVLTLTLFEDREMIEERLKTYAHLFDDKVMKQLKRRRYTGWGRLSRKLINGIRDKQSGKTILDFLKSDGFANRNFMQLIHDDSLTFKEDIQKAQVSGQGDSLHEHIANLAGSPAIKKGILQTVKVVDELVKVMGRHKPENIVIEMARENQTTQKGQKNSRERMKRIEEGIKELGSQILKEHPVENTQLQNEKLYLYYLQNGRDMYVDQELDINRLSDYDVDHIVPQSFLKDDSIDNKVLTRSDKARGKSDNVPSEEVVKKMKNYWRQLLNAKLITQRKFDNLTKAERGGLSELDKAGFIKRQLVETRQITKHVAQILDSRMNTKYDENDKLIREVKVITLKSKLVSDFRKDFQFYKVREINNYHHAHDAYLNAVVGTALIKKYPKLESEFVYGDYKVYDVRKMIAKSEQEIGKATAKYFFYSNIMNFFKTEITLANGEIRKRPLIETNGETGEIVWDKGRDFATVRKVLSMPQVNIVKKTEVQTGGFSKESILPKRNSDKLIARKKDWDPKKYGGFDSPTVAYSVLVVAKVEKGKSKKLKSVKELLGITIMERSSFEKNPIDFLEAKGYKEVKKDLIIKLPKYSLFELENGRKRMLASAGELQKGNELALPSKYVNFLYLASHYEKLKGSPEDNEQKQLFVEQHKHYLDEIIEQISEFSKRVILADANLDKVLSAYNKHRDKPIREQAENIIHLFTLTNLGAPAAFKYFDTTIDRKRYTSTKEVLDATLIHQSITGLYETRIDLSQLGGDGGPAPGGGEAAAKGGLGIEDEYRLHETSTEPDVSLGSTWLSDFPQAWAETGGMGLAVRQAPLIIPLKATSTPVSIQQYPMSHEARLGIKPHIQRLLDQGILVPCQSPWNTPLLPVKKPGTNDYRPVQDLREVNKRVEDIHPTVPNPYNLLSGLPPSHQWYTVLDLKDAFFCLRLHPTSQPLFAFEWRDPGMGISGQLTWTRLPQGFKNSPTLFNEALHRDLADFRIQHPDLILLQYVDDILLAATSELDCQQGTRALLQTLGDLGYRASAKKAQICQKQVKYLGYLLREGQRWLTEARKETVMGQPVPKTPRQLREFLGKAGFCRLFIPGFAEMAAPLYPLTKPGTLFSWGPDQQKAYQEIKQALLTAPALGLPDLTKPFELFVDEKQGYAKGVLTQKLGPWRRPVAYLSKKLDPVAAGWPPCLRMVAAIAVLTKDAGKLTMGQPLVILAPHAVEALVKQPPDRWLSNARMTHYQAMLLDTDRVQFGPVVALNPATLLPLPEEGAPHDCLEILAETHGTRPDLTDQPIPDADHTWYTDGSSFLQEGQRKAGAAVTTETEVIWAGALPAGTSAQRAELIALTQALKMAEGKRLNVYTDSRYAFATAHIHGEIYRRRGWLTSEGREIKNKSEILALLKALFLPKRLSIIHCLGHQKGDSAEARGNRLADQAAREAAIKTPPDTSTLLIAGKRTADGSEFEKRTADGSEFESPKKKAKVE

SEQ ID NO: 2179 - protein, 2091 aa, synthetic construct
MPAAKRVKLDGGDKKYSIGLDIGTNSVGWAVITDEYKVPSKKFKVLGNTDRHSIKKNLIGALLFDSGETAEATRLKRTARRRYTRRKNRICYLQEIFSNEMAKVDDSFFHRLEESFLVEEDKKHERHPIFGNIVDEVAYHEKYPTIYHLRKKLVDSTDKADLRLIYLALAHMIKFRGHFLIEGDLNPDNSDVDKLFIQLVQTYNQLFEENPINASGVDAKAILSARLSKSRRLENLIAQLPGEKKNGLFGNLIALSLGLTPNFKSNFDLAEDAKLQLSKDTYDDDLDNLLAQIGDQYADLFLAAKNLSDAILLSDILRVNTEITKAPLSASMIKRYDEHHQDLTLLKALVRQQLPEKYKEIFFDQSKNGYAGYIDGGASQEEFYKFIKPILEKMDGTEELLVKLNREDLLRKQRTFDNGSIPHQIHLGELHAILRRQEDFYPFLKDNREKIEKILTFRIPYYVGPLARGNSRFAWMTRKSEETITPWNFEEVVDKGASAQSFIERMTNFDKNLPNEKVLPKHSLLYEYFTVYNELTKVKYVTEGMRKPAFLSGEQKKAIVDLLFKTNRKVTVKQLKEDYFKKIECFDSVEISGVEDRFNASLGTYHDLLKIIKDKDFLDNEENEDILEDIVLTLTLFEDREMIEERLKTYAHLFDDKVMKQLKRRRYTGWGRLSRKLINGIRDKQSGKTILDFLKSDGFANRNFMQLIHDDSLTFKEDIQKAQVSGQGDSLHEHIANLAGSPAIKKGILQTVKVVDELVKVMGRHKPENIVIEMARENQTTQKGQKNSRERMKRIEEGIKELGSQILKEHPVENTQLQNEKLYLYYLQNGRDMYVDQELDINRLSDYDVDHIVPQSFLKDDSIDNKVLTRSDKARGKSDNVPSEEVVKKMKNYWRQLLNAKLITQRKFDNLTKAERGGLSELDKAGFIKRQLVETRQITKHVAQILDSRMNTKYDENDKLIREVKVITLKSKLVSDFRKDFQFYKVREINNYHHAHDAYLNAVVGTALIKKYPKLESEFVYGDYKVYDVRKMIAKSEQEIGKATAKYFFYSNIMNFFKTEITLANGEIRKRPLIETNGETGEIVWDKGRDFATVRKVLSMPQVNIVKKTEVQTGGFSKESILPKRNSDKLIARKKDWDPKKYGGFDSPTVAYSVLVVAKVEKGKSKKLKSVKELLGITIMERSSFEKNPIDFLEAKGYKEVKKDLIIKLPKYSLFELENGRKRMLASAGELQKGNELALPSKYVNFLYLASHYEKLKGSPEDNEQKQLFVEQHKHYLDEIIEQISEFSKRVILADANLDKVLSAYNKHRDKPIREQAENIIHLFTLTNLGAPAAFKYFDTTIDRKRYTSTKEVLDATLIHQSITGLYETRIDLSQLGGDGGGGGGSSGGLGIEDEYRLHETSTEPDVSLGSTWLSDFPQAWAETGGMGLAVRQAPLIIPLKATSTPVSIQQYPMSHEARLGIKPHIQRLLDQGILVPCQSPWNTPLLPVKKPGTNDYRPVQDLREVNKRVEDIHPTVPNPYNLLSGLPPSHQWYTVLDLKDAFFCLRLHPTSQPLFAFEWRDPGMGISGQLTWTRLPQGFKNSPTLFNEALHRDLADFRIQHPDLILLQYVDDILLAATSELDCQQGTRALLQTLGDLGYRASAKKAQICQKQVKYLGYLLREGQRWLTEARKETVMGQPVPKTPRQLREFLGKAGFCRLFIPGFAEMAAPLYPLTKPGTLFSWGPDQQKAYQEIKQALLTAPALGLPDLTKPFELFVDEKQGYAKGVLTQKLGPWRRPVAYLSKKLDPVAAGWPPCLRMVAAIAVLTKDAGKLTMGQPLVILAPHAVEALVKQPPDRWLSNARMTHYQAMLLDTDRVQFGPVVALNPATLLPLPEEGAPHDCLEILAETHGTRPDLTDQPIPDADHTWYTDGSSFLQEGQRKAGAAVTTETEVIWAGALPAGTSAQRAELIALTQALKMAEGKRLNVYTDSRYAFATAHIHGEIYRRRGWLTSEGREIKNKSEILALLKALFLPKRLSIIHCLGHQKGDSAEARGNRLADQAAREAAIKTPPDTSTLLIAGKRTADGSEFEKRTADGSEFESPKKKAKVE

SEQ ID NO: 2180 - protein, 2094 aa, synthetic construct
MPAAKRVKLDGGDKKYSIGLDIGTNSVGWAVITDEYKVPSKKFKVLGNTDRHSIKKNLIGALLFDSGETAEATRLKRTARRRYTRRKNRICYLQEIFSNEMAKVDDSFFHRLEESFLVEEDKKHERHPIFGNIVDEVAYHEKYPTIYHLRKKLVDSTDKADLRLIYLALAHMIKFRGHFLIEGDLNPDNSDVDKLFIQLVQTYNQLFEENPINASGVDAKAILSARLSKSRRLENLIAQLPGEKKNGLFGNLIALSLGLTPNFKSNFDLAEDAKLQLSKDTYDDDLDNLLAQIGDQYADLFLAAKNLSDAILLSDILRVNTEITKAPLSASMIKRYDEHHQDLTLLKALVRQQLPEKYKEIFFDQSKNGYAGYIDGGASQEEFYKFIKPILEKMDGTEELLVKLNREDLLRKQRTFDNGSIPHQIHLGELHAILRRQEDFYPFLKDNREKIEKILTFRIPYYVGPLARGNSRFAWMTRKSEETITPWNFEEVVDKGASAQSFIERMTNFDKNLPNEKVLPKHSLLYEYFTVYNELTKVKYVTEGMRKPAFLSGEQKKAIVDLLFKTNRKVTVKQLKEDYFKKIECFDSVEISGVEDRFNASLGTYHDLLKIIKDKDFLDNEENEDILEDIVLTLTLFEDREMIEERLKTYAHLFDDKVMKQLKRRRYTGWGRLSRKLINGIRDKQSGKTILDFLKSDGFANRNFMQLIHDDSLTFKEDIQKAQVSGQGDSLHEHIANLAGSPAIKKGILQTVKVVDELVKVMGRHKPENIVIEMARENQTTQKGQKNSRERMKRIEEGIKELGSQILKEHPVENTQLQNEKLYLYYLQNGRDMYVDQELDINRLSDYDVDHIVPQSFLKDDSIDNKVLTRSDKARGKSDNVPSEEVVKKMKNYWRQLLNAKLITQRKFDNLTKAERGGLSELDKAGFIKRQLVETRQITKHVAQILDSRMNTKYDENDKLIREVKVITLKSKLVSDFRKDFQFYKVREINNYHHAHDAYLNAVVGTALIKKYPKLESEFVYGDYKVYDVRKMIAKSEQEIGKATAKYFFYSNIMNFFKTEITLANGEIRKRPLIETNGETGEIVWDKGRDFATVRKVLSMPQVNIVKKTEVQTGGFSKESILPKRNSDKLIARKKDWDPKKYGGFDSPTVAYSVLVVAKVEKGKSKKLKSVKELLGITIMERSSFEKNPIDFLEAKGYKEVKKDLIIKLPKYSLFELENGRKRMLASAGELQKGNELALPSKYVNFLYLASHYEKLKGSPEDNEQKQLFVEQHKHYLDEIIEQISEFSKRVILADANLDKVLSAYNKHRDKPIREQAENIIHLFTLTNLGAPAAFKYFDTTIDRKRYTSTKEVLDATLIHQSITGLYETRIDLSQLGGDGGGGGPAPGSSGGLGIEDEYRLHETSTEPDVSLGSTWLSDFPQAWAETGGMGLAVRQAPLIIPLKATSTPVSIQQYPMSHEARLGIKPHIQRLLDQGILVPCQSPWNTPLLPVKKPGTNDYRPVQDLREVNKRVEDIHPTVPNPYNLLSGLPPSHQWYTVLDLKDAFFCLRLHPTSQPLFAFEWRDPGMGISGQLTWTRLPQGFKNSPTLFNEALHRDLADFRIQHPDLILLQYVDDILLAATSELDCQQGTRALLQTLGDLGYRASAKKAQICQKQVKYLGYLLREGQRWLTEARKETVMGQPVPKTPRQLREFLGKAGFCRLFIPGFAEMAAPLYPLTKPGTLFSWGPDQQKAYQEIKQALLTAPALGLPDLTKPFELFVDEKQGYAKGVLTQKLGPWRRPVAYLSKKLDPVAAGWPPCLRMVAAIAVLTKDAGKLTMGQPLVILAPHAVEALVKQPPDRWLSNARMTHYQAMLLDTDRVQFGPVVALNPATLLPLPEEGAPHDCLEILAETHGTRPDLTDQPIPDADHTWYTDGSSFLQEGQRKAGAAVTTETEVIWAGALPAGTSAQRAELIALTQALKMAEGKRLNVYTDSRYAFATAHIHGEIYRRRGWLTSEGREIKNKSEILALLKALFLPKRLSIIHCLGHQKGDSAEARGNRLADQAAREAAIKTPPDTSTLLIAGKRTADGSEFEKRTADGSEFESPKKKAKVE

SEQ ID NO: 2181 - protein, 2118 aa, synthetic construct
MPAAKRVKLDGGDKKYSIGLDIGTNSVGWAVITDEYKVPSKKFKVLGNTDRHSIKKNLIGALLFDSGETAEATRLKRTARRRYTRRKNRICYLQEIFSNEMAKVDDSFFHRLEESFLVEEDKKHERHPIFGNIVDEVAYHEKYPTIYHLRKKLVDSTDKADLRLIYLALAHMIKFRGHFLIEGDLNPDNSDVDKLFIQLVQTYNQLFEENPINASGVDAKAILSARLSKSRRLENLIAQLPGEKKNGLFGNLIALSLGLTPNFKSNFDLAEDAKLQLSKDTYDDDLDNLLAQIGDQYADLFLAAKNLSDAILLSDILRVNTEITKAPLSASMIKRYDEHHQDLTLLKALVRQQLPEKYKEIFFDQSKNGYAGYIDGGASQEEFYKFIKPILEKMDGTEELLVKLNREDLLRKQRTFDNGSIPHQIHLGELHAILRRQEDFYPFLKDNREKIEKILTFRIPYYVGPLARGNSRFAWMTRKSEETITPWNFEEVVDKGASAQSFIERMTNFDKNLPNEKVLPKHSLLYEYFTVYNELTKVKYVTEGMRKPAFLSGEQKKAIVDLLFKTNRKVTVKQLKEDYFKKIECFDSVEISGVEDRFNASLGTYHDLLKIIKDKDFLDNEENEDILEDIVLTLTLFEDREMIEERLKTYAHLFDDKVMKQLKRRRYTGWGRLSRKLINGIRDKQSGKTILDFLKSDGFANRNFMQLIHDDSLTFKEDIQKAQVSGQGDSLHEHIANLAGSPAIKKGILQTVKVVDELVKVMGRHKPENIVIEMARENQTTQKGQKNSRERMKRIEEGIKELGSQILKEHPVENTQLQNEKLYLYYLQNGRDMYVDQELDINRLSDYDVDHIVPQSFLKDDSIDNKVLTRSDKARGKSDNVPSEEVVKKMKNYWRQLLNAKLITQRKFDNLTKAERGGLSELDKAGFIKRQLVETRQITKHVAQILDSRMNTKYDENDKLIREVKVITLKSKLVSDFRKDFQFYKVREINNYHHAHDAYLNAVVGTALIKKYPKLESEFVYGDYKVYDVRKMIAKSEQEIGKATAKYFFYSNIMNFFKTEITLANGEIRKRPLIETNGETGEIVWDKGRDFATVRKVLSMPQVNIVKKTEVQTGGFSKESILPKRNSDKLIARKKDWDPKKYGGFDSPTVAYSVLVVAKVEKGKSKKLKSVKELLGITIMERSSFEKNPIDFLEAKGYKEVKKDLIIKLPKYSLFELENGRKRMLASAGELQKGNELALPSKYVNFLYLASHYEKLKGSPEDNEQKQLFVEQHKHYLDEIIEQISEFSKRVILADANLDKVLSAYNKHRDKPIREQAENIIHLFTLTNLGAPAAFKYFDTTIDRKRYTSTKEVLDATLIHQSITGLYETRIDLSQLGGDGGSGGSSGGSSGSETPGTSESATPESSGGSSGGSSGGLGIEDEYRLHETSTEPDVSLGSTWLSDFPQAWAETGGMGLAVRQAPLIIPLKATSTPVSIQQYPMSHEARLGIKPHIQRLLDQGILVPCQSPWNTPLLPVKKPGTNDYRPVQDLREVNKRVEDIHPTVPNPYNLLSGLPPSHQWYTVLDLKDAFFCLRLHPTSQPLFAFEWRDPGMGISGQLTWTRLPQGFKNSPTLFNEALHRDLADFRIQHPDLILLQYVDDILLAATSELDCQQGTRALLQTLGDLGYRASAKKAQICQKQVKYLGYLLREGQRWLTEARKETVMGQPVPKTPRQLREFLGKAGFCRLFIPGFAEMAAPLYPLTKPGTLFSWGPDQQKAYQEIKQALLTAPALGLPDLTKPFELFVDEKQGYAKGVLTQKLGPWRRPVAYLSKKLDPVAAGWPPCLRMVAAIAVLTKDAGKLTMGQPLVILAPHAVEALVKQPPDRWLSNARMTHYQAMLLDTDRVQFGPVVALNPATLLPLPEEGAPHDCLEILAETHGTRPDLTDQPIPDADHTWYTDGSSFLQEGQRKAGAAVTTETEVIWAGALPAGTSAQRAELIALTQALKMAEGKRLNVYTDSRYAFATAHIHGEIYRRRGWLTSEGREIKNKSEILALLKALFLPKRLSIIHCLGHQKGDSAEARGNRLADQAAREAAIKTPPDTSTLLIAGKRTADGSEFEKRTADGSEFESPKKKAKVE

SEQ ID NO: 2182 - protein, 2096 aa, synthetic construct
MPAAKRVKLDGGDKKYSIGLDIGTNSVGWAVITDEYKVPSKKFKVLGNTDRHSIKKNLIGALLFDSGETAEATRLKRTARRRYTRRKNRICYLQEIFSNEMAKVDDSFFHRLEESFLVEEDKKHERHPIFGNIVDEVAYHEKYPTIYHLRKKLVDSTDKADLRLIYLALAHMIKFRGHFLIEGDLNPDNSDVDKLFIQLVQTYNQLFEENPINASGVDAKAILSARLSKSRRLENLIAQLPGEKKNGLFGNLIALSLGLTPNFKSNFDLAEDAKLQLSKDTYDDDLDNLLAQIGDQYADLFLAAKNLSDAILLSDILRVNTEITKAPLSASMIKRYDEHHQDLTLLKALVRQQLPEKYKEIFFDQSKNGYAGYIDGGASQEEFYKFIKPILEKMDGTEELLVKLNREDLLRKQRTFDNGSIPHQIHLGELHAILRRQEDFYPFLKDNREKIEKILTFRIPYYVGPLARGNSRFAWMTRKSEETITPWNFEEVVDKGASAQSFIERMTNFDKNLPNEKVLPKHSLLYEYFTVYNELTKVKYVTEGMRKPAFLSGEQKKAIVDLLFKTNRKVTVKQLKEDYFKKIECFDSVEISGVEDRFNASLGTYHDLLKIIKDKDFLDNEENEDILEDIVLTLTLFEDREMIEERLKTYAHLFDDKVMKQLKRRRYTGWGRLSRKLINGIRDKQSGKTILDFLKSDGFANRNFMQLIHDDSLTFKEDIQKAQVSGQGDSLHEHIANLAGSPAIKKGILQTVKVVDELVKVMGRHKPENIVIEMARENQTTQKGQKNSRERMKRIEEGIKELGSQILKEHPVENTQLQNEKLYLYYLQNGRDMYVDQELDINRLSDYDVDHIVPQSFLKDDSIDNKVLTRSDKARGKSDNVPSEEVVKKMKNYWRQLLNAKLITQRKFDNLTKAERGGLSELDKAGFIKRQLVETRQITKHVAQILDSRMNTKYDENDKLIREVKVITLKSKLVSDFRKDFQFYKVREINNYHHAHDAYLNAVVGTALIKKYPKLESEFVYGDYKVYDVRKMIAKSEQEIGKATAKYFFYSNIMNFFKTEITLANGEIRKRPLIETNGETGEIVWDKGRDFATVRKVLSMPQVNIVKKTEVQTGGFSKESILPKRNSDKLIARKKDWDPKKYGGFDSPTVAYSVLVVAKVEKGKSKKLKSVKELLGITIMERSSFEKNPIDFLEAKGYKEVKKDLIIKLPKYSLFELENGRKRMLASAGELQKGNELALPSKYVNFLYLASHYEKLKGSPEDNEQKQLFVEQHKHYLDEIIEQISEFSKRVILADANLDKVLSAYNKHRDKPIREQAENIIHLFTLTNLGAPAAFKYFDTTIDRKRYTSTKEVLDATLIHQSITGLYETRIDLSQLGGDGGGSSGGGEAAAKGGTLGIEDEYRLHETSTEPDVSLGSTWLSDFPQAWAETGGMGLAVRQAPLIIPLKATSTPVSIQQYPMSHEARLGIKPHIQRLLDQGILVPCQSPWNTPLLPVKKPGTNDYRPVQDLREVNKRVEDIHPTVPNPYNLLSGLPPSHQWYTVLDLKDAFFCLRLHPTSQPLFAFEWRDPGMGISGQLTWTRLPQGFKNSPTLFDEALHRDLADFRIQHPDLILLQYVDDILLAATSELDCQQGTRALLQTLGDLGYRASAKKAQICQKQVKYLGYLLREGQRWLTEARKETVMGQPVPKTPRQLREFLGTAGFCRLWIPGFAEMAAPLYPLTKTGTLFSWGPDQQKAYQEIKQALLTAPALGLPDLTKPFELFVDEKQGYAKGVLTQKLGPWRRPVAYLSKKLDPVAAGWPPCLRMVAAIAVLTKDAGKLTMGQPLVILAPHAVEALVKQPPDRWLSNARMTHYQAMLLDTDRVQFGPVVALNPATLLPLPEEGAPHDCLEILAETHGTRPDLTDQPIPDADHTWYTDGSSFLQEGQRKAGAAVTTETEVIWAGALPAGTSAQRAELIALTQALKMAEGKRLNVYTDSRYAFATAHIHGEIYRRRGLLTSEGREIKNKSEILALLKALFLPKRLSIIHCLGHQKGDSAEARGNRLADQAAREAAIKTPPDTSTLLAGKRTADGSEFEKRTADGSEFESPKKKAKVE

SEQ ID NO: 2183 - protein, 2091 aa, synthetic construct
MPAAKRVKLDGGDKKYSIGLDIGTNSVGWAVITDEYKVPSKKFKVLGNTDRHSIKKNLIGALLFDSGETAEATRLKRTARRRYTRRKNRICYLQEIFSNEMAKVDDSFFHRLEESFLVEEDKKHERHPIFGNIVDEVAYHEKYPTIYHLRKKLVDSTDKADLRLIYLALAHMIKFRGHFLIEGDLNPDNSDVDKLFIQLVQTYNQLFEENPINASGVDAKAILSARLSKSRRLENLIAQLPGEKKNGLFGNLIALSLGLTPNFKSNFDLAEDAKLQLSKDTYDDDLDNLLAQIGDQYADLFLAAKNLSDAILLSDILRVNTEITKAPLSASMIKRYDEHHQDLTLLKALVRQQLPEKYKEIFFDQSKNGYAGYIDGGASQEEFYKFIKPILEKMDGTEELLVKLNREDLLRKQRTFDNGSIPHQIHLGELHAILRRQEDFYPFLKDNREKIEKILTFRIPYYVGPLARGNSRFAWMTRKSEETITPWNFEEVVDKGASAQSFIERMTNFDKNLPNEKVLPKHSLLYEYFTVYNELTKVKYVTEGMRKPAFLSGEQKKAIVDLLFKTNRKVTVKQLKEDYFKKIECFDSVEISGVEDRFNASLGTYHDLLKIIKDKDFLDNEENEDILEDIVLTLTLFEDREMIEERLKTYAHLFDDKVMKQLKRRRYTGWGRLSRKLINGIRDKQSGKTILDFLKSDGFANRNFMQLIHDDSLTFKEDIQKAQVSGQGDSLHEHIANLAGSPAIKKGILQTVKVVDELVKVMGRHKPENIVIEMARENQTTQKGQKNSRERMKRIEEGIKELGSQILKEHPVENTQLQNEKLYLYYLQNGRDMYVDQELDINRLSDYDVDHIVPQSFLKDDSIDNKVLTRSDKARGKSDNVPSEEVVKKMKNYWRQLLNAKLITQRKFDNLTKAERGGLSELDKAGFIKRQLVETRQITKHVAQILDSRMNTKYDENDKLIREVKVITLKSKLVSDFRKDFQFYKVREINNYHHAHDAYLNAVVGTALIKKYPKLESEFVYGDYKVYDVRKMIAKSEQEIGKATAKYFFYSNIMNFFKTEITLANGEIRKRPLIETNGETGEIVWDKGRDFATVRKVLSMPQVNIVKKTEVQTGGFSKESILPKRNSDKLIARKKDWDPKKYGGFDSPTVAYSVLVVAKVEKGKSKKLKSVKELLGITIMERSSFEKNPIDFLEAKGYKEVKKDLIIKLPKYSLFELENGRKRMLASAGELQKGNELALPSKYVNFLYLASHYEKLKGSPEDNEQKQLFVEQHKHYLDEIIEQISEFSKRVILADANLDKVLSAYNKHRDKPIREQAENIIHLFTLTNLGAPAAFKYFDTTIDRKRYTSTKEVLDATLIHQSITGLYETRIDLSQLGGDGGGSSPAPGGTLGIEDEYRLHETSTEPDVSLGSTWLSDFPQAWAETGGMGLAVRQAPLIIPLKATSTPVSIQQYPMSHEARLGIKPHIQRLLDQGILVPCQSPWNTPLLPVKKPGTNDYRPVQDLREVNKRVEDIHPTVPNPYNLLSGLPPSHQWYTVLDLKDAFFCLRLHPTSQPLFAFEWRDPGMGISGQLTWTRLPQGFKNSPTLFDEALHRDLADFRIQHPDLILLQYVDDILLAATSELDCQQGTRALLQTLGDLGYRASAKKAQICQKQVKYLGYLLREGQRWLTEARKETVMGQPVPKTPRQLREFLGTAGFCRLWIPGFAEMAAPLYPLTKTGTLFSWGPDQQKAYQEIKQALLTAPALGLPDLTKPFELFVDEKQGYAKGVLTQKLGPWRRPVAYLSKKLDPVAAGWPPCLRMVAAIAVLTKDAGKLTMGQPLVILAPHAVEALVKQPPDRWLSNARMTHYQAMLLDTDRVQFGPVVALNPATLLPLPEEGAPHDCLEILAETHGTRPDLTDQPIPDADHTWYTDGSSFLQEGQRKAGAAVTTETEVIWAGALPAGTSAQRAELIALTQALKMAEGKRLNVYTDSRYAFATAHIHGEIYRRRGLLTSEGREIKNKSEILALLKALFLPKRLSIIHCLGHQKGDSAEARGNRLADQAAREAAIKTPPDTSTLLAGKRTADGSEFEKRTADGSEFESPKKKAKVE

SEQ ID NO: 2184 - protein, 2096 aa, synthetic construct
MPAAKRVKLDGGDKKYSIGLDIGTNSVGWAVITDEYKVPSKKFKVLGNTDRHSIKKNLIGALLFDSGETAEATRLKRTARRRYTRRKNRICYLQEIFSNEMAKVDDSFFHRLEESFLVEEDKKHERHPIFGNIVDEVAYHEKYPTIYHLRKKLVDSTDKADLRLIYLALAHMIKFRGHFLIEGDLNPDNSDVDKLFIQLVQTYNQLFEENPINASGVDAKAILSARLSKSRRLENLIAQLPGEKKNGLFGNLIALSLGLTPNFKSNFDLAEDAKLQLSKDTYDDDLDNLLAQIGDQYADLFLAAKNLSDAILLSDILRVNTEITKAPLSASMIKRYDEHHQDLTLLKALVRQQLPEKYKEIFFDQSKNGYAGYIDGGASQEEFYKFIKPILEKMDGTEELLVKLNREDLLRKQRTFDNGSIPHQIHLGELHAILRRQEDFYPFLKDNREKIEKILTFRIPYYVGPLARGNSRFAWMTRKSEETITPWNFEEVVDKGASAQSFIERMTNFDKNLPNEKVLPKHSLLYEYFTVYNELTKVKYVTEGMRKPAFLSGEQKKAIVDLLFKTNRKVTVKQLKEDYFKKIECFDSVEISGVEDRFNASLGTYHDLLKIIKDKDFLDNEENEDILEDIVLTLTLFEDREMIEERLKTYAHLFDDKVMKQLKRRRYTGWGRLSRKLINGIRDKQSGKTILDFLKSDGFANRNFMQLIHDDSLTFKEDIQKAQVSGQGDSLHEHIANLAGSPAIKKGILQTVKVVDELVKVMGRHKPENIVIEMARENQTTQKGQKNSRERMKRIEEGIKELGSQILKEHPVENTQLQNEKLYLYYLQNGRDMYVDQELDINRLSDYDVDHIVPQSFLKDDSIDNKVLTRSDKARGKSDNVPSEEVVKKMKNYWRQLLNAKLITQRKFDNLTKAERGGLSELDKAGFIKRQLVETRQITKHVAQILDSRMNTKYDENDKLIREVKVITLKSKLVSDFRKDFQFYKVREINNYHHAHDAYLNAVVGTALIKKYPKLESEFVYGDYKVYDVRKMIAKSEQEIGKATAKYFFYSNIMNFFKTEITLANGEIRKRPLIETNGETGEIVWDKGRDFATVRKVLSMPQVNIVKKTEVQTGGFSKESILPKRNSDKLIARKKDWDPKKYGGFDSPTVAYSVLVVAKVEKGKSKKLKSVKELLGITIMERSSFEKNPIDFLEAKGYKEVKKDLIIKLPKYSLFELENGRKRMLASAGELQKGNELALPSKYVNFLYLASHYEKLKGSPEDNEQKQLFVEQHKHYLDEIIEQISEFSKRVILADANLDKVLSAYNKHRDKPIREQAENIIHLFTLTNLGAPAAFKYFDTTIDRKRYTSTKEVLDATLIHQSITGLYETRIDLSQLGGDGGGGGEAAAKGGSGGTLGIEDEYRLHETSTEPDVSLGSTWLSDFPQAWAETGGMGLAVRQAPLIIPLKATSTPVSIQQYPMSHEARLGIKPHIQRLLDQGILVPCQSPWNTPLLPVKKPGTNDYRPVQDLREVNKRVEDIHPTVPNPYNLLSGLPPSHQWYTVLDLKDAFFCLRLHPTSQPLFAFEWRDPGMGISGQLTWTRLPQGFKNSPTLFDEALHRDLADFRIQHPDLILLQYVDDILLAATSELDCQQGTRALLQTLGDLGYRASAKKAQICQKQVKYLGYLLREGQRWLTEARKETVMGQPVPKTPRQLREFLGTAGFCRLWIPGFAEMAAPLYPLTKTGTLFSWGPDQQKAYQEIKQALLTAPALGLPDLTKPFELFVDEKQGYAKGVLTQKLGPWRRPVAYLSKKLDPVAAGWPPCLRMVAAIAVLTKDAGKLTMGQPLVILAPHAVEALVKQPPDRWLSNARMTHYQAMLLDTDRVQFGPVVALNPATLLPLPEEGAPHDCLEILAETHGTRPDLTDQPIPDADHTWYTDGSSFLQEGQRKAGAAVTTETEVIWAGALPAGTSAQRAELIALTQALKMAEGKRLNVYTDSRYAFATAHIHGEIYRRRGLLTSEGREIKNKSEILALLKALFLPKRLSIIHCLGHQKGDSAEARGNRLADQAAREAAIKTPPDTSTLLAGKRTADGSEFEKRTADGSEFESPKKKAKVE

SEQ ID NO: 2185 - protein, 2096 aa, synthetic construct
MPAAKRVKLDGGDKKYSIGLDIGTNSVGWAVITDEYKVPSKKFKVLGNTDRHSIKKNLIGALLFDSGETAEATRLKRTARRRYTRRKNRICYLQEIFSNEMAKVDDSFFHRLEESFLVEEDKKHERHPIFGNIVDEVAYHEKYPTIYHLRKKLVDSTDKADLRLIYLALAHMIKFRGHFLIEGDLNPDNSDVDKLFIQLVQTYNQLFEENPINASGVDAKAILSARLSKSRRLENLIAQLPGEKKNGLFGNLIALSLGLTPNFKSNFDLAEDAKLQLSKDTYDDDLDNLLAQIGDQYADLFLAAKNLSDAILLSDILRVNTEITKAPLSASMIKRYDEHHQDLTLLKALVRQQLPEKYKEIFFDQSKNGYAGYIDGGASQEEFYKFIKPILEKMDGTEELLVKLNREDLLRKQRTFDNGSIPHQIHLGELHAILRRQEDFYPFLKDNREKIEKILTFRIPYYVGPLARGNSRFAWMTRKSEETITPWNFEEVVDKGASAQSFIERMTNFDKNLPNEKVLPKHSLLYEYFTVYNELTKVKYVTEGMRKPAFLSGEQKKAIVDLLFKTNRKVTVKQLKEDYFKKIECFDSVEISGVEDRFNASLGTYHDLLKIIKDKDFLDNEENEDILEDIVLTLTLFEDREMIEERLKTYAHLFDDKVMKQLKRRRYTGWGRLSRKLINGIRDKQSGKTILDFLKSDGFANRNFMQLIHDDSLTFKEDIQKAQVSGQGDSLHEHIANLAGSPAIKKGILQTVKVVDELVKVMGRHKPENIVIEMARENQTTQKGQKNSRERMKRIEEGIKELGSQILKEHPVENTQLQNEKLYLYYLQNGRDMYVDQELDINRLSDYDVDHIVPQSFLKDDSIDNKVLTRSDKARGKSDNVPSEEVVKKMKNYWRQLLNAKLITQRKFDNLTKAERGGLSELDKAGFIKRQLVETRQITKHVAQILDSRMNTKYDENDKLIREVKVITLKSKLVSDFRKDFQFYKVREINNYHHAHDAYLNAVVGTALIKKYPKLESEFVYGDYKVYDVRKMIAKSEQEIGKATAKYFFYSNIMNFFKTEITLANGEIRKRPLIETNGETGEIVWDKGRDFATVRKVLSMPQVNIVKKTEVQTGGFSKESILPKRNSDKLIARKKDWDPKKYGGFDSPTVAYSVLVVAKVEKGKSKKLKSVKELLGITIMERSSFEKNPIDFLEAKGYKEVKKDLIIKLPKYSLFELENGRKRMLASAGELQKGNELALPSKYVNFLYLASHYEKLKGSPEDNEQKQLFVEQHKHYLDEIIEQISEFSKRVILADANLDKVLSAYNKHRDKPIREQAENIIHLFTLTNLGAPAAFKYFDTTIDRKRYTSTKEVLDATLIHQSITGLYETRIDLSQLGGDGGEAAAKPAPGSSGGTLGIEDEYRLHETSTEPDVSLGSTWLSDFPQAWAETGGMGLAVRQAPLIIPLKATSTPVSIQQYPMSHEARLGIKPHIQRLLDQGILVPCQSPWNTPLLPVKKPGTNDYRPVQDLREVNKRVEDIHPTVPNPYNLLSGLPPSHQWYTVLDLKDAFFCLRLHPTSQPLFAFEWRDPGMGISGQLTWTRLPQGFKNSPTLFDEALHRDLADFRIQHPDLILLQYVDDILLAATSELDCQQGTRALLQTLGDLGYRASAKKAQICQKQVKYLGYLLREGQRWLTEARKETVMGQPVPKTPRQLREFLGTAGFCRLWIPGFAEMAAPLYPLTKTGTLFSWGPDQQKAYQEIKQALLTAPALGLPDLTKPFELFVDEKQGYAKGVLTQKLGPWRRPVAYLSKKLDPVAAGWPPCLRMVAAIAVLTKDAGKLTMGQPLVILAPHAVEALVKQPPDRWLSNARMTHYQAMLLDTDRVQFGPVVALNPATLLPLPEEGAPHDCLEILAETHGTRPDLTDQPIPDADHTWYTDGSSFLQEGQRKAGAAVTTETEVIWAGALPAGTSAQRAELIALTQALKMAEGKRLNVYTDSRYAFATAHIHGEIYRRRGLLTSEGREIKNKSEILALLKALFLPKRLSIIHCLGHQKGDSAEARGNRLADQAAREAAIKTPPDTSTLLAGKRTADGSEFEKRTADGSEFESPKKKAKVE

SEQ ID NO: 2186 - protein, 2096 aa, synthetic construct; identical to SEQ ID NO: 2069

SEQ ID NO: 2187 - protein, 2096 aa, synthetic construct
MPAAKRVKLDGGDKKYSIGLDIGTNSVGWAVITDEYKVPSKKFKVLGNTDRHSIKKNLIGALLFDSGETAEATRLKRTARRRYTRRKNRICYLQEIFSNEMAKVDDSFFHRLEESFLVEEDKKHERHPIFGNIVDEVAYHEKYPTIYHLRKKLVDSTDKADLRLIYLALAHMIKFRGHFLIEGDLNPDNSDVDKLFIQLVQTYNQLFEENPINASGVDAKAILSARLSKSRRLENLIAQLPGEKKNGLFGNLIALSLGLTPNFKSNFDLAEDAKLQLSKDTYDDDLDNLLAQIGDQYADLFLAAKNLSDAILLSDILRVNTEITKAPLSASMIKRYDEHHQDLTLLKALVRQQLPEKYKEIFFDQSKNGYAGYIDGGASQEEFYKFIKPILEKMDGTEELLVKLNREDLLRKQRTFDNGSIPHQIHLGELHAILRRQEDFYPFLKDNREKIEKILTFRIPYYVGPLARGNSRFAWMTRKSEETITPWNFEEVVDKGASAQSFIERMTNFDKNLPNEKVLPKHSLLYEYFTVYNELTKVKYVTEGMRKPAFLSGEQKKAIVDLLFKTNRKVTVKQLKEDYFKKIECFDSVEISGVEDRFNASLGTYHDLLKIIKDKDFLDNEENEDILEDIVLTLTLFEDREMIEERLKTYAHLFDDKVMKQLKRRRYTGWGRLSRKLINGIRDKQSGKTILDFLKSDGFANRNFMQLIHDDSLTFKEDIQKAQVSGQGDSLHEHIANLAGSPAIKKGILQTVKVVDELVKVMGRHKPENIVIEMARENQTTQKGQKNSRERMKRIEEGIKELGSQILKEHPVENTQLQNEKLYLYYLQNGRDMYVDQELDINRLSDYDVDHIVPQSFLKDDSIDNKVLTRSDKARGKSDNVPSEEVVKKMKNYWRQLLNAKLITQRKFDNLTKAERGGLSELDKAGFIKRQLVETRQITKHVAQILDSRMNTKYDENDKLIREVKVITLKSKLVSDFRKDFQFYKVREINNYHHAHDAYLNAVVGTALIKKYPKLESEFVYGDYKVYDVRKMIAKSEQEIGKATAKYFFYSNIMNFFKTEITLANGEIRKRPLIETNGETGEIVWDKGRDFATVRKVLSMPQVNIVKKTEVQTGGFSKESILPKRNSDKLIARKKDWDPKKYGGFDSPTVAYSVLVVAKVEKGKSKKLKSVKELLGITIMERSSFEKNPIDFLEAKGYKEVKKDLIIKLPKYSLFELENGRKRMLASAGELQKGNELALPSKYVNFLYLASHYEKLKGSPEDNEQKQLFVEQHKHYLDEIIEQISEFSKRVILADANLDKVLSAYNKHRDKPIREQAENIIHLFTLTNLGAPAAFKYFDTTIDRKRYTSTKEVLDATLIHQSITGLYETRIDLSQLGGDGGPAPAPAPAPAPGGTLGIEDEYRLHETSTEPDVSLGSTWLSDFPQAWAETGGMGLAVRQAPLIIPLKATSTPVSIQQYPMSHEARLGIKPHIQRLLDQGILVPCQSPWNTPLLPVKKPGTNDYRPVQDLREVNKRVEDIHPTVPNPYNLLSGLPPSHQWYTVLDLKDAFFCLRLHPTSQPLFAFEWRDPGMGISGQLTWTRLPQGFKNSPTLFNEALHRDLADFRIQHPDLILLQYVDDILLAATSELDCQQGTRALLQTLGDLGYRASAKKAQICQKQVKYLGYLLREGQRWLTEARKETVMGQPVPKTPRQLREFLGTAGFCRLWIPGFAEMAAPLYPLTKPGTLFSWGPDQQKAYQEIKQALLTAPALGLPDLTKPFELFVDEKQGYAKGVLTQKLGPWRRPVAYLSKKLDPVAAGWPPCLRMVAAIAVLTKDAGKLTMGQPLVILAPHAVEALVKQPPDRWLSNARMTHYQAMLLDTDRVQFGPVVALNPATLLPLPEEGAPHDCLEILAETHGTRPDLTDQPIPDADHTWYTDGSSFLQEGQRKAGAAVTTETEVIWAGALPAGTSAQRAELIALTQALKMAEGKRLNVYTDSRYAFATAHIHGEIYRRRGWLTSEGREIKNKSEILALLKALFLPKRLSIIHCLGHQKGDSAEARGNRLADQAAREAAIKTPPDTSTLLAGKRTADGSEFEKRTADGSEFESPKKKAKVE

SEQ ID NO: 2188 - protein, 2110 aa, synthetic construct
MPAAKRVKLDGGDKKYSIGLDIGTNSVGWAVITDEYKVPSKKFKVLGNTDRHSIKKNLIGALLFDSGETAEATRLKRTARRRYTRRKNRICYLQEIFSNEMAKVDDSFFHRLEESFLVEEDKKHERHPIFGNIVDEVAYHEKYPTIYHLRKKLVDSTDKADLRLIYLALAHMIKFRGHFLIEGDLNPDNSDVDKLFIQLVQTYNQLFEENPINASGVDAKAILSARLSKSRRLENLIAQLPGEKKNGLFGNLIALSLGLTPNFKSNFDLAEDAKLQLSKDTYDDDLDNLLAQIGDQYADLFLAAKNLSDAILLSDILRVNTEITKAPLSASMIKRYDEHHQDLTLLKALVRQQLPEKYKEIFFDQSKNGYAGYIDGGASQEEFYKFIKPILEKMDGTEELLVKLNREDLLRKQRTFDNGSIPHQIHLGELHAILRRQEDFYPFLKDNREKIEKILTFRIPYYVGPLARGNSRFAWMTRKSEETITPWNFEEVVDKGASAQSFIERMTNFDKNLPNEKVLPKHSLLYEYFTVYNELTKVKYVTEGMRKPAFLSGEQKKAIVDLLFKTNRKVTVKQLKEDYFKKIECFDSVEISGVEDRFNASLGTYHDLLKIIKDKDFLDNEENEDILEDIVLTLTLFEDREMIEERLKTYAHLFDDKVMKQLKRRRYTGWGRLSRKLINGIRDKQSGKTILDFLKSDGFANRNFMQLIHDDSLTFKEDIQKAQVSGQGDSLHEHIANLAGSPAIKKGILQTVKVVDELVKVMGRHKPENIVIEMARENQTTQKGQKNSRERMKRIEEGIKELGSQILKEHPVENTQLQNEKLYLYYLQNGRDMYVDQELDINRLSDYDVDHIVPQSFLKDDSIDNKVLTRSDKARGKSDNVPSEEVVKKMKNYWRQLLNAKLITQRKFDNLTKAERGGLSELDKAGFIKRQLVETRQITKHVAQILDSRMNTKYDENDKLIREVKVITLKSKLVSDFRKDFQFYKVREINNYHHAHDAYLNAVVGTALIKKYPKLESEFVYGDYKVYDVRKMIAKSEQEIGKATAKYFFYSNIMNFFKTEITLANGEIRKRPLIETNGETGEIVWDKGRDFATVRKVLSMPQVNIVKKTEVQTGGFSKESILPKRNSDKLIARKKDWDPKKYGGFDSPTVAYSVLVVAKVEKGKSKKLKSVKELLGITIMERSSFEKNPIDFLEAKGYKEVKKDLIIKLPKYSLFELENGRKRMLASAGELQKGNELALPSKYVNFLYLASHYEKLKGSPEDNEQKQLFVEQHKHYLDEIIEQISEFSKRVILADANLDKVLSAYNKHRDKPIREQAENIIHLFTLTNLGAPAAFKYFDTTIDRKRYTSTKEVLDATLIHQSITGLYETRIDLSQLGGDGGEAAAKEAAAKEAAAKEAAAKEAAAKGGTLGIEDEYRLHETSTEPDVSLGSTWLSDFPQAWAETGGMGLAVRQAPLIIPLKATSTPVSIQQYPMSHEARLGIKPHIQRLLDQGILVPCQSPWNTPLLPVKKPGTNDYRPVQDLREVNKRVEDIHPTVPNPYNLLSGLPPSHQWYTVLDLKDAFFCLRLHPTSQPLFAFEWRDPGMGISGQLTWTRLPQGFKNSPTLFNEALHRDLADFRIQHPDLILLQYVDDILLAATSELDCQQGTRALLQTLGDLGYRASAKKAQICQKQVKYLGYLLREGQRWLTEARKETVMGQPVPKTPRQLREFLGTAGFCRLWIPGFAEMAAPLYPLTKPGTLFSWGPDQQKAYQEIKQALLTAPALGLPDLTKPFELFVDEKQGYAKGVLTQKLGPWRRPVAYLSKKLDPVAAGWPPCLRMVAAIAVLTKDAGKLTMGQPLVILAPHAVEALVKQPPDRWLSNARMTHYQAMLLDTDRVQFGPVVALNPATLLPLPEEGAPHDCLEILAETHGTRPDLTDQPIPDADHTWYTDGSSFLQEGQRKAGAAVTTETEVIWAGALPAGTSAQRAELIALTQALKMAEGKRLNVYTDSRYAFATAHIHGEIYRRRGWLTSEGREIKNKSEILALLKALFLPKRLSIIHCLGHQKGDSAEARGNRLADQAAREAAIKTPPDTSTLLAGKRTADGSEFEKRTADGSEFESPKKKAKVE

SEQ ID NO: 2189 - protein, 2115 aa, synthetic construct
MPAAKRVKLDGGDKKYSIGLDIGTNSVGWAVITDEYKVPSKKFKVLGNTDRHSIKKNLIGALLFDSGETAEATRLKRTARRRYTRRKNRICYLQEIFSNEMAKVDDSFFHRLEESFLVEEDKKHERHPIFGNIVDEVAYHEKYPTIYHLRKKLVDSTDKADLRLIYLALAHMIKFRGHFLIEGDLNPDNSDVDKLFIQLVQTYNQLFEENPINASGVDAKAILSARLSKSRRLENLIAQLPGEKKNGLFGNLIALSLGLTPNFKSNFDLAEDAKLQLSKDTYDDDLDNLLAQIGDQYADLFLAAKNLSDAILLSDILRVNTEITKAPLSASMIKRYDEHHQDLTLLKALVRQQLPEKYKEIFFDQSKNGYAGYIDGGASQEEFYKFIKPILEKMDGTEELLVKLNREDLLRKQRTFDNGSIPHQIHLGELHAILRRQEDFYPFLKDNREKIEKILTFRIPYYVGPLARGNSRFAWMTRKSEETITPWNFEEVVDKGASAQSFIERMTNFDKNLPNEKVLPKHSLLYEYFTVYNELTKVKYVTEGMRKPAFLSGEQKKAIVDLLFKTNRKVTVKQLKEDYFKKIECFDSVEISGVEDRFNASLGTYHDLLKIIKDKDFLDNEENEDILEDIVLTLTLFEDREMIEERLKTYAHLFDDKVMKQLKRRRYTGWGRLSRKLINGIRDKQSGKTILDFLKSDGFANRNFMQLIHDDSLTFKEDIQKAQVSGQGDSLHEHIANLAGSPAIKKGILQTVKVVDELVKVMGRHKPENIVIEMARENQTTQKGQKNSRERMKRIEEGIKELGSQILKEHPVENTQLQNEKLYLYYLQNGRDMYVDQELDINRLSDYDVDHIVPQSFLKDDSIDNKVLTRSDKARGKSDNVPSEEVVKKMKNYWRQLLNAKLITQRKFDNLTKAERGGLSELDKAGFIKRQLVETRQITKHVAQILDSRMNTKYDENDKLIREVKVITLKSKLVSDFRKDFQFYKVREINNYHHAHDAYLNAVVGTALIKKYPKLESEFVYGDYKVYDVRKMIAKSEQEIGKATAKYFFYSNIMNFFKTEITLANGEIRKRPLIETNGETGEIVWDKGRDFATVRKVLSMPQVNIVKKTEVQTGGFSKESILPKRNSDKLIARKKDWDPKKYGGFDSPTVAYSVLVVAKVEKGKSKKLKSVKELLGITIMERSSFEKNPIDFLEAKGYKEVKKDLIIKLPKYSLFELENGRKRMLASAGELQKGNELALPSKYVNFLYLASHYEKLKGSPEDNEQKQLFVEQHKHYLDEIIEQISEFSKRVILADANLDKVLSAYNKHRDKPIREQAENIIHLFTLTNLGAPAAFKYFDTTIDRKRYTSTKEVLDATLIHQSITGLYETRIDLSQLGGDGGEAAAKEAAAKEAAAKEAAAKEAAAKEAAAKGGTLGIEDEYRLHETSTEPDVSLGSTWLSDFPQAWAETGGMGLAVRQAPLIIPLKATSTPVSIQQYPMSHEARLGIKPHIQRLLDQGILVPCQSPWNTPLLPVKKPGTNDYRPVQDLREVNKRVEDIHPTVPNPYNLLSGLPPSHQWYTVLDLKDAFFCLRLHPTSQPLFAFEWRDPGMGISGQLTWTRLPQGFKNSPTLFNEALHRDLADFRIQHPDLILLQYVDDILLAATSELDCQQGTRALLQTLGDLGYRASAKKAQICQKQVKYLGYLLREGQRWLTEARKETVMGQPVPKTPRQLREFLGTAGFCRLWIPGFAEMAAPLYPLTKPGTLFSWGPDQQKAYQEIKQALLTAPALGLPDLTKPFELFVDEKQGYAKGVLTQKLGPWRRPVAYLSKKLDPVAAGWPPCLRMVAAIAVLTKDAGKLTMGQPLVILAPHAVEALVKQPPDRWLSNARMTHYQAMLLDTDRVQFGPVVALNPATLLPLPEEGAPHDCLEILAETHGTRPDLTDQPIPDADHTWYTDGSSFLQEGQRKAGAAVTTETEVIWAGALPAGTSAQRAELIALTQALKMAEGKRLNVYTDSRYAFATAHIHGEIYRRRGWLTSEGREIKNKSEILALLKALFLPKRLSIIHCLGHQKGDSAEARGNRLADQAAREAAIKTPPDTSTLLAGKRTADGSEFEKRTADGSEFESPKKKAKVE

SEQ ID NO: 2190 - protein, 2096 aa, synthetic construct
MPAAKRVKLDGGDKKYSIGLDIGTNSVGWAVITDEYKVPSKKFKVLGNTDRHSIKKNLIGALLFDSGETAEATRLKRTARRRYTRRKNRICYLQEIFSNEMAKVDDSFFHRLEESFLVEEDKKHERHPIFGNIVDEVAYHEKYPTIYHLRKKLVDSTDKADLRLIYLALAHMIKFRGHFLIEGDLNPDNSDVDKLFIQLVQTYNQLFEENPINASGVDAKAILSARLSKSRRLENLIAQLPGEKKNGLFGNLIALSLGLTPNFKSNFDLAEDAKLQLSKDTYDDDLDNLLAQIGDQYADLFLAAKNLSDAILLSDILRVNTEITKAPLSASMIKRYDEHHQDLTLLKALVRQQLPEKYKEIFFDQSKNGYAGYIDGGASQEEFYKFIKPILEKMDGTEELLVKLNREDLLRKQRTFDNGSIPHQIHLGELHAILRRQEDFYPFLKDNREKIEKILTFRIPYYVGPLARGNSRFAWMTRKSEETITPWNFEEVVDKGASAQSFIERMTNFDKNLPNEKVLPKHSLLYEYFTVYNELTKVKYVTEGMRKPAFLSGEQKKAIVDLLFKTNRKVTVKQLKEDYFKKIECFDSVEISGVEDRFNASLGTYHDLLKIIKDKDFLDNEENEDILEDIVLTLTLFEDREMIEERLKTYAHLFDDKVMKQLKRRRYTGWGRLSRKLINGIRDKQSGKTILDFLKSDGFANRNFMQLIHDDSLTFKEDIQKAQVSGQGDSLHEHIANLAGSPAIKKGILQTVKVVDELVKVMGRHKPENIVIEMARENQTTQKGQKNSRERMKRIEEGIKELGSQILKEHPVENTQLQNEKLYLYYLQNGRDMYVDQELDINRLSDYDVDHIVPQSFLKDDSIDNKVLTRSDKARGKSDNVPSEEVVKKMKNYWRQLLNAKLITQRKFDNLTKAERGGLSELDKAGFIKRQLVETRQITKHVAQILDSRMNTKYDENDKLIREVKVITLKSKLVSDFRKDFQFYKVREINNYHHAHDAYLNAVVGTALIKKYPKLESEFVYGDYKVYDVRKMIAKSEQEIGKATAKYFFYSNIMNFFKTEITLANGEIRKRPLIETNGETGEIVWDKGRDFATVRKVLSMPQVNIVKKTEVQTGGFSKESILPKRNSDKLIARKKDWDPKKYGGFDSPTVAYSVLVVAKVEKGKSKKLKSVKELLGITIMERSSFEKNPIDFLEAKGYKEVKKDLIIKLPKYSLFELENGRKRMLASAGELQKGNELALPSKYVNFLYLASHYEKLKGSPEDNEQKQLFVEQHKHYLDEIIEQISEFSKRVILADANLDKVLSAYNKHRDKPIREQAENIIHLFTLTNLGAPAAFKYFDTTIDRKRYTSTKEVLDATLIHQSITGLYETRIDLSQLGGDGGEAAAKGSSGGSGGTLGIEDEYRLHETSTEPDVSLGSTWLSDFPQAWAETGGMGLAVRQAPLIIPLKATSTPVSIQQYPMSHEARLGIKPHIQRLLDQGILVPCQSPWNTPLLPVKKPGTNDYRPVQDLREVNKRVEDIHPTVPNPYNLLSGLPPSHQWYTVLDLKDAFFCLRLHPTSQPLFAFEWRDPGMGISGQLTWTRLPQGFKNSPTLFNEALHRDLADFRIQHPDLILLQYVDDILLAATSELDCQQGTRALLQTLGDLGYRASAKKAQICQKQVKYLGYLLREGQRWLTEARKETVMGQPVPKTPRQLREFLGTAGFCRLWIPGFAEMAAPLYPLTKPGTLFSWGPDQQKAYQEIKQALLTAPALGLPDLTKPFELFVDEKQGYAKGVLTQKLGPWRRPVAYLSKKLDPVAAGWPPCLRMVAAIAVLTKDAGKLTMGQPLVILAPHAVEALVKQPPDRWLSNARMTHYQAMLLDTDRVQFGPVVALNPATLLPLPEEGAPHDCLEILAETHGTRPDLTDQPIPDADHTWYTDGSSFLQEGQRKAGAAVTTETEVIWAGALPAGTSAQRAELIALTQALKMAEGKRLNVYTDSRYAFATAHIHGEIYRRRGWLTSEGREIKNKSEILALLKALFLPKRLSIIHCLGHQKGDSAEARGNRLADQAAREAAIKTPPDTSTLLAGKRTADGSEFEKRTADGSEFESPKKKAKVE

SEQ ID NO: 2191 - protein, 2105 aa, synthetic construct; identical to SEQ ID NO: 2070

SEQ ID NO: 2192 - protein, 2096 aa, synthetic construct
MPAAKRVKLDGGDKKYSIGLDIGTNSVGWAVITDEYKVPSKKFKVLGNTDRHSIKKNLIGALLFDSGETAEATRLKRTARRRYTRRKNRICYLQEIFSNEMAKVDDSFFHRLEESFLVEEDKKHERHPIFGNIVDEVAYHEKYPTIYHLRKKLVDSTDKADLRLIYLALAHMIKFRGHFLIEGDLNPDNSDVDKLFIQLVQTYNQLFEENPINASGVDAKAILSARLSKSRRLENLIAQLPGEKKNGLFGNLIALSLGLTPNFKSNFDLAEDAKLQLSKDTYDDDLDNLLAQIGDQYADLFLAAKNLSDAILLSDILRVNTEITKAPLSASMIKRYDEHHQDLTLLKALVRQQLPEKYKEIFFDQSKNGYAGYIDGGASQEEFYKFIKPILEKMDGTEELLVKLNREDLLRKQRTFDNGSIPHQIHLGELHAILRRQEDFYPFLKDNREKIEKILTFRIPYYVGPLARGNSRFAWMTRKSEETITPWNFEEVVDKGASAQSFIERMTNFDKNLPNEKVLPKHSLLYEYFTVYNELTKVKYVTEGMRKPAFLSGEQKKAIVDLLFKTNRKVTVKQLKEDYFKKIECFDSVEISGVEDRFNASLGTYHDLLKIIKDKDFLDNEENEDILEDIVLTLTLFEDREMIEERLKTYAHLFDDKVMKQLKRRRYTGWGRLSRKLINGIRDKQSGKTILDFLKSDGFANRNFMQLIHDDSLTFKEDIQKAQVSGQGDSLHEHIANLAGSPAIKKGILQTVKVVDELVKVMGRHKPENIVIEMARENQTTQKGQKNSRERMKRIEEGIKELGSQILKEHPVENTQLQNEKLYLYYLQNGRDMYVDQELDINRLSDYDVDHIVPQSFLKDDSIDNKVLTRSDKARGKSDNVPSEEVVKKMKNYWRQLLNAKLITQRKFDNLTKAERGGLSELDKAGFIKRQLVETRQITKHVAQILDSRMNTKYDENDKLIREVKVITLKSKLVSDFRKDFQFYKVREINNYHHAHDAYLNAVVGTALIKKYPKLESEFVYGDYKVYDVRKMIAKSEQEIGKATAKYFFYSNIMNFFKTEITLANGEIRKRPLIETNGETGEIVWDKGRDFATVRKVLSMPQVNIVKKTEVQTGGFSKESILPKRNSDKLIARKKDWDPKKYGGFDSPTVAYSVLVVAKVEKGKSKKLKSVKELLGITIMERSSFEKNPIDFLEAKGYKEVKKDLIIKLPKYSLFELENGRKRMLASAGELQKGNELALPSKYVNFLYLASHYEKLKGSPEDNEQKQLFVEQHKHYLDEIIEQISEFSKRVILADANLDKVLSAYNKHRDKPIREQAENIIHLFTLTNLGAPAAFKYFDTTIDRKRYTSTKEVLDATLIHQSITGLYETRIDLSQLGGDGGGGSPAPEAAAKGGTLGIEDEYRLHETSTEPDVSLGSTWLSDFPQAWAETGGMGLAVRQAPLIIPLKATSTPVSIQQYPMSHEARLGIKPHIQRLLDQGILVPCQSPWNTPLLPVKKPGTNDYRPVQDLREVNKRVEDIHPTVPNPYNLLSGLPPSHQWYTVLDLKDAFFCLRLHPTSQPLFAFEWRDPGMGISGQLTWTRLPQGFKNSPTLFNEALHRDLADFRIQHPDLILLQYVDDILLAATSELDCQQGTRALLQTLGDLGYRASAKKAQICQKQVKYLGYLLREGQRWLTEARKETVMGQPVPKTPRQLREFLGTAGFCRLWIPGFAEMAAPLYPLTKPGTLFSWGPDQQKAYQEIKQALLTAPALGLPDLTKPFELFVDEKQGYAKGVLTQKLGPWRRPVAYLSKKLDPVAAGWPPCLRMVAAIAVLTKDAGKLTMGQPLVILAPHAVEALVKQPPDRWLSNARMTHYQAMLLDTDRVQFGPVVALNPATLLPLPEEGAPHDCLEILAETHGTRPDLTDQPIPDADHTWYTDGSSFLQEGQRKAGAAVTTETEVIWAGALPAGTSAQRAELIALTQALKMAEGKRLNVYTDSRYAFATAHIHGEIYRRRGWLTSEGREIKNKSEILALLKALFLPKRLSIIHCLGHQKGDSAEARGNRLADQAAREAAIKTPPDTSTLLAGKRTADGSEFEKRTADGSEFESPKKKAKVE

SEQ ID NO: 2193 - protein, 2115 aa, synthetic construct
MPAAKRVKLDGGDKKYSIGLDIGTNSVGWAVITDEYKVPSKKFKVLGNTDRHSIKKNLIGALLFDSGETAEATRLKRTARRRYTRRKNRICYLQEIFSNEMAKVDDSFFHRLEESFLVEEDKKHERHPIFGNIVDEVAYHEKYPTIYHLRKKLVDSTDKADLRLIYLALAHMIKFRGHFLIEGDLNPDNSDVDKLFIQLVQTYNQLFEENPINASGVDAKAILSARLSKSRRLENLIAQLPGEKKNGLFGNLIALSLGLTPNFKSNFDLAEDAKLQLSKDTYDDDLDNLLAQIGDQYADLFLAAKNLSDAILLSDILRVNTEITKAPLSASMIKRYDEHHQDLTLLKALVRQQLPEKYKEIFFDQSKNGYAGYIDGGASQEEFYKFIKPILEKMDGTEELLVKLNREDLLRKQRTFDNGSIPHQIHLGELHAILRRQEDFYPFLKDNREKIEKILTFRIPYYVGPLARGNSRFAWMTRKSEETITPWNFEEVVDKGASAQSFIERMTNFDKNLPNEKVLPKHSLLYEYFTVYNELTKVKYVTEGMRKPAFLSGEQKKAIVDLLFKTNRKVTVKQLKEDYFKKIECFDSVEISGVEDRFNASLGTYHDLLKIIKDKDFLDNEENEDILEDIVLTLTLFEDREMIEERLKTYAHLFDDKVMKQLKRRRYTGWGRLSRKLINGIRDKQSGKTILDFLKSDGFANRNFMQLIHDDSLTFKEDIQKAQVSGQGDSLHEHIANLAGSPAIKKGILQTVKVVDELVKVMGRHKPENIVIEMARENQTTQKGQKNSRERMKRIEEGIKELGSQILKEHPVENTQLQNEKLYLYYLQNGRDMYVDQELDINRLSDYDVDHIVPQSFLKDDSIDNKVLTRSDKARGKSDNVPSEEVVKKMKNYWRQLLNAKLITQRKFDNLTKAERGGLSELDKAGFIKRQLVETRQITKHVAQILDSRMNTKYDENDKLIREVKVITLKSKLVSDFRKDFQFYKVREINNYHHAHDAYLNAVVGTALIKKYPKLESEFVYGDYKVYDVRKMIAKSEQEIGKATAKYFFYSNIMNFFKTEITLANGEIRKRPLIETNGETGEIVWDKGRDFATVRKVLSMPQVNIVKKTEVQTGGFSKESILPKRNSDKLIARKKDWDPKKYGGFDSPTVAYSVLVVAKVEKGKSKKLKSVKELLGITIMERSSFEKNPIDFLEAKGYKEVKKDLIIKLPKYSLFELENGRKRMLASAGELQKGNELALPSKYVNFLYLASHYEKLKGSPEDNEQKQLFVEQHKHYLDEIIEQISEFSKRVILADANLDKVLSAYNKHRDKPIREQAENIIHLFTLTNLGAPAAFKYFDTTIDRKRYTSTKEVLDATLIHQSITGLYETRIDLSQLGGDGGGGGGSGGGGSGGGGSGGGGSGGGGSGGGGSGGTLGIEDEYRLHETSTEPDVSLGSTWLSDFPQAWAETGGMGLAVRQAPLIIPLKATSTPVSIQQYPMSHEARLGIKPHIQRLLDQGILVPCQSPWNTPLLPVKKPGTNDYRPVQDLREVNKRVEDIHPTVPNPYNLLSGLPPSHQWYTVLDLKDAFFCLRLHPTSQPLFAFEWRDPGMGISGQLTWTRLPQGFKNSPTLFNEALHRDLADFRIQHPDLILLQYVDDILLAATSELDCQQGTRALLQTLGDLGYRASAKKAQICQKQVKYLGYLLREGQRWLTEARKETVMGQPVPKTPRQLREFLGTAGFCRLWIPGFAEMAAPLYPLTKPGTLFSWGPDQQKAYQEIKQALLTAPALGLPDLTKPFELFVDEKQGYAKGVLTQKLGPWRRPVAYLSKKLDPVAAGWPPCLRMVAAIAVLTKDAGKLTMGQPLVILAPHAVEALVKQPPDRWLSNARMTHYQAMLLDTDRVQFGPVVALNPATLLPLPEEGAPHDCLEILAETHGTRPDLTDQPIPDADHTWYTDGSSFLQEGQRKAGAAVTTETEVIWAGALPAGTSAQRAELIALTQALKMAEGKRLNVYTDSRYAFATAHIHGEIYRRRGWLTSEGREIKNKSEILALLKALFLPKRLSIIHCLGHQKGDSAEARGNRLADQAAREAAIKTPPDTSTLLAGKRTADGSEFEKRTADGSEFESPKKKAKVE

SEQ ID NO: 2194 - protein, 2131 aa, synthetic construct
MPAAKRVKLDGGDKKYSIGLDIGTNSVGWAVITDEYKVPSKKFKVLGNTDRHSIKKNLIGALLFDSGETAEATRLKRTARRRYTRRKNRICYLQEIFSNEMAKVDDSFFHRLEESFLVEEDKKHERHPIFGNIVDEVAYHEKYPTIYHLRKKLVDSTDKADLRLIYLALAHMIKFRGHFLIEGDLNPDNSDVDKLFIQLVQTYNQLFEENPINASGVDAKAILSARLSKSRRLENLIAQLPGEKKNGLFGNLIALSLGLTPNFKSNFDLAEDAKLQLSKDTYDDDLDNLLAQIGDQYADLFLAAKNLSDAILLSDILRVNTEITKAPLSASMIKRYDEHHQDLTLLKALVRQQLPEKYKEIFFDQSKNGYAGYIDGGASQEEFYKFIKPILEKMDGTEELLVKLNREDLLRKQRTFDNGSIPHQIHLGELHAILRRQEDFYPFLKDNREKIEKILTFRIPYYVGPLARGNSRFAWMTRKSEETITPWNFEEVVDKGASAQSFIERMTNFDKNLPNEKVLPKHSLLYEYFTVYNELTKVKYVTEGMRKPAFLSGEQKKAIVDLLFKTNRKVTVKQLKEDYFKKIECFDSVEISGVEDRFNASLGTYHDLLKIIKDKDFLDNEENEDILEDIVLTLTLFEDREMIEERLKTYAHLFDDKVMKQLKRRRYTGWGRLSRKLINGIRDKQSGKTILDFLKSDGFANRNFMQLIHDDSLTFKEDIQKAQVSGQGDSLHEHIANLAGSPAIKKGILQTVKVVDELVKVMGRHKPENIVIEMARENQTTQKGQKNSRERMKRIEEGIKELGSQILKEHPVENTQLQNEKLYLYYLQNGRDMYVDQELDINRLSDYDVDHIVPQSFLKDDSIDNKVLTRSDKARGKSDNVPSEEVVKKMKNYWRQLLNAKLITQRKFDNLTKAERGGLSELDKAGFIKRQLVETRQITKHVAQILDSRMNTKYDENDKLIREVKVITLKSKLVSDFRKDFQFYKVREINNYHHAHDAYLNAVVGTALIKKYPKLESEFVYGDYKVYDVRKMIAKSEQEIGKATAKYFFYSNIMNFFKTEITLANGEIRKRPLIETNGETGEIVWDKGRDFATVRKVLSMPQVNIVKKTEVQTGGFSKESILPKRNSDKLIARKKDWDPKKYGGFDSPTVAYSVLVVAKVEKGKSKKLKSVKELLGITIMERSSFEKNPIDFLEAKGYKEVKKDLIIKLPKYSLFELENGRKRMLASAGELQKGNELALPSKYVNFLYLASHYEKLKGSPEDNEQKQLFVEQHKHYLDEIIEQISEFSKRVILADANLDKVLSAYNKHRDKPIREQAENIIHLFTLTNLGAPAAFKYFDTTIDRKRYTSTKEVLDATLIHQSITGLYETRIDLSQLGGDGGAEAAAKEAAAKEAAAKEAAAKALEAEAAAKEAAAKEAAAKEAAAKAGGTLGIEDEYRLHETSTEPDVSLGSTWLSDFPQAWAETGGMGLAVRQAPLIIPLKATSTPVSIQQYPMSHEARLGIKPHIQRLLDQGILVPCQSPWNTPLLPVKKPGTNDYRPVQDLREVNKRVEDIHPTVPNPYNLLSGLPPSHQWYTVLDLKDAFFCLRLHPTSQPLFAFEWRDPGMGISGQLTWTRLPQGFKNSPTLFNEALHRDLADFRIQHPDLILLQYVDDILLAATSELDCQQGTRALLQTLGDLGYRASAKKAQICQKQVKYLGYLLREGQRWLTEARKETVMGQPVPKTPRQLREFLGTAGFCRLWIPGFAEMAAPLYPLTKPGTLFSWGPDQQKAYQEIKQALLTAPALGLPDLTKPFELFVDEKQGYAKGVLTQKLGPWRRPVAYLSKKLDPVAAGWPPCLRMVAAIAVLTKDAGKLTMGQPLVILAPHAVEALVKQPPDRWLSNARMTHYQAMLLDTDRVQFGPVVALNPATLLPLPEEGAPHDCLEILAETHGTRPDLTDQPIPDADHTWYTDGSSFLQEGQRKAGAAVTTETEVIWAGALPAGTSAQRAELIALTQALKMAEGKRLNVYTDSRYAFATAHIHGEIYRRRGWLTSEGREIKNKSEILALLKALFLPKRLSIIHCLGHQKGDSAEARGNRLADQAAREAAIKTPPDTSTLLAGKRTADGSEFEKRTADGSEFESPKKKAKVE

SEQ ID NO: 2195 - protein, 2096 aa, synthetic construct; identical to SEQ ID NO: 2076

SEQ ID NO: 2196 - protein, 2096 aa, synthetic construct
MPAAKRVKLDGGDKKYSIGLDIGTNSVGWAVITDEYKVPSKKFKVLGNTDRHSIKKNLIGALLFDSGETAEATRLKRTARRRYTRRKNRICYLQEIFSNEMAKVDDSFFHRLEESFLVEEDKKHERHPIFGNIVDEVAYHEKYPTIYHLRKKLVDSTDKADLRLIYLALAHMIKFRGHFLIEGDLNPDNSDVDKLFIQLVQTYNQLFEENPINASGVDAKAILSARLSKSRRLENLIAQLPGEKKNGLFGNLIALSLGLTPNFKSNFDLAEDAKLQLSKDTYDDDLDNLLAQIGDQYADLFLAAKNLSDAILLSDILRVNTEITKAPLSASMIKRYDEHHQDLTLLKALVRQQLPEKYKEIFFDQSKNGYAGYIDGGASQEEFYKFIKPILEKMDGTEELLVKLNREDLLRKQRTFDNGSIPHQIHLGELHAILRRQEDFYPFLKDNREKIEKILTFRIPYYVGPLARGNSRFAWMTRKSEETITPWNFEEVVDKGASAQSFIERMTNFDKNLPNEKVLPKHSLLYEYFTVYNELTKVKYVTEGMRKPAFLSGEQKKAIVDLLFKTNRKVTVKQLKEDYFKKIECFDSVEISGVEDRFNASLGTYHDLLKIIKDKDFLDNEENEDILEDIVLTLTLFEDREMIEERLKTYAHLFDDKVMKQLKRRRYTGWGRLSRKLINGIRDKQSGKTILDFLKSDGFANRNFMQLIHDDSLTFKEDIQKAQVSGQGDSLHEHIANLAGSPAIKKGILQTVKVVDELVKVMGRHKPENIVIEMARENQTTQKGQKNSRERMKRIEEGIKELGSQILKEHPVENTQLQNEKLYLYYLQNGRDMYVDQELDINRLSDYDVDHIVPQSFLKDDSIDNKVLTRSDKARGKSDNVPSEEVVKKMKNYWRQLLNAKLITQRKFDNLTKAERGGLSELDKAGFIKRQLVETRQITKHVAQILDSRMNTKYDENDKLIREVKVITLKSKLVSDFRKDFQFYKVREINNYHHAHDAYLNAVVGTALIKKYPKLESEFVYGDYKVYDVRKMIAKSEQEIGKATAKYFFYSNIMNFFKTEITLANGEIRKRPLIETNGETGEIVWDKGRDFATVRKVLSMPQVNIVKKTEVQTGGFSKESILPKRNSDKLIARKKDWDPKKYGGFDSPTVAYSVLVVAKVEKGKSKKLKSVKELLGITIMERSSFEKNPIDFLEAKGYKEVKKDLIIKLPKYSLFELENGRKRMLASAGELQKGNELALPSKYVNFLYLASHYEKLKGSPEDNEQKQLFVEQHKHYLDEIIEQISEFSKRVILADANLDKVLSAYNKHRDKPIREQAENIIHLFTLTNLGAPAAFKYFDTTIDRKRYTSTKEVLDATLIHQSITGLYETRIDLSQLGGDGGGGGGSSEAAAKGGTLGIEDEYRLHETSTEPDVSLGSTWLSDFPQAWAETGGMGLAVRQAPLIIPLKATSTPVSIQQYPMSHEARLGIKPHIQRLLDQGILVPCQSPWNTPLLPVKKPGTNDYRPVQDLREVNKRVEDIHPTVPNPYNLLSGLPPSHQWYTVLDLKDAFFCLRLHPTSQPLFAFEWRDPGMGISGQLTWTRLPQGFKNSPTLFNEALHRDLADFRIQHPDLILLQYVDDILLAATSELDCQQGTRALLQTLGDLGYRASAKKAQICQKQVKYLGYLLREGQRWLTEARKETVMGQPVPKTPRQLREFLGTAGFCRLWIPGFAEMAAPLYPLTKPGTLFSWGPDQQKAYQEIKQALLTAPALGLPDLTKPFELFVDEKQGYAKGVLTQKLGPWRRPVAYLSKKLDPVAAGWPPCLRMVAAIAVLTKDAGKLTMGQPLVILAPHAVEALVKQPPDRWLSNARMTHYQAMLLDTDRVQFGPVVALNPATLLPLPEEGAPHDCLEILAETHGTRPDLTDQPIPDADHTWYTDGSSFLQEGQRKAGAAVTTETEVIWAGALPAGTSAQRAELIALTQALKMAEGKRLNVYTDSRYAFATAHIHGEIYRRRGWLTSEGREIKNKSEILALLKALFLPKRLSIIHCLGHQKGDSAEARGNRLADQAAREAAIKTPPDTSTLLAGKRTADGSEFEKRTADGSEFESPKKKAKVE

SEQ ID NO: 2197 - protein, 2096 aa, synthetic construct
MPAAKRVKLDGGDKKYSIGLDIGTNSVGWAVITDEYKVPSKKFKVLGNTDRHSIKKNLIGALLFDSGETAEATRLKRTARRRYTRRKNRICYLQEIFSNEMAKVDDSFFHRLEESFLVEEDKKHERHPIFGNIVDEVAYHEKYPTIYHLRKKLVDSTDKADLRLIYLALAHMIKFRGHFLIEGDLNPDNSDVDKLFIQLVQTYNQLFEENPINASGVDAKAILSARLSKSRRLENLIAQLPGEKKNGLFGNLIALSLGLTPNFKSNFDLAEDAKLQLSKDTYDDDLDNLLAQIGDQYADLFLAAKNLSDAILLSDILRVNTEITKAPLSASMIKRYDEHHQDLTLLKALVRQQLPEKYKEIFFDQSKNGYAGYIDGGASQEEFYKFIKPILEKMDGTEELLVKLNREDLLRKQRTFDNGSIPHQIHLGELHAILRRQEDFYPFLKDNREKIEKILTFRIPYYVGPLARGNSRFAWMTRKSEETITPWNFEEVVDKGASAQSFIERMTNFDKNLPNEKVLPKHSLLYEYFTVYNELTKVKYVTEGMRKPAFLSGEQKKAIVDLLFKTNRKVTVKQLKEDYFKKIECFDSVEISGVEDRFNASLGTYHDLLKIIKDKDFLDNEENEDILEDIVLTLTLFEDREMIEERLKTYAHLFDDKVMKQLKRRRYTGWGRLSRKLINGIRDKQSGKTILDFLKSDGFANRNFMQLIHDDSLTFKEDIQKAQVSGQGDSLHEHIANLAGSPAIKKGILQTVKVVDELVKVMGRHKPENIVIEMARENQTTQKGQKNSRERMKRIEEGIKELGSQILKEHPVENTQLQNEKLYLYYLQNGRDMYVDQELDINRLSDYDVDHIVPQSFLKDDSIDNKVLTRSDKARGKSDNVPSEEVVKKMKNYWRQLLNAKLITQRKFDNLTKAERGGLSELDKAGFIKRQLVETRQITKHVAQILDSRMNTKYDENDKLIREVKVITLKSKLVSDFRKDFQFYKVREINNYHHAHDAYLNAVVGTALIKKYPKLESEFVYGDYKVYDVRKMIAKSEQEIGKATAKYFFYSNIMNFFKTEITLANGEIRKRPLIETNGETGEIVWDKGRDFATVRKVLSMPQVNIVKKTEVQTGGFSKESILPKRNSDKLIARKKDWDPKKYGGFDSPTVAYSVLVVAKVEKGKSKKLKSVKELLGITIMERSSFEKNPIDFLEAKGYKEVKKDLIIKLPKYSLFELENGRKRMLASAGELQKGNELALPSKYVNFLYLASHYEKLKGSPEDNEQKQLFVEQHKHYLDEIIEQISEFSKRVILADANLDKVLSAYNKHRDKPIREQAENIIHLFTLTNLGAPAAFKYFDTTIDRKRYTSTKEVLDATLIHQSITGLYETRIDLSQLGGDGGPAPEAAAKGGGGGTLGIEDEYRLHETSTEPDVSLGSTWLSDFPQAWAETGGMGLAVRQAPLIIPLKATSTPVSIQQYPMSHEARLGIKPHIQRLLDQGILVPCQSPWNTPLLPVKKPGTNDYRPVQDLREVNKRVEDIHPTVPNPYNLLSGLPPSHQWYTVLDLKDAFFCLRLHPTSQPLFAFEWRDPGMGISGQLTWTRLPQGFKNSPTLFNEALHRDLADFRIQHPDLILLQYVDDILLAATSELDCQQGTRALLQTLGDLGYRASAKKAQICQKQVKYLGYLLREGQRWLTEARKETVMGQPVPKTPRQLREFLGTAGFCRLWIPGFAEMAAPLYPLTKPGTLFSWGPDQQKAYQEIKQALLTAPALGLPDLTKPFELFVDEKQGYAKGVLTQKLGPWRRPVAYLSKKLDPVAAGWPPCLRMVAAIAVLTKDAGKLTMGQPLVILAPHAVEALVKQPPDRWLSNARMTHYQAMLLDTDRVQFGPVVALNPATLLPLPEEGAPHDCLEILAETHGTRPDLTDQPIPDADHTWYTDGSSFLQEGQRKAGAAVTTETEVIWAGALPAGTSAQRAELIALTQALKMAEGKRLNVYTDSRYAFATAHIHGEIYRRRGWLTSEGREIKNKSEILALLKALFLPKRLSIIHCLGHQKGDSAEARGNRLADQAAREAAIKTPPDTSTLLAGKRTADGSEFEKRTADGSEFESPKKKAKVE

SEQ ID NO: 2198 - protein, 2090 aa, synthetic construct
MPAAKRVKLDGGDKKYSIGLDIGTNSVGWAVITDEYKVPSKKFKVLGNTDRHSIKKNLIGALLFDSGETAEATRLKRTARRRYTRRKNRICYLQEIFSNEMAKVDDSFFHRLEESFLVEEDKKHERHPIFGNIVDEVAYHEKYPTIYHLRKKLVDSTDKADLRLIYLALAHMIKFRGHFLIEGDLNPDNSDVDKLFIQLVQTYNQLFEENPINASGVDAKAILSARLSKSRRLENLIAQLPGEKKNGLFGNLIALSLGLTPNFKSNFDLAEDAKLQLSKDTYDDDLDNLLAQIGDQYADLFLAAKNLSDAILLSDILRVNTEITKAPLSASMIKRYDEHHQDLTLLKALVRQQLPEKYKEIFFDQSKNGYAGYIDGGASQEEFYKFIKPILEKMDGTEELLVKLNREDLLRKQRTFDNGSIPHQIHLGELHAILRRQEDFYPFLKDNREKIEKILTFRIPYYVGPLARGNSRFAWMTRKSEETITPWNFEEVVDKGASAQSFIERMTNFDKNLPNEKVLPKHSLLYEYFTVYNELTKVKYVTEGMRKPAFLSGEQKKAIVDLLFKTNRKVTVKQLKEDYFKKIECFDSVEISGVEDRFNASLGTYHDLLKIIKDKDFLDNEENEDILEDIVLTLTLFEDREMIEERLKTYAHLFDDKVMKQLKRRRYTGWGRLSRKLINGIRDKQSGKTILDFLKSDGFANRNFMQLIHDDSLTFKEDIQKAQVSGQGDSLHEHIANLAGSPAIKKGILQTVKVVDELVKVMGRHKPENIVIEMARENQTTQKGQKNSRERMKRIEEGIKELGSQILKEHPVENTQLQNEKLYLYYLQNGRDMYVDQELDINRLSDYDVDHIVPQSFLKDDSIDNKVLTRSDKARGKSDNVPSEEVVKKMKNYWRQLLNAKLITQRKFDNLTKAERGGLSELDKAGFIKRQLVETRQITKHVAQILDSRMNTKYDENDKLIREVKVITLKSKLVSDFRKDFQFYKVREINNYHHAHDAYLNAVVGTALIKKYPKLESEFVYGDYKVYDVRKMIAKSEQEIGKATAKYFFYSNIMNFFKTEITLANGEIRKRPLIETNGETGEIVWDKGRDFATVRKVLSMPQVNIVKKTEVQTGGFSKESILPKRNSDKLIARKKDWDPKKYGGFDSPTVAYSVLVVAKVEKGKSKKLKSVKELLGITIMERSSFEKNPIDFLEAKGYKEVKKDLIIKLPKYSLFELENGRKRMLASAGELQKGNELALPSKYVNFLYLASHYEKLKGSPEDNEQKQLFVEQHKHYLDEIIEQISEFSKRVILADANLDKVLSAYNKHRDKPIREQAENIIHLFTLTNLGAPAAFKYFDTTIDRKRYTSTKEVLDATLIHQSITGLYETRIDLSQLGGDGGEAAAKGGTLGIEDEYRLHETSTEPDVSLGSTWLSDFPQAWAETGGMGLAVRQAPLIIPLKATSTPVSIQQYPMSHEARLGIKPHIQRLLDQGILVPCQSPWNTPLLPVKKPGTNDYRPVQDLREVNKRVEDIHPTVPNPYNLLSGLPPSHQWYTVLDLKDAFFCLRLHPTSQPLFAFEWRDPGMGISGQLTWTRLPQGFKNSPTLFNEALHRDLADFRIQHPDLILLQYVDDILLAATSELDCQQGTRALLQTLGDLGYRASAKKAQICQKQVKYLGYLLREGQRWLTEARKETVMGQPVPKTPRQLREFLGTAGFCRLWIPGFAEMAAPLYPLTKPGTLFSWGPDQQKAYQEIKQALLTAPALGLPDLTKPFELFVDEKQGYAKGVLTQKLGPWRRPVAYLSKKLDPVAAGWPPCLRMVAAIAVLTKDAGKLTMGQPLVILAPHAVEALVKQPPDRWLSNARMTHYQAMLLDTDRVQFGPVVALNPATLLPLPEEGAPHDCLEILAETHGTRPDLTDQPIPDADHTWYTDGSSFLQEGQRKAGAAVTTETEVIWAGALPAGTSAQRAELIALTQALKMAEGKRLNVYTDSRYAFATAHIHGEIYRRRGWLTSEGREIKNKSEILALLKALFLPKRLSIIHCLGHQKGDSAEARGNRLADQAAREAAIKTPPDTSTLLAGKRTADGSEFEKRTADGSEFESPKKKAKVE

SEQ ID NO: 2199 - protein, 2096 aa, synthetic construct
MPAAKRVKLDGGDKKYSIGLDIGTNSVGWAVITDEYKVPSKKFKVLGNTDRHSIKKNLIGALLFDSGETAEATRLKRTARRRYTRRKNRICYLQEIFSNEMAKVDDSFFHRLEESFLVEEDKKHERHPIFGNIVDEVAYHEKYPTIYHLRKKLVDSTDKADLRLIYLALAHMIKFRGHFLIEGDLNPDNSDVDKLFIQLVQTYNQLFEENPINASGVDAKAILSARLSKSRRLENLIAQLPGEKKNGLFGNLIALSLGLTPNFKSNFDLAEDAKLQLSKDTYDDDLDNLLAQIGDQYADLFLAAKNLSDAILLSDILRVNTEITKAPLSASMIKRYDEHHQDLTLLKALVRQQLPEKYKEIFFDQSKNGYAGYIDGGASQEEFYKFIKPILEKMDGTEELLVKLNREDLLRKQRTFDNGSIPHQIHLGELHAILRRQEDFYPFLKDNREKIEKILTFRIPYYVGPLARGNSRFAWMTRKSEETITPWNFEEVVDKGASAQSFIERMTNFDKNLPNEKVLPKHSLLYEYFTVYNELTKVKYVTEGMRKPAFLSGEQKKAIVDLLFKTNRKVTVKQLKEDYFKKIECFDSVEISGVEDRFNASLGTYHDLLKIIKDKDFLDNEENEDILEDIVLTLTLFEDREMIEERLKTYAHLFDDKVMKQLKRRRYTGWGRLSRKLINGIRDKQSGKTILDFLKSDGFANRNFMQLIHDDSLTFKEDIQKAQVSGQGDSLHEHIANLAGSPAIKKGILQTVKVVDELVKVMGRHKPENIVIEMARENQTTQKGQKNSRERMKRIEEGIKELGSQILKEHPVENTQLQNEKLYLYYLQNGRDMYVDQELDINRLSDYDVDHIVPQSFLKDDSIDNKVLTRSDKARGKSDNVPSEEVVKKMKNYWRQLLNAKLITQRKFDNLTKAERGGLSELDKAGFIKRQLVETRQITKHVAQILDSRMNTKYDENDKLIREVKVITLKSKLVSDFRKDFQFYKVREINNYHHAHDAYLNAVVGTALIKKYPKLESEFVYGDYKVYDVRKMIAKSEQEIGKATAKYFFYSNIMNFFKTEITLANGEIRKRPLIETNGETGEIVWDKGRDFATVRKVLSMPQVNIVKKTEVQTGGFSKESILPKRNSDKLIARKKDWDPKKYGGFDSPTVAYSVLVVAKVEKGKSKKLKSVKELLGITIMERSSFEKNPIDFLEAKGYKEVKKDLIIKLPKYSLFELENGRKRMLASAGELQKGNELALPSKYVNFLYLASHYEKLKGSPEDNEQKQLFVEQHKHYLDEIIEQISEFSKRVILADANLDKVLSAYNKHRDKPIREQAENIIHLFTLTNLGAPAAFKYFDTTIDRKRYTSTKEVLDATLIHQSITGLYETRIDLSQLGGDGGGGSEAAAKGSSGGTLGIEDEYRLHETSTEPDVSLGSTWLSDFPQAWAETGGMGLAVRQAPLIIPLKATSTPVSIQQYPMSHEARLGIKPHIQRLLDQGILVPCQSPWNTPLLPVKKPGTNDYRPVQDLREVNKRVEDIHPTVPNPYNLLSGLPPSHQWYTVLDLKDAFFCLRLHPTSQPLFAFEWRDPGMGISGQLTWTRLPQGFKNSPTLFNEALHRDLADFRIQHPDLILLQYVDDILLAATSELDCQQGTRALLQTLGDLGYRASAKKAQICQKQVKYLGYLLREGQRWLTEARKETVMGQPVPKTPRQLREFLGTAGFCRLWIPGFAEMAAPLYPLTKPGTLFSWGPDQQKAYQEIKQALLTAPALGLPDLTKPFELFVDEKQGYAKGVLTQKLGPWRRPVAYLSKKLDPVAAGWPPCLRMVAAIAVLTKDAGKLTMGQPLVILAPHAVEALVKQPPDRWLSNARMTHYQAMLLDTDRVQFGPVVALNPATLLPLPEEGAPHDCLEILAETHGTRPDLTDQPIPDADHTWYTDGSSFLQEGQRKAGAAVTTETEVIWAGALPAGTSAQRAELIALTQALKMAEGKRLNVYTDSRYAFATAHIHGEIYRRRGWLTSEGREIKNKSEILALLKALFLPKRLSIIHCLGHQKGDSAEARGNRLADQAAREAAIKTPPDTSTLLAGKRTADGSEFEKRTADGSEFESPKKKAKVE

SEQ ID NO: 2200 - protein, 2096 aa, synthetic construct
MPAAKRVKLDGGDKKYSIGLDIGTNSVGWAVITDEYKVPSKKFKVLGNTDRHSIKKNLIGALLFDSGETAEATRLKRTARRRYTRRKNRICYLQEIFSNEMAKVDDSFFHRLEESFLVEEDKKHERHPIFGNIVDEVAYHEKYPTIYHLRKKLVDSTDKADLRLIYLALAHMIKFRGHFLIEGDLNPDNSDVDKLFIQLVQTYNQLFEENPINASGVDAKAILSARLSKSRRLENLIAQLPGEKKNGLFGNLIALSLGLTPNFKSNFDLAEDAKLQLSKDTYDDDLDNLLAQIGDQYADLFLAAKNLSDAILLSDILRVNTEITKAPLSASMIKRYDEHHQDLTLLKALVRQQLPEKYKEIFFDQSKNGYAGYIDGGASQEEFYKFIKPILEKMDGTEELLVKLNREDLLRKQRTFDNGSIPHQIHLGELHAILRRQEDFYPFLKDNREKIEKILTFRIPYYVGPLARGNSRFAWMTRKSEETITPWNFEEVVDKGASAQSFIERMTNFDKNLPNEKVLPKHSLLYEYFTVYNELTKVKYVTEGMRKPAFLSGEQKKAIVDLLFKTNRKVTVKQLKEDYFKKIECFDSVEISGVEDRFNASLGTYHDLLKIIKDKDFLDNEENEDILEDIVLTLTLFEDREMIEERLKTYAHLFDDKVMKQLKRRRYTGWGRLSRKLINGIRDKQSGKTILDFLKSDGFANRNFMQLIHDDSLTFKEDIQKAQVSGQGDSLHEHIANLAGSPAIKKGILQTVKVVDELVKVMGRHKPENIVIEMARENQTTQKGQKNSRERMKRIEEGIKELGSQILKEHPVENTQLQNEKLYLYYLQNGRDMYVDQELDINRLSDYDVDHIVPQSFLKDDSIDNKVLTRSDKARGKSDNVPSEEVVKKMKNYWRQLLNAKLITQRKFDNLTKAERGGLSELDKAGFIKRQLVETRQITKHVAQILDSRMNTKYDENDKLIREVKVITLKSKLVSDFRKDFQFYKVREINNYHHAHDAYLNAVVGTALIKKYPKLESEFVYGDYKVYDVRKMIAKSEQEIGKATAKYFFYSNIMNFFKTEITLANGEIRKRPLIETNGETGEIVWDKGRDFATVRKVLSMPQVNIVKKTEVQTGGFSKESILPKRNSDKLIARKKDWDPKKYGGFDSPTVAYSVLVVAKVEKGKSKKLKSVKELLGITIMERSSFEKNPIDFLEAKGYKEVKKDLIIKLPKYSLFELENGRKRMLASAGELQKGNELALPSKYVNFLYLASHYEKLKGSPEDNEQKQLFVEQHKHYLDEIIEQISEFSKRVILADANLDKVLSAYNKHRDKPIREQAENIIHLFTLTNLGAPAAFKYFDTTIDRKRYTSTKEVLDATLIHQSITGLYETRIDLSQLGGDGGEAAAKGGSGSSGGTLGIEDEYRLHETSTEPDVSLGSTWLSDFPQAWAETGGMGLAVRQAPLIIPLKATSTPVSIQQYPMSHEARLGIKPHIQRLLDQGILVPCQSPWNTPLLPVKKPGTNDYRPVQDLREVNKRVEDIHPTVPNPYNLLSGLPPSHQWYTVLDLKDAFFCLRLHPTSQPLFAFEWRDPGMGISGQLTWTRLPQGFKNSPTLFNEALHRDLADFRIQHPDLILLQYVDDILLAATSELDCQQGTRALLQTLGDLGYRASAKKAQICQKQVKYLGYLLREGQRWLTEARKETVMGQPVPKTPRQLREFLGTAGFCRLWIPGFAEMAAPLYPLTKPGTLFSWGPDQQKAYQEIKQALLTAPALGLPDLTKPFELFVDEKQGYAKGVLTQKLGPWRRPVAYLSKKLDPVAAGWPPCLRMVAAIAVLTKDAGKLTMGQPLVILAPHAVEALVKQPPDRWLSNARMTHYQAMLLDTDRVQFGPVVALNPATLLPLPEEGAPHDCLEILAETHGTRPDLTDQPIPDADHTWYTDGSSFLQEGQRKAGAAVTTETEVIWAGALPAGTSAQRAELIALTQALKMAEGKRLNVYTDSRYAFATAHIHGEIYRRRGWLTSEGREIKNKSEILALLKALFLPKRLSIIHCLGHQKGDSAEARGNRLADQAAREAAIKTPPDTSTLLAGKRTADGSEFEKRTADGSEFESPKKKAKVE

SEQ ID NO: 2201 - protein, 2096 aa, synthetic construct; identical to SEQ ID NO: 2071

SEQ ID NO: 2202 - protein, 2096 aa, synthetic construct; identical to SEQ ID NO: 2075

SEQ ID NO: 2203 - protein, 2091 aa, synthetic construct
MPAAKRVKLDGGDKKYSIGLDIGTNSVGWAVITDEYKVPSKKFKVLGNTDRHSIKKNLIGALLFDSGETAEATRLKRTARRRYTRRKNRICYLQEIFSNEMAKVDDSFFHRLEESFLVEEDKKHERHPIFGNIVDEVAYHEKYPTIYHLRKKLVDSTDKADLRLIYLALAHMIKFRGHFLIEGDLNPDNSDVDKLFIQLVQTYNQLFEENPINASGVDAKAILSARLSKSRRLENLIAQLPGEKKNGLFGNLIALSLGLTPNFKSNFDLAEDAKLQLSKDTYDDDLDNLLAQIGDQYADLFLAAKNLSDAILLSDILRVNTEITKAPLSASMIKRYDEHHQDLTLLKALVRQQLPEKYKEIFFDQSKNGYAGYIDGGASQEEFYKFIKPILEKMDGTEELLVKLNREDLLRKQRTFDNGSIPHQIHLGELHAILRRQEDFYPFLKDNREKIEKILTFRIPYYVGPLARGNSRFAWMTRKSEETITPWNFEEVVDKGASAQSFIERMTNFDKNLPNEKVLPKHSLLYEYFTVYNELTKVKYVTEGMRKPAFLSGEQKKAIVDLLFKTNRKVTVKQLKEDYFKKIECFDSVEISGVEDRFNASLGTYHDLLKIIKDKDFLDNEENEDILEDIVLTLTLFEDREMIEERLKTYAHLFDDKVMKQLKRRRYTGWGRLSRKLINGIRDKQSGKTILDFLKSDGFANRNFMQLIHDDSLTFKEDIQKAQVSGQGDSLHEHIANLAGSPAIKKGILQTVKVVDELVKVMGRHKPENIVIEMARENQTTQKGQKNSRERMKRIEEGIKELGSQILKEHPVENTQLQNEKLYLYYLQNGRDMYVDQELDINRLSDYDVDHIVPQSFLKDDSIDNKVLTRSDKARGKSDNVPSEEVVKKMKNYWRQLLNAKLITQRKFDNLTKAERGGLSELDKAGFIKRQLVETRQITKHVAQILDSRMNTKYDENDKLIREVKVITLKSKLVSDFRKDFQFYKVREINNYHHAHDAYLNAVVGTALIKKYPKLESEFVYGDYKVYDVRKMIAKSEQEIGKATAKYFFYSNIMNFFKTEITLANGEIRKRPLIETNGETGEIVWDKGRDFATVRKVLSMPQVNIVKKTEVQTGGFSKESILPKRNSDKLIARKKDWDPKKYGGFDSPTVAYSVLVVAKVEKGKSKKLKSVKELLGITIMERSSFEKNPIDFLEAKGYKEVKKDLIIKLPKYSLFELENGRKRMLASAGELQKGNELALPSKYVNFLYLASHYEKLKGSPEDNEQKQLFVEQHKHYLDEIIEQISEFSKRVILADANLDKVLSAYNKHRDKPIREQAENIIHLFTLTNLGAPAAFKYFDTTIDRKRYTSTKEVLDATLIHQSITGLYETRIDLSQLGGDGGGSSGGGGGTLGIEDEYRLHETSTEPDVSLGSTWLSDFPQAWAETGGMGLAVRQAPLIIPLKATSTPVSIQQYPMSHEARLGIKPHIQRLLDQGILVPCQSPWNTPLLPVKKPGTNDYRPVQDLREVNKRVEDIHPTVPNPYNLLSGLPPSHQWYTVLDLKDAFFCLRLHPTSQPLFAFEWRDPGMGISGQLTWTRLPQGFKNSPTLFNEALHRDLADFRIQHPDLILLQYVDDILLAATSELDCQQGTRALLQTLGDLGYRASAKKAQICQKQVKYLGYLLREGQRWLTEARKETVMGQPVPKTPRQLREFLGTAGFCRLWIPGFAEMAAPLYPLTKPGTLFSWGPDQQKAYQEIKQALLTAPALGLPDLTKPFELFVDEKQGYAKGVLTQKLGPWRRPVAYLSKKLDPVAAGWPPCLRMVAAIAVLTKDAGKLTMGQPLVILAPHAVEALVKQPPDRWLSNARMTHYQAMLLDTDRVQFGPVVALNPATLLPLPEEGAPHDCLEILAETHGTRPDLTDQPIPDADHTWYTDGSSFLQEGQRKAGAAVTTETEVIWAGALPAGTSAQRAELIALTQALKMAEGKRLNVYTDSRYAFATAHIHGEIYRRRGWLTSEGREIKNKSEILALLKALFLPKRLSIIHCLGHQKGDSAEARGNRLADQAAREAAIKTPPDTSTLLAGKRTADGSEFEKRTADGSEFESPKKKAKVE

SEQ ID NO: 2204 - protein, 2098 aa, synthetic construct
MPAAKRVKLDGGDKKYSIGLDIGTNSVGWAVITDEYKVPSKKFKVLGNTDRHSIKKNLIGALLFDSGETAEATRLKRTARRRYTRRKNRICYLQEIFSNEMAKVDDSFFHRLEESFLVEEDKKHERHPIFGNIVDEVAYHEKYPTIYHLRKKLVDSTDKADLRLIYLALAHMIKFRGHFLIEGDLNPDNSDVDKLFIQLVQTYNQLFEENPINASGVDAKAILSARLSKSRRLENLIAQLPGEKKNGLFGNLIALSLGLTPNFKSNFDLAEDAKLQLSKDTYDDDLDNLLAQIGDQYADLFLAAKNLSDAILLSDILRVNTEITKAPLSASMIKRYDEHHQDLTLLKALVRQQLPEKYKEIFFDQSKNGYAGYIDGGASQEEFYKFIKPILEKMDGTEELLVKLNREDLLRKQRTFDNGSIPHQIHLGELHAILRRQEDFYPFLKDNREKIEKILTFRIPYYVGPLARGNSRFAWMTRKSEETITPWNFEEVVDKGASAQSFIERMTNFDKNLPNEKVLPKHSLLYEYFTVYNELTKVKYVTEGMRKPAFLSGEQKKAIVDLLFKTNRKVTVKQLKEDYFKKIECFDSVEISGVEDRFNASLGTYHDLLKIIKDKDFLDNEENEDILEDIVLTLTLFEDREMIEERLKTYAHLFDDKVMKQLKRRRYTGWGRLSRKLINGIRDKQSGKTILDFLKSDGFANRNFMQLIHDDSLTFKEDIQKAQVSGQGDSLHEHIANLAGSPAIKKGILQTVKVVDELVKVMGRHKPENIVIEMARENQTTQKGQKNSRERMKRIEEGIKELGSQILKEHPVENTQLQNEKLYLYYLQNGRDMYVDQELDINRLSDYDVDHIVPQSFLKDDSIDNKVLTRSDKARGKSDNVPSEEVVKKMKNYWRQLLNAKLITQRKFDNLTKAERGGLSELDKAGFIKRQLVETRQITKHVAQILDSRMNTKYDENDKLIREVKVITLKSKLVSDFRKDFQFYKVREINNYHHAHDAYLNAVVGTALIKKYPKLESEFVYGDYKVYDVRKMIAKSEQEIGKATAKYFFYSNIMNFFKTEITLANGEIRKRPLIETNGETGEIVWDKGRDFATVRKVLSMPQVNIVKKTEVQTGGFSKESILPKRNSDKLIARKKDWDPKKYGGFDSPTVAYSVLVVAKVEKGKSKKLKSVKELLGITIMERSSFEKNPIDFLEAKGYKEVKKDLIIKLPKYSLFELENGRKRMLASAGELQKGNELALPSKYVNFLYLASHYEKLKGSPEDNEQKQLFVEQHKHYLDEIIEQISEFSKRVILADANLDKVLSAYNKHRDKPIREQAENIIHLFTLTNLGAPAAFKYFDTTIDRKRYTSTKEVLDATLIHQSITGLYETRIDLSQLGGDGGPAPAPAPAPAPAPGGTLGIEDEYRLHETSTEPDVSLGSTWLSDFPQAWAETGGMGLAVRQAPLIIPLKATSTPVSIQQYPMSHEARLGIKPHIQRLLDQGILVPCQSPWNTPLLPVKKPGTNDYRPVQDLREVNKRVEDIHPTVPNPYNLLSGLPPSHQWYTVLDLKDAFFCLRLHPTSQPLFAFEWRDPGMGISGQLTWTRLPQGFKNSPTLFNEALHRDLADFRIQHPDLILLQYVDDILLAATSELDCQQGTRALLQTLGDLGYRASAKKAQICQKQVKYLGYLLREGQRWLTEARKETVMGQPVPKTPRQLREFLGTAGFCRLWIPGFAEMAAPLYPLTKPGTLFSWGPDQQKAYQEIKQALLTAPALGLPDLTKPFELFVDEKQGYAKGVLTQKLGPWRRPVAYLSKKLDPVAAGWPPCLRMVAAIAVLTKDAGKLTMGQPLVILAPHAVEALVKQPPDRWLSNARMTHYQAMLLDTDRVQFGPVVALNPATLLPLPEEGAPHDCLEILAETHGTRPDLTDQPIPDADHTWYTDGSSFLQEGQRKAGAAVTTETEVIWAGALPAGTSAQRAELIALTQALKMAEGKRLNVYTDSRYAFATAHIHGEIYRRRGWLTSEGREIKNKSEILALLKALFLPKRLSIIHCLGHQKGDSAEARGNRLADQAAREAAIKTPPDTSTLLAGKRTADGSEFEKRTADGSEFESPKKKAKVE

SEQ ID NO: 2205 - protein, 2094 aa, synthetic construct
MPAAKRVKLDGGDKKYSIGLDIGTNSVGWAVITDEYKVPSKKFKVLGNTDRHSIKKNLIGALLFDSGETAEATRLKRTARRRYTRRKNRICYLQEIFSNEMAKVDDSFFHRLEESFLVEEDKKHERHPIFGNIVDEVAYHEKYPTIYHLRKKLVDSTDKADLRLIYLALAHMIKFRGHFLIEGDLNPDNSDVDKLFIQLVQTYNQLFEENPINASGVDAKAILSARLSKSRRLENLIAQLPGEKKNGLFGNLIALSLGLTPNFKSNFDLAEDAKLQLSKDTYDDDLDNLLAQIGDQYADLFLAAKNLSDAILLSDILRVNTEITKAPLSASMIKRYDEHHQDLTLLKALVRQQLPEKYKEIFFDQSKNGYAGYIDGGASQEEFYKFIKPILEKMDGTEELLVKLNREDLLRKQRTFDNGSIPHQIHLGELHAILRRQEDFYPFLKDNREKIEKILTFRIPYYVGPLARGNSRFAWMTRKSEETITPWNFEEVVDKGASAQSFIERMTNFDKNLPNEKVLPKHSLLYEYFTVYNELTKVKYVTEGMRKPAFLSGEQKKAIVDLLFKTNRKVTVKQLKEDYFKKIECFDSVEISGVEDRFNASLGTYHDLLKIIKDKDFLDNEENEDILEDIVLTLTLFEDREMIEERLKTYAHLFDDKVMKQLKRRRYTGWGRLSRKLINGIRDKQSGKTILDFLKSDGFANRNFMQLIHDDSLTFKEDIQKAQVSGQGDSLHEHIANLAGSPAIKKGILQTVKVVDELVKVMGRHKPENIVIEMARENQTTQKGQKNSRERMKRIEEGIKELGSQILKEHPVENTQLQNEKLYLYYLQNGRDMYVDQELDINRLSDYDVDHIVPQSFLKDDSIDNKVLTRSDKARGKSDNVPSEEVVKKMKNYWRQLLNAKLITQRKFDNLTKAERGGLSELDKAGFIKRQLVETRQITKHVAQILDSRMNTKYDENDKLIREVKVITLKSKLVSDFRKDFQFYKVREINNYHHAHDAYLNAVVGTALIKKYPKLESEFVYGDYKVYDVRKMIAKSEQEIGKATAKYFFYSNIMNFFKTEITLANGEIRKRPLIETNGETGEIVWDKGRDFATVRKVLSMPQVNIVKKTEVQTGGFSKESILPKRNSDKLIARKKDWDPKKYGGFDSPTVAYSVLVVAKVEKGKSKKLKSVKELLGITIMERSSFEKNPIDFLEAKGYKEVKKDLIIKLPKYSLFELENGRKRMLASAGELQKGNELALPSKYVNFLYLASHYEKLKGSPEDNEQKQLFVEQHKHYLDEIIEQISEFSKRVILADANLDKVLSAYNKHRDKPIREQAENIIHLFTLTNLGAPAAFKYFDTTIDRKRYTSTKEVLDATLIHQSITGLYETRIDLSQLGGDGGGGSGSSGGGGGTLGIEDEYRLHETSTEPDVSLGSTWLSDFPQAWAETGGMGLAVRQAPLIIPLKATSTPVSIQQYPMSHEARLGIKPHIQRLLDQGILVPCQSPWNTPLLPVKKPGTNDYRPVQDLREVNKRVEDIHPTVPNPYNLLSGLPPSHQWYTVLDLKDAFFCLRLHPTSQPLFAFEWRDPGMGISGQLTWTRLPQGFKNSPTLFNEALHRDLADFRIQHPDLILLQYVDDILLAATSELDCQQGTRALLQTLGDLGYRASAKKAQICQKQVKYLGYLLREGQRWLTEARKETVMGQPVPKTPRQLREFLGTAGFCRLWIPGFAEMAAPLYPLTKPGTLFSWGPDQQKAYQEIKQALLTAPALGLPDLTKPFELFVDEKQGYAKGVLTQKLGPWRRPVAYLSKKLDPVAAGWPPCLRMVAAIAVLTKDAGKLTMGQPLVILAPHAVEALVKQPPDRWLSNARMTHYQAMLLDTDRVQFGPVVALNPATLLPLPEEGAPHDCLEILAETHGTRPDLTDQPIPDADHTWYTDGSSFLQEGQRKAGAAVTTETEVIWAGALPAGTSAQRAELIALTQALKMAEGKRLNVYTDSRYAFATAHIHGEIYRRRGWLTSEGREIKNKSEILALLKALFLPKRLSIIHCLGHQKGDSAEARGNRLADQAAREAAIKTPPDTSTLLAGKRTADGSEFEKRTADGSEFESPKKKAKVE

SEQ ID NO: 2206 - protein, 2093 aa, synthetic construct
MPAAKRVKLDGGDKKYSIGLDIGTNSVGWAVITDEYKVPSKKFKVLGNTDRHSIKKNLIGALLFDSGETAEATRLKRTARRRYTRRKNRICYLQEIFSNEMAKVDDSFFHRLEESFLVEEDKKHERHPIFGNIVDEVAYHEKYPTIYHLRKKLVDSTDKADLRLIYLALAHMIKFRGHFLIEGDLNPDNSDVDKLFIQLVQTYNQLFEENPINASGVDAKAILSARLSKSRRLENLIAQLPGEKKNGLFGNLIALSLGLTPNFKSNFDLAEDAKLQLSKDTYDDDLDNLLAQIGDQYADLFLAAKNLSDAILLSDILRVNTEITKAPLSASMIKRYDEHHQDLTLLKALVRQQLPEKYKEIFFDQSKNGYAGYIDGGASQEEFYKFIKPILEKMDGTEELLVKLNREDLLRKQRTFDNGSIPHQIHLGELHAILRRQEDFYPFLKDNREKIEKILTFRIPYYVGPLARGNSRFAWMTRKSEETITPWNFEEVVDKGASAQSFIERMTNFDKNLPNEKVLPKHSLLYEYFTVYNELTKVKYVTEGMRKPAFLSGEQKKAIVDLLFKTNRKVTVKQLKEDYFKKIECFDSVEISGVEDRFNASLGTYHDLLKIIKDKDFLDNEENEDILEDIVLTLTLFEDREMIEERLKTYAHLFDDKVMKQLKRRRYTGWGRLSRKLINGIRDKQSGKTILDFLKSDGFANRNFMQLIHDDSLTFKEDIQKAQVSGQGDSLHEHIANLAGSPAIKKGILQTVKVVDELVKVMGRHKPENIVIEMARENQTTQKGQKNSRERMKRIEEGIKELGSQILKEHPVENTQLQNEKLYLYYLQNGRDMYVDQELDINRLSDYDVDHIVPQSFLKDDSIDNKVLTRSDKARGKSDNVPSEEVVKKMKNYWRQLLNAKLITQRKFDNLTKAERGGLSELDKAGFIKRQLVETRQITKHVAQILDSRMNTKYDENDKLIREVKVITLKSKLVSDFRKDFQFYKVREINNYHHAHDAYLNAVVGTALIKKYPKLESEFVYGDYKVYDVRKMIAKSEQEIGKATAKYFFYSNIMNFFKTEITLANGEIRKRPLIETNGETGEIVWDKGRDFATVRKVLSMPQVNIVKKTEVQTGGFSKESILPKRNSDKLIARKKDWDPKKYGGFDSPTVAYSVLVVAKVEKGKSKKLKSVKELLGITIMERSSFEKNPIDFLEAKGYKEVKKDLIIKLPKYSLFELENGRKRMLASAGELQKGNELALPSKYVNFLYLASHYEKLKGSPEDNEQKQLFVEQHKHYLDEIIEQISEFSKRVILADANLDKVLSAYNKHRDKPIREQAENIIHLFTLTNLGAPAAFKYFDTTIDRKRYTSTKEVLDATLIHQSITGLYETRIDLSQLGGDGGPAPEAAAKGGTLGIEDEYRLHETSTEPDVSLGSTWLSDFPQAWAETGGMGLAVRQAPLIIPLKATSTPVSIQQYPMSHEARLGIKPHIQRLLDQGILVPCQSPWNTPLLPVKKPGTNDYRPVQDLREVNKRVEDIHPTVPNPYNLLSGLPPSHQWYTVLDLKDAFFCLRLHPTSQPLFAFEWRDPGMGISGQLTWTRLPQGFKNSPTLFNEALHRDLADFRIQHPDLILLQYVDDILLAATSELDCQQGTRALLQTLGDLGYRASAKKAQICQKQVKYLGYLLREGQRWLTEARKETVMGQPVPKTPRQLREFLGTAGFCRLWIPGFAEMAAPLYPLTKPGTLFSWGPDQQKAYQEIKQALLTAPALGLPDLTKPFELFVDEKQGYAKGVLTQKLGPWRRPVAYLSKKLDPVAAGWPPCLRMVAAIAVLTKDAGKLTMGQPLVILAPHAVEALVKQPPDRWLSNARMTHYQAMLLDTDRVQFGPVVALNPATLLPLPEEGAPHDCLEILAETHGTRPDLTDQPIPDADHTWYTDGSSFLQEGQRKAGAAVTTETEVIWAGALPAGTSAQRAELIALTQALKMAEGKRLNVYTDSRYAFATAHIHGEIYRRRGWLTSEGREIKNKSEILALLKALFLPKRLSIIHCLGHQKGDSAEARGNRLADQAAREAAIKTPPDTSTLLAGKRTADGSEFEKRTADGSEFESPKKKAKVE

SEQ ID NO: 2207 - protein, 2096 aa, synthetic construct; identical to SEQ ID NO: 2074

SEQ ID NO: 2208 - protein, 2093 aa, synthetic construct
MPAAKRVKLDGGDKKYSIGLDIGTNSVGWAVITDEYKVPSKKFKVLGNTDRHSIKKNLIGALLFDSGETAEATRLKRTARRRYTRRKNRICYLQEIFSNEMAKVDDSFFHRLEESFLVEEDKKHERHPIFGNIVDEVAYHEKYPTIYHLRKKLVDSTDKADLRLIYLALAHMIKFRGHFLIEGDLNPDNSDVDKLFIQLVQTYNQLFEENPINASGVDAKAILSARLSKSRRLENLIAQLPGEKKNGLFGNLIALSLGLTPNFKSNFDLAEDAKLQLSKDTYDDDLDNLLAQIGDQYADLFLAAKNLSDAILLSDILRVNTEITKAPLSASMIKRYDEHHQDLTLLKALVRQQLPEKYKEIFFDQSKNGYAGYIDGGASQEEFYKFIKPILEKMDGTEELLVKLNREDLLRKQRTFDNGSIPHQIHLGELHAILRRQEDFYPFLKDNREKIEKILTFRIPYYVGPLARGNSRFAWMTRKSEETITPWNFEEVVDKGASAQSFIERMTNFDKNLPNEKVLPKHSLLYEYFTVYNELTKVKYVTEGMRKPAFLSGEQKKAIVDLLFKTNRKVTVKQLKEDYFKKIECFDSVEISGVEDRFNASLGTYHDLLKIIKDKDFLDNEENEDILEDIVLTLTLFEDREMIEERLKTYAHLFDDKVMKQLKRRRYTGWGRLSRKLINGIRDKQSGKTILDFLKSDGFANRNFMQLIHDDSLTFKEDIQKAQVSGQGDSLHEHIANLAGSPAIKKGILQTVKVVDELVKVMGRHKPENIVIEMARENQTTQKGQKNSRERMKRIEEGIKELGSQILKEHPVENTQLQNEKLYLYYLQNGRDMYVDQELDINRLSDYDVDHIVPQSFLKDDSIDNKVLTRSDKARGKSDNVPSEEVVKKMKNYWRQLLNAKLITQRKFDNLTKAERGGLSELDKAGFIKRQLVETRQITKHVAQILDSRMNTKYDENDKLIREVKVITLKSKLVSDFRKDFQFYKVREINNYHHAHDAYLNAVVGTALIKKYPKLESEFVYGDYKVYDVRKMIAKSEQEIGKATAKYFFYSNIMNFFKTEITLANGEIRKRPLIETNGETGEIVWDKGRDFATVRKVLSMPQVNIVKKTEVQTGGFSKESILPKRNSDKLIARKKDWDPKKYGGFDSPTVAYSVLVVAKVEKGKSKKLKSVKELLGITIMERSSFEKNPIDFLEAKGYKEVKKDLIIKLPKYSLFELENGRKRMLASAGELQKGNELALPSKYVNFLYLASHYEKLKGSPEDNEQKQLFVEQHKHYLDEIIEQISEFSKRVILADANLDKVLSAYNKHRDKPIREQAENIIHLFTLTNLGAPAAFKYFDTTIDRKRYTSTKEVLDATLIHQSITGLYETRIDLSQLGGDGGGGGEAAAKGGTLGIEDEYRLHETSTEPDVSLGSTWLSDFPQAWAETGGMGLAVRQAPLIIPLKATSTPVSIQQYPMSHEARLGIKPHIQRLLDQGILVPCQSPWNTPLLPVKKPGTNDYRPVQDLREVNKRVEDIHPTVPNPYNLLSGLPPSHQWYTVLDLKDAFFCLRLHPTSQPLFAFEWRDPGMGISGQLTWTRLPQGFKNSPTLFNEALHRDLADFRIQHPDLILLQYVDDILLAATSELDCQQGTRALLQTLGDLGYRASAKKAQICQKQVKYLGYLLREGQRWLTEARKETVMGQPVPKTPRQLREFLGTAGFCRLWIPGFAEMAAPLYPLTKPGTLFSWGPDQQKAYQEIKQALLTAPALGLPDLTKPFELFVDEKQGYAKGVLTQKLGPWRRPVAYLSKKLDPVAAGWPPCLRMVAAIAVLTKDAGKLTMGQPLVILAPHAVEALVKQPPDRWLSNARMTHYQAMLLDTDRVQFGPVVALNPATLLPLPEEGAPHDCLEILAETHGTRPDLTDQPIPDADHTWYTDGSSFLQEGQRKAGAAVTTETEVIWAGALPAGTSAQRAELIALTQALKMAEGKRLNVYTDSRYAFATAHIHGEIYRRRGWLTSEGREIKNKSEILALLKALFLPKRLSIIHCLGHQKGDSAEARGNRLADQAAREAAIKTPPDTSTLLAGKRTADGSEFEKRTADGSEFESPKKKAKVE

SEQ ID NO: 2209 - protein, 2096 aa, synthetic construct
MPAAKRVKLDGGDKKYSIGLDIGTNSVGWAVITDEYKVPSKKFKVLGNTDRHSIKKNLIGALLFDSGETAEATRLKRTARRRYTRRKNRICYLQEIFSNEMAKVDDSFFHRLEESFLVEEDKKHERHPIFGNIVDEVAYHEKYPTIYHLRKKLVDSTDKADLRLIYLALAHMIKFRGHFLIEGDLNPDNSDVDKLFIQLVQTYNQLFEENPINASGVDAKAILSARLSKSRRLENLIAQLPGEKKNGLFGNLIALSLGLTPNFKSNFDLAEDAKLQLSKDTYDDDLDNLLAQIGDQYADLFLAAKNLSDAILLSDILRVNTEITKAPLSASMIKRYDEHHQDLTLLKALVRQQLPEKYKEIFFDQSKNGYAGYIDGGASQEEFYKFIKPILEKMDGTEELLVKLNREDLLRKQRTFDNGSIPHQIHLGELHAILRRQEDFYPFLKDNREKIEKILTFRIPYYVGPLARGNSRFAWMTRKSEETITPWNFEEVVDKGASAQSFIERMTNFDKNLPNEKVLPKHSLLYEYFTVYNELTKVKYVTEGMRKPAFLSGEQKKAIVDLLFKTNRKVTVKQLKEDYFKKIECFDSVEISGVEDRFNASLGTYHDLLKIIKDKDFLDNEENEDILEDIVLTLTLFEDREMIEERLKTYAHLFDDKVMKQLKRRRYTGWGRLSRKLINGIRDKQSGKTILDFLKSDGFANRNFMQLIHDDSLTFKEDIQKAQVSGQGDSLHEHIANLAGSPAIKKGILQTVKVVDELVKVMGRHKPENIVIEMARENQTTQKGQKNSRERMKRIEEGIKELGSQILKEHPVENTQLQNEKLYLYYLQNGRDMYVDQELDINRLSDYDVDHIVPQSFLKDDSIDNKVLTRSDKARGKSDNVPSEEVVKKMKNYWRQLLNAKLITQRKFDNLTKAERGGLSELDKAGFIKRQLVETRQITKHVAQILDSRMNTKYDENDKLIREVKVITLKSKLVSDFRKDFQFYKVREINNYHHAHDAYLNAVVGTALIKKYPKLESEFVYGDYKVYDVRKMIAKSEQEIGKATAKYFFYSNIMNFFKTEITLANGEIRKRPLIETNGETGEIVWDKGRDFATVRKVLSMPQVNIVKKTEVQTGGFSKESILPKRNSDKLIARKKDWDPKKYGGFDSPTVAYSVLVVAKVEKGKSKKLKSVKELLGITIMERSSFEKNPIDFLEAKGYKEVKKDLIIKLPKYSLFELENGRKRMLASAGELQKGNELALPSKYVNFLYLASHYEKLKGSPEDNEQKQLFVEQHKHYLDEIIEQISEFSKRVILADANLDKVLSAYNKHRDKPIREQAENIIHLFTLTNLGAPAAFKYFDTTIDRKRYTSTKEVLDATLIHQSITGLYETRIDLSQLGGDGGEAAAKGGGGGSGGTLGIEDEYRLHETSTEPDVSLGSTWLSDFPQAWAETGGMGLAVRQAPLIIPLKATSTPVSIQQYPMSHEARLGIKPHIQRLLDQGILVPCQSPWNTPLLPVKKPGTNDYRPVQDLREVNKRVEDIHPTVPNPYNLLSGLPPSHQWYTVLDLKDAFFCLRLHPTSQPLFAFEWRDPGMGISGQLTWTRLPQGFKNSPTLFNEALHRDLADFRIQHPDLILLQYVDDILLAATSELDCQQGTRALLQTLGDLGYRASAKKAQICQKQVKYLGYLLREGQRWLTEARKETVMGQPVPKTPRQLREFLGTAGFCRLWIPGFAEMAAPLYPLTKPGTLFSWGPDQQKAYQEIKQALLTAPALGLPDLTKPFELFVDEKQGYAKGVLTQKLGPWRRPVAYLSKKLDPVAAGWPPCLRMVAAIAVLTKDAGKLTMGQPLVILAPHAVEALVKQPPDRWLSNARMTHYQAMLLDTDRVQFGPVVALNPATLLPLPEEGAPHDCLEILAETHGTRPDLTDQPIPDADHTWYTDGSSFLQEGQRKAGAAVTTETEVIWAGALPAGTSAQRAELIALTQALKMAEGKRLNVYTDSRYAFATAHIHGEIYRRRGWLTSEGREIKNKSEILALLKALFLPKRLSIIHCLGHQKGDSAEARGNRLADQAAREAAIKTPPDTSTLLAGKRTADGSEFEKRTADGSEFESPKKKAKVE

SEQ ID NO: 2210 - protein, 2110 aa, synthetic construct
MPAAKRVKLDGGDKKYSIGLDIGTNSVGWAVITDEYKVPSKKFKVLGNTDRHSIKKNLIGALLFDSGETAEATRLKRTARRRYTRRKNRICYLQEIFSNEMAKVDDSFFHRLEESFLVEEDKKHERHPIFGNIVDEVAYHEKYPTIYHLRKKLVDSTDKADLRLIYLALAHMIKFRGHFLIEGDLNPDNSDVDKLFIQLVQTYNQLFEENPINASGVDAKAILSARLSKSRRLENLIAQLPGEKKNGLFGNLIALSLGLTPNFKSNFDLAEDAKLQLSKDTYDDDLDNLLAQIGDQYADLFLAAKNLSDAILLSDILRVNTEITKAPLSASMIKRYDEHHQDLTLLKALVRQQLPEKYKEIFFDQSKNGYAGYIDGGASQEEFYKFIKPILEKMDGTEELLVKLNREDLLRKQRTFDNGSIPHQIHLGELHAILRRQEDFYPFLKDNREKIEKILTFRIPYYVGPLARGNSRFAWMTRKSEETITPWNFEEVVDKGASAQSFIERMTNFDKNLPNEKVLPKHSLLYEYFTVYNELTKVKYVTEGMRKPAFLSGEQKKAIVDLLFKTNRKVTVKQLKEDYFKKIECFDSVEISGVEDRFNASLGTYHDLLKIIKDKDFLDNEENEDILEDIVLTLTLFEDREMIEERLKTYAHLFDDKVMKQLKRRRYTGWGRLSRKLINGIRDKQSGKTILDFLKSDGFANRNFMQLIHDDSLTFKEDIQKAQVSGQGDSLHEHIANLAGSPAIKKGILQTVKVVDELVKVMGRHKPENIVIEMARENQTTQKGQKNSRERMKRIEEGIKELGSQILKEHPVENTQLQNEKLYLYYLQNGRDMYVDQELDINRLSDYDVDHIVPQSFLKDDSIDNKVLTRSDKARGKSDNVPSEEVVKKMKNYWRQLLNAKLITQRKFDNLTKAERGGLSELDKAGFIKRQLVETRQITKHVAQILDSRMNTKYDENDKLIREVKVITLKSKLVSDFRKDFQFYKVREINNYHHAHDAYLNAVVGTALIKKYPKLESEFVYGDYKVYDVRKMIAKSEQEIGKATAKYFFYSNIMNFFKTEITLANGEIRKRPLIETNGETGEIVWDKGRDFATVRKVLSMPQVNIVKKTEVQTGGFSKESILPKRNSDKLIARKKDWDPKKYGGFDSPTVAYSVLVVAKVEKGKSKKLKSVKELLGITIMERSSFEKNPIDFLEAKGYKEVKKDLIIKLPKYSLFELENGRKRMLASAGELQKGNELALPSKYVNFLYLASHYEKLKGSPEDNEQKQLFVEQHKHYLDEIIEQISEFSKRVILADANLDKVLSAYNKHRDKPIREQAENIIHLFTLTNLGAPAAFKYFDTTIDRKRYTSTKEVLDATLIHQSITGLYETRIDLSQLGGDGGGGGGSGGGGSGGGGSGGGGSGGGGSGGTLGIEDEYRLHETSTEPDVSLGSTWLSDFPQAWAETGGMGLAVRQAPLIIPLKATSTPVSIQQYPMSHEARLGIKPHIQRLLDQGILVPCQSPWNTPLLPVKKPGTNDYRPVQDLREVNKRVEDIHPTVPNPYNLLSGLPPSHQWYTVLDLKDAFFCLRLHPTSQPLFAFEWRDPGMGISGQLTWTRLPQGFKNSPTLFNEALHRDLADFRIQHPDLILLQYVDDILLAATSELDCQQGTRALLQTLGDLGYRASAKKAQICQKQVKYLGYLLREGQRWLTEARKETVMGQPVPKTPRQLREFLGTAGFCRLWIPGFAEMAAPLYPLTKPGTLFSWGPDQQKAYQEIKQALLTAPALGLPDLTKPFELFVDEKQGYAKGVLTQKLGPWRRPVAYLSKKLDPVAAGWPPCLRMVAAIAVLTKDAGKLTMGQPLVILAPHAVEALVKQPPDRWLSNARMTHYQAMLLDTDRVQFGPVVALNPATLLPLPEEGAPHDCLEILAETHGTRPDLTDQPIPDADHTWYTDGSSFLQEGQRKAGAAVTTETEVIWAGALPAGTSAQRAELIALTQALKMAEGKRLNVYTDSRYAFATAHIHGEIYRRRGWLTSEGREIKNKSEILALLKALFLPKRLSIIHCLGHQKGDSAEARGNRLADQAAREAAIKTPPDTSTLLAGKRTADGSEFEKRTADGSEFESPKKKAKVE

SEQ ID NO: 2211 - protein, 2096 aa, synthetic construct
MPAAKRVKLDGGDKKYSIGLDIGTNSVGWAVITDEYKVPSKKFKVLGNTDRHSIKKNLIGALLFDSGETAEATRLKRTARRRYTRRKNRICYLQEIFSNEMAKVDDSFFHRLEESFLVEEDKKHERHPIFGNIVDEVAYHEKYPTIYHLRKKLVDSTDKADLRLIYLALAHMIKFRGHFLIEGDLNPDNSDVDKLFIQLVQTYNQLFEENPINASGVDAKAILSARLSKSRRLENLIAQLPGEKKNGLFGNLIALSLGLTPNFKSNFDLAEDAKLQLSKDTYDDDLDNLLAQIGDQYADLFLAAKNLSDAILLSDILRVNTEITKAPLSASMIKRYDEHHQDLTLLKALVRQQLPEKYKEIFFDQSKNGYAGYIDGGASQEEFYKFIKPILEKMDGTEELLVKLNREDLLRKQRTFDNGSIPHQIHLGELHAILRRQEDFYPFLKDNREKIEKILTFRIPYYVGPLARGNSRFAWMTRKSEETITPWNFEEVVDKGASAQSFIERMTNFDKNLPNEKVLPKHSLLYEYFTVYNELTKVKYVTEGMRKPAFLSGEQKKAIVDLLFKTNRKVTVKQLKEDYFKKIECFDSVEISGVEDRFNASLGTYHDLLKIIKDKDFLDNEENEDILEDIVLTLTLFEDREMIEERLKTYAHLFDDKVMKQLKRRRYTGWGRLSRKLINGIRDKQSGKTILDFLKSDGFANRNFMQLIHDDSLTFKEDIQKAQVSGQGDSLHEHIANLAGSPAIKKGILQTVKVVDELVKVMGRHKPENIVIEMARENQTTQKGQKNSRERMKRIEEGIKELGSQILKEHPVENTQLQNEKLYLYYLQNGRDMYVDQELDINRLSDYDVDHIVPQSFLKDDSIDNKVLTRSDKARGKSDNVPSEEVVKKMKNYWRQLLNAKLITQRKFDNLTKAERGGLSELDKAGFIKRQLVETRQITKHVAQILDSRMNTKYDENDKLIREVKVITLKSKLVSDFRKDFQFYKVREINNYHHAHDAYLNAVVGTALIKKYPKLESEFVYGDYKVYDVRKMIAKSEQEIGKATAKYFFYSNIMNFFKTEITLANGEIRKRPLIETNGETGEIVWDKGRDFATVRKVLSMPQVNIVKKTEVQTGGFSKESILPKRNSDKLIARKKDWDPKKYGGFDSPTVAYSVLVVAKVEKGKSKKLKSVKELLGITIMERSSFEKNPIDFLEAKGYKEVKKDLIIKLPKYSLFELENGRKRMLASAGELQKGNELALPSKYVNFLYLASHYEKLKGSPEDNEQKQLFVEQHKHYLDEIIEQISEFSKRVILADANLDKVLSAYNKHRDKPIREQAENIIHLFTLTNLGAPAAFKYFDTTIDRKRYTSTKEVLDATLIHQSITGLYETRIDLSQLGGDGGEAAAKGSSPAPGGTLGIEDEYRLHETSTEPDVSLGSTWLSDFPQAWAETGGMGLAVRQAPLIIPLKATSTPVSIQQYPMSHEARLGIKPHIQRLLDQGILVPCQSPWNTPLLPVKKPGTNDYRPVQDLREVNKRVEDIHPTVPNPYNLLSGLPPSHQWYTVLDLKDAFFCLRLHPTSQPLFAFEWRDPGMGISGQLTWTRLPQGFKNSPTLFNEALHRDLADFRIQHPDLILLQYVDDILLAATSELDCQQGTRALLQTLGDLGYRASAKKAQICQKQVKYLGYLLREGQRWLTEARKETVMGQPVPKTPRQLREFLGTAGFCRLWIPGFAEMAAPLYPLTKPGTLFSWGPDQQKAYQEIKQALLTAPALGLPDLTKPFELFVDEKQGYAKGVLTQKLGPWRRPVAYLSKKLDPVAAGWPPCLRMVAAIAVLTKDAGKLTMGQPLVILAPHAVEALVKQPPDRWLSNARMTHYQAMLLDTDRVQFGPVVALNPATLLPLPEEGAPHDCLEILAETHGTRPDLTDQPIPDADHTWYTDGSSFLQEGQRKAGAAVTTETEVIWAGALPAGTSAQRAELIALTQALKMAEGKRLNVYTDSRYAFATAHIHGEIYRRRGWLTSEGREIKNKSEILALLKALFLPKRLSIIHCLGHQKGDSAEARGNRLADQAAREAAIKTPPDTSTLLAGKRTADGSEFEKRTADGSEFESPKKKAKVE

SEQ ID NO: 2212 - protein, 2094 aa, synthetic construct; identical to SEQ ID NO: 2079

SEQ ID NO: 2213 - protein, 2096 aa, synthetic construct
MPAAKRVKLDGGDKKYSIGLDIGTNSVGWAVITDEYKVPSKKFKVLGNTDRHSIKKNLIGALLFDSGETAEATRLKRTARRRYTRRKNRICYLQEIFSNEMAKVDDSFFHRLEESFLVEEDKKHERHPIFGNIVDEVAYHEKYPTIYHLRKKLVDSTDKADLRLIYLALAHMIKFRGHFLIEGDLNPDNSDVDKLFIQLVQTYNQLFEENPINASGVDAKAILSARLSKSRRLENLIAQLPGEKKNGLFGNLIALSLGLTPNFKSNFDLAEDAKLQLSKDTYDDDLDNLLAQIGDQYADLFLAAKNLSDAILLSDILRVNTEITKAPLSASMIKRYDEHHQDLTLLKALVRQQLPEKYKEIFFDQSKNGYAGYIDGGASQEEFYKFIKPILEKMDGTEELLVKLNREDLLRKQRTFDNGSIPHQIHLGELHAILRRQEDFYPFLKDNREKIEKILTFRIPYYVGPLARGNSRFAWMTRKSEETITPWNFEEVVDKGASAQSFIERMTNFDKNLPNEKVLPKHSLLYEYFTVYNELTKVKYVTEGMRKPAFLSGEQKKAIVDLLFKTNRKVTVKQLKEDYFKKIECFDSVEISGVEDRFNASLGTYHDLLKIIKDKDFLDNEENEDILEDIVLTLTLFEDREMIEERLKTYAHLFDDKVMKQLKRRRYTGWGRLSRKLINGIRDKQSGKTILDFLKSDGFANRNFMQLIHDDSLTFKEDIQKAQVSGQGDSLHEHIANLAGSPAIKKGILQTVKVVDELVKVMGRHKPENIVIEMARENQTTQKGQKNSRERMKRIEEGIKELGSQILKEHPVENTQLQNEKLYLYYLQNGRDMYVDQELDINRLSDYDVDHIVPQSFLKDDSIDNKVLTRSDKARGKSDNVPSEEVVKKMKNYWRQLLNAKLITQRKFDNLTKAERGGLSELDKAGFIKRQLVETRQITKHVAQILDSRMNTKYDENDKLIREVKVITLKSKLVSDFRKDFQFYKVREINNYHHAHDAYLNAVVGTALIKKYPKLESEFVYGDYKVYDVRKMIAKSEQEIGKATAKYFFYSNIMNFFKTEITLANGEIRKRPLIETNGETGEIVWDKGRDFATVRKVLSMPQVNIVKKTEVQTGGFSKESILPKRNSDKLIARKKDWDPKKYGGFDSPTVAYSVLVVAKVEKGKSKKLKSVKELLGITIMERSSFEKNPIDFLEAKGYKEVKKDLIIKLPKYSLFELENGRKRMLASAGELQKGNELALPSKYVNFLYLASHYEKLKGSPEDNEQKQLFVEQHKHYLDEIIEQISEFSKRVILADANLDKVLSAYNKHRDKPIREQAENIIHLFTLTNLGAPAAFKYFDTTIDRKRYTSTKEVLDATLIHQSITGLYETRIDLSQLGGDGGEAAAKPAPGSSGGTLGIEDEYRLHETSTEPDVSLGSTWLSDFPQAWAETGGMGLAVRQAPLIIPLKATSTPVSIQQYPMSHEARLGIKPHIQRLLDQGILVPCQSPWNTPLLPVKKPGTNDYRPVQDLREVNKRVEDIHPTVPNPYNLLSGLPPSHQWYTVLDLKDAFFCLRLHPTSQPLFAFEWRDPGMGISGQLTWTRLPQGFKNSPTLFNEALHRDLADFRIQHPDLILLQYVDDILLAATSELDCQQGTRALLQTLGDLGYRASAKKAQICQKQVKYLGYLLREGQRWLTEARKETVMGQPVPKTPRQLREFLGTAGFCRLWIPGFAEMAAPLYPLTKPGTLFSWGPDQQKAYQEIKQALLTAPALGLPDLTKPFELFVDEKQGYAKGVLTQKLGPWRRPVAYLSKKLDPVAAGWPPCLRMVAAIAVLTKDAGKLTMGQPLVILAPHAVEALVKQPPDRWLSNARMTHYQAMLLDTDRVQFGPVVALNPATLLPLPEEGAPHDCLEILAETHGTRPDLTDQPIPDADHTWYTDGSSFLQEGQRKAGAAVTTETEVIWAGALPAGTSAQRAELIALTQALKMAEGKRLNVYTDSRYAFATAHIHGEIYRRRGWLTSEGREIKNKSEILALLKALFLPKRLSIIHCLGHQKGDSAEARGNRLADQAAREAAIKTPPDTSTLLAGKRTADGSEFEKRTADGSEFESPKKKAKVE

SEQ ID NO: 2214 - protein, 2096 aa, synthetic construct
MPAAKRVKLDGGDKKYSIGLDIGTNSVGWAVITDEYKVPSKKFKVLGNTDRHSIKKNLIGALLFDSGETAEATRLKRTARRRYTRRKNRICYLQEIFSNEMAKVDDSFFHRLEESFLVEEDKKHERHPIFGNIVDEVAYHEKYPTIYHLRKKLVDSTDKADLRLIYLALAHMIKFRGHFLIEGDLNPDNSDVDKLFIQLVQTYNQLFEENPINASGVDAKAILSARLSKSRRLENLIAQLPGEKKNGLFGNLIALSLGLTPNFKSNFDLAEDAKLQLSKDTYDDDLDNLLAQIGDQYADLFLAAKNLSDAILLSDILRVNTEITKAPLSASMIKRYDEHHQDLTLLKALVRQQLPEKYKEIFFDQSKNGYAGYIDGGASQEEFYKFIKPILEKMDGTEELLVKLNREDLLRKQRTFDNGSIPHQIHLGELHAILRRQEDFYPFLKDNREKIEKILTFRIPYYVGPLARGNSRFAWMTRKSEETITPWNFEEVVDKGASAQSFIERMTNFDKNLPNEKVLPKHSLLYEYFTVYNELTKVKYVTEGMRKPAFLSGEQKKAIVDLLFKTNRKVTVKQLKEDYFKKIECFDSVEISGVEDRFNASLGTYHDLLKIIKDKDFLDNEENEDILEDIVLTLTLFEDREMIEERLKTYAHLFDDKVMKQLKRRRYTGWGRLSRKLINGIRDKQSGKTILDFLKSDGFANRNFMQLIHDDSLTFKEDIQKAQVSGQGDSLHEHIANLAGSPAIKKGILQTVKVVDELVKVMGRHKPENIVIEMARENQTTQKGQKNSRERMKRIEEGIKELGSQILKEHPVENTQLQNEKLYLYYLQNGRDMYVDQELDINRLSDYDVDHIVPQSFLKDDSIDNKVLTRSDKARGKSDNVPSEEVVKKMKNYWRQLLNAKLITQRKFDNLTKAERGGLSELDKAGFIKRQLVETRQITKHVAQILDSRMNTKYDENDKLIREVKVITLKSKLVSDFRKDFQFYKVREINNYHHAHDAYLNAVVGTALIKKYPKLESEFVYGDYKVYDVRKMIAKSEQEIGKATAKYFFYSNIMNFFKTEITLANGEIRKRPLIETNGETGEIVWDKGRDFATVRKVLSMPQVNIVKKTEVQTGGFSKESILPKRNSDKLIARKKDWDPKKYGGFDSPTVAYSVLVVAKVEKGKSKKLKSVKELLGITIMERSSFEKNPIDFLEAKGYKEVKKDLIIKLPKYSLFELENGRKRMLASAGELQKGNELALPSKYVNFLYLASHYEKLKGSPEDNEQKQLFVEQHKHYLDEIIEQISEFSKRVILADANLDKVLSAYNKHRDKPIREQAENIIHLFTLTNLGAPAAFKYFDTTIDRKRYTSTKEVLDATLIHQSITGLYETRIDLSQLGGDGGGSSGGGEAAAKGGTLGIEDEYRLHETSTEPDVSLGSTWLSDFPQAWAETGGMGLAVRQAPLIIPLKATSTPVSIQQYPMSHEARLGIKPHIQRLLDQGILVPCQSPWNTPLLPVKKPGTNDYRPVQDLREVNKRVEDIHPTVPNPYNLLSGLPPSHQWYTVLDLKDAFFCLRLHPTSQPLFAFEWRDPGMGISGQLTWTRLPQGFKNSPTLFNEALHRDLADFRIQHPDLILLQYVDDILLAATSELDCQQGTRALLQTLGDLGYRASAKKAQICQKQVKYLGYLLREGQRWLTEARKETVMGQPVPKTPRQLREFLGTAGFCRLWIPGFAEMAAPLYPLTKPGTLFSWGPDQQKAYQEIKQALLTAPALGLPDLTKPFELFVDEKQGYAKGVLTQKLGPWRRPVAYLSKKLDPVAAGWPPCLRMVAAIAVLTKDAGKLTMGQPLVILAPHAVEALVKQPPDRWLSNARMTHYQAMLLDTDRVQFGPVVALNPATLLPLPEEGAPHDCLEILAETHGTRPDLTDQPIPDADHTWYTDGSSFLQEGQRKAGAAVTTETEVIWAGALPAGTSAQRAELIALTQALKMAEGKRLNVYTDSRYAFATAHIHGEIYRRRGWLTSEGREIKNKSEILALLKALFLPKRLSIIHCLGHQKGDSAEARGNRLADQAAREAAIKTPPDTSTLLAGKRTADGSEFEKRTADGSEFESPKKKAKVE

SEQ ID NO: 2215 - protein, 2096 aa, synthetic construct
MPAAKRVKLDGGDKKYSIGLDIGTNSVGWAVITDEYKVPSKKFKVLGNTDRHSIKKNLIGALLFDSGETAEATRLKRTARRRYTRRKNRICYLQEIFSNEMAKVDDSFFHRLEESFLVEEDKKHERHPIFGNIVDEVAYHEKYPTIYHLRKKLVDSTDKADLRLIYLALAHMIKFRGHFLIEGDLNPDNSDVDKLFIQLVQTYNQLFEENPINASGVDAKAILSARLSKSRRLENLIAQLPGEKKNGLFGNLIALSLGLTPNFKSNFDLAEDAKLQLSKDTYDDDLDNLLAQIGDQYADLFLAAKNLSDAILLSDILRVNTEITKAPLSASMIKRYDEHHQDLTLLKALVRQQLPEKYKEIFFDQSKNGYAGYIDGGASQEEFYKFIKPILEKMDGTEELLVKLNREDLLRKQRTFDNGSIPHQIHLGELHAILRRQEDFYPFLKDNREKIEKILTFRIPYYVGPLARGNSRFAWMTRKSEETITPWNFEEVVDKGASAQSFIERMTNFDKNLPNEKVLPKHSLLYEYFTVYNELTKVKYVTEGMRKPAFLSGEQKKAIVDLLFKTNRKVTVKQLKEDYFKKIECFDSVEISGVEDRFNASLGTYHDLLKIIKDKDFLDNEENEDILEDIVLTLTLFEDREMIEERLKTYAHLFDDKVMKQLKRRRYTGWGRLSRKLINGIRDKQSGKTILDFLKSDGFANRNFMQLIHDDSLTFKEDIQKAQVSGQGDSLHEHIANLAGSPAIKKGILQTVKVVDELVKVMGRHKPENIVIEMARENQTTQKGQKNSRERMKRIEEGIKELGSQILKEHPVENTQLQNEKLYLYYLQNGRDMYVDQELDINRLSDYDVDHIVPQSFLKDDSIDNKVLTRSDKARGKSDNVPSEEVVKKMKNYWRQLLNAKLITQRKFDNLTKAERGGLSELDKAGFIKRQLVETRQITKHVAQILDSRMNTKYDENDKLIREVKVITLKSKLVSDFRKDFQFYKVREINNYHHAHDAYLNAVVGTALIKKYPKLESEFVYGDYKVYDVRKMIAKSEQEIGKATAKYFFYSNIMNFFKTEITLANGEIRKRPLIETNGETGEIVWDKGRDFATVRKVLSMPQVNIVKKTEVQTGGFSKESILPKRNSDKLIARKKDWDPKKYGGFDSPTVAYSVLVVAKVEKGKSKKLKSVKELLGITIMERSSFEKNPIDFLEAKGYKEVKKDLIIKLPKYSLFELENGRKRMLASAGELQKGNELALPSKYVNFLYLASHYEKLKGSPEDNEQKQLFVEQHKHYLDEIIEQISEFSKRVILADANLDKVLSAYNKHRDKPIREQAENIIHLFTLTNLGAPAAFKYFDTTIDRKRYTSTKEVLDATLIHQSITGLYETRIDLSQLGGDGGGSSEAAAKPAPGGTLGIEDEYRLHETSTEPDVSLGSTWLSDFPQAWAETGGMGLAVRQAPLIIPLKATSTPVSIQQYPMSHEARLGIKPHIQRLLDQGILVPCQSPWNTPLLPVKKPGTNDYRPVQDLREVNKRVEDIHPTVPNPYNLLSGLPPSHQWYTVLDLKDAFFCLRLHPTSQPLFAFEWRDPGMGISGQLTWTRLPQGFKNSPTLFNEALHRDLADFRIQHPDLILLQYVDDILLAATSELDCQQGTRALLQTLGDLGYRASAKKAQICQKQVKYLGYLLREGQRWLTEARKETVMGQPVPKTPRQLREFLGTAGFCRLWIPGFAEMAAPLYPLTKPGTLFSWGPDQQKAYQEIKQALLTAPALGLPDLTKPFELFVDEKQGYAKGVLTQKLGPWRRPVAYLSKKLDPVAAGWPPCLRMVAAIAVLTKDAGKLTMGQPLVILAPHAVEALVKQPPDRWLSNARMTHYQAMLLDTDRVQFGPVVALNPATLLPLPEEGAPHDCLEILAETHGTRPDLTDQPIPDADHTWYTDGSSFLQEGQRKAGAAVTTETEVIWAGALPAGTSAQRAELIALTQALKMAEGKRLNVYTDSRYAFATAHIHGEIYRRRGWLTSEGREIKNKSEILALLKALFLPKRLSIIHCLGHQKGDSAEARGNRLADQAAREAAIKTPPDTSTLLAGKRTADGSEFEKRTADGSEFESPKKKAKVE

SEQ ID NO: 2216 - protein, 2091 aa, synthetic construct
MPAAKRVKLDGGDKKYSIGLDIGTNSVGWAVITDEYKVPSKKFKVLGNTDRHSIKKNLIGALLFDSGETAEATRLKRTARRRYTRRKNRICYLQEIFSNEMAKVDDSFFHRLEESFLVEEDKKHERHPIFGNIVDEVAYHEKYPTIYHLRKKLVDSTDKADLRLIYLALAHMIKFRGHFLIEGDLNPDNSDVDKLFIQLVQTYNQLFEENPINASGVDAKAILSARLSKSRRLENLIAQLPGEKKNGLFGNLIALSLGLTPNFKSNFDLAEDAKLQLSKDTYDDDLDNLLAQIGDQYADLFLAAKNLSDAILLSDILRVNTEITKAPLSASMIKRYDEHHQDLTLLKALVRQQLPEKYKEIFFDQSKNGYAGYIDGGASQEEFYKFIKPILEKMDGTEELLVKLNREDLLRKQRTFDNGSIPHQIHLGELHAILRRQEDFYPFLKDNREKIEKILTFRIPYYVGPLARGNSRFAWMTRKSEETITPWNFEEVVDKGASAQSFIERMTNFDKNLPNEKVLPKHSLLYEYFTVYNELTKVKYVTEGMRKPAFLSGEQKKAIVDLLFKTNRKVTVKQLKEDYFKKIECFDSVEISGVEDRFNASLGTYHDLLKIIKDKDFLDNEENEDILEDIVLTLTLFEDREMIEERLKTYAHLFDDKVMKQLKRRRYTGWGRLSRKLINGIRDKQSGKTILDFLKSDGFANRNFMQLIHDDSLTFKEDIQKAQVSGQGDSLHEHIANLAGSPAIKKGILQTVKVVDELVKVMGRHKPENIVIEMARENQTTQKGQKNSRERMKRIEEGIKELGSQILKEHPVENTQLQNEKLYLYYLQNGRDMYVDQELDINRLSDYDVDHIVPQSFLKDDSIDNKVLTRSDKARGKSDNVPSEEVVKKMKNYWRQLLNAKLITQRKFDNLTKAERGGLSELDKAGFIKRQLVETRQITKHVAQILDSRMNTKYDENDKLIREVKVITLKSKLVSDFRKDFQFYKVREINNYHHAHDAYLNAVVGTALIKKYPKLESEFVYGDYKVYDVRKMIAKSEQEIGKATAKYFFYSNIMNFFKTEITLANGEIRKRPLIETNGETGEIVWDKGRDFATVRKVLSMPQVNIVKKTEVQTGGFSKESILPKRNSDKLIARKKDWDPKKYGGFDSPTVAYSVLVVAKVEKGKSKKLKSVKELLGITIMERSSFEKNPIDFLEAKGYKEVKKDLIIKLPKYSLFELENGRKRMLASAGELQKGNELALPSKYVNFLYLASHYEKLKGSPEDNEQKQLFVEQHKHYLDEIIEQISEFSKRVILADANLDKVLSAYNKHRDKPIREQAENIIHLFTLTNLGAPAAFKYFDTTIDRKRYTSTKEVLDATLIHQSITGLYETRIDLSQLGGDGGGGGGGGGGTLGIEDEYRLHETSTEPDVSLGSTWLSDFPQAWAETGGMGLAVRQAPLIIPLKATSTPVSIQQYPMSHEARLGIKPHIQRLLDQGILVPCQSPWNTPLLPVKKPGTNDYRPVQDLREVNKRVEDIHPTVPNPYNLLSGLPPSHQWYTVLDLKDAFFCLRLHPTSQPLFAFEWRDPGMGISGQLTWTRLPQGFKNSPTLFNEALHRDLADFRIQHPDLILLQYVDDILLAATSELDCQQGTRALLQTLGDLGYRASAKKAQICQKQVKYLGYLLREGQRWLTEARKETVMGQPVPKTPRQLREFLGTAGFCRLWIPGFAEMAAPLYPLTKPGTLFSWGPDQQKAYQEIKQALLTAPALGLPDLTKPFELFVDEKQGYAKGVLTQKLGPWRRPVAYLSKKLDPVAAGWPPCLRMVAAIAVLTKDAGKLTMGQPLVILAPHAVEALVKQPPDRWLSNARMTHYQAMLLDTDRVQFGPVVALNPATLLPLPEEGAPHDCLEILAETHGTRPDLTDQPIPDADHTWYTDGSSFLQEGQRKAGAAVTTETEVIWAGALPAGTSAQRAELIALTQALKMAEGKRLNVYTDSRYAFATAHIHGEIYRRRGWLTSEGREIKNKSEILALLKALFLPKRLSIIHCLGHQKGDSAEARGNRLADQAAREAAIKTPPDTSTLLAGKRTADGSEFEKRTADGSEFESPKKKAKVE

SEQ ID NO: 2217 - protein, 2094 aa, synthetic construct
MPAAKRVKLDGGDKKYSIGLDIGTNSVGWAVITDEYKVPSKKFKVLGNTDRHSIKKNLIGALLFDSGETAEATRLKRTARRRYTRRKNRICYLQEIFSNEMAKVDDSFFHRLEESFLVEEDKKHERHPIFGNIVDEVAYHEKYPTIYHLRKKLVDSTDKADLRLIYLALAHMIKFRGHFLIEGDLNPDNSDVDKLFIQLVQTYNQLFEENPINASGVDAKAILSARLSKSRRLENLIAQLPGEKKNGLFGNLIALSLGLTPNFKSNFDLAEDAKLQLSKDTYDDDLDNLLAQIGDQYADLFLAAKNLSDAILLSDILRVNTEITKAPLSASMIKRYDEHHQDLTLLKALVRQQLPEKYKEIFFDQSKNGYAGYIDGGASQEEFYKFIKPILEKMDGTEELLVKLNREDLLRKQRTFDNGSIPHQIHLGELHAILRRQEDFYPFLKDNREKIEKILTFRIPYYVGPLARGNSRFAWMTRKSEETITPWNFEEVVDKGASAQSFIERMTNFDKNLPNEKVLPKHSLLYEYFTVYNELTKVKYVTEGMRKPAFLSGEQKKAIVDLLFKTNRKVTVKQLKEDYFKKIECFDSVEISGVEDRFNASLGTYHDLLKIIKDKDFLDNEENEDILEDIVLTLTLFEDREMIEERLKTYAHLFDDKVMKQLKRRRYTGWGRLSRKLINGIRDKQSGKTILDFLKSDGFANRNFMQLIHDDSLTFKEDIQKAQVSGQGDSLHEHIANLAGSPAIKKGILQTVKVVDELVKVMGRHKPENIVIEMARENQTTQKGQKNSRERMKRIEEGIKELGSQILKEHPVENTQLQNEKLYLYYLQNGRDMYVDQELDINRLSDYDVDHIVPQSFLKDDSIDNKVLTRSDKARGKSDNVPSEEVVKKMKNYWRQLLNAKLITQRKFDNLTKAERGGLSELDKAGFIKRQLVETRQITKHVAQILDSRMNTKYDENDKLIREVKVITLKSKLVSDFRKDFQFYKVREINNYHHAHDAYLNAVVGTALIKKYPKLESEFVYGDYKVYDVRKMIAKSEQEIGKATAKYFFYSNIMNFFKTEITLANGEIRKRPLIETNGETGEIVWDKGRDFATVRKVLSMPQVNIVKKTEVQTGGFSKESILPKRNSDKLIARKKDWDPKKYGGFDSPTVAYSVLVVAKVEKGKSKKLKSVKELLGITIMERSSFEKNPIDFLEAKGYKEVKKDLIIKLPKYSLFELENGRKRMLASAGELQKGNELALPSKYVNFLYLASHYEKLKGSPEDNEQKQLFVEQHKHYLDEIIEQISEFSKRVILADANLDKVLSAYNKHRDKPIREQAENIIHLFTLTNLGAPAAFKYFDTTIDRKRYTSTKEVLDATLIHQSITGLYETRIDLSQLGGDGGGGSGSSPAPGGTLGIEDEYRLHETSTEPDVSLGSTWLSDFPQAWAETGGMGLAVRQAPLIIPLKATSTPVSIQQYPMSHEARLGIKPHIQRLLDQGILVPCQSPWNTPLLPVKKPGTNDYRPVQDLREVNKRVEDIHPTVPNPYNLLSGLPPSHQWYTVLDLKDAFFCLRLHPTSQPLFAFEWRDPGMGISGQLTWTRLPQGFKNSPTLFNEALHRDLADFRIQHPDLILLQYVDDILLAATSELDCQQGTRALLQTLGDLGYRASAKKAQICQKQVKYLGYLLREGQRWLTEARKETVMGQPVPKTPRQLREFLGTAGFCRLWIPGFAEMAAPLYPLTKPGTLFSWGPDQQKAYQEIKQALLTAPALGLPDLTKPFELFVDEKQGYAKGVLTQKLGPWRRPVAYLSKKLDPVAAGWPPCLRMVAAIAVLTKDAGKLTMGQPLVILAPHAVEALVKQPPDRWLSNARMTHYQAMLLDTDRVQFGPVVALNPATLLPLPEEGAPHDCLEILAETHGTRPDLTDQPIPDADHTWYTDGSSFLQEGQRKAGAAVTTETEVIWAGALPAGTSAQRAELIALTQALKMAEGKRLNVYTDSRYAFATAHIHGEIYRRRGWLTSEGREIKNKSEILALLKALFLPKRLSIIHCLGHQKGDSAEARGNRLADQAAREAAIKTPPDTSTLLAGKRTADGSEFEKRTADGSEFESPKKKAKVE

SEQ ID NO: 2218 - protein, 2096 aa, synthetic construct
MPAAKRVKLDGGDKKYSIGLDIGTNSVGWAVITDEYKVPSKKFKVLGNTDRHSIKKNLIGALLFDSGETAEATRLKRTARRRYTRRKNRICYLQEIFSNEMAKVDDSFFHRLEESFLVEEDKKHERHPIFGNIVDEVAYHEKYPTIYHLRKKLVDSTDKADLRLIYLALAHMIKFRGHFLIEGDLNPDNSDVDKLFIQLVQTYNQLFEENPINASGVDAKAILSARLSKSRRLENLIAQLPGEKKNGLFGNLIALSLGLTPNFKSNFDLAEDAKLQLSKDTYDDDLDNLLAQIGDQYADLFLAAKNLSDAILLSDILRVNTEITKAPLSASMIKRYDEHHQDLTLLKALVRQQLPEKYKEIFFDQSKNGYAGYIDGGASQEEFYKFIKPILEKMDGTEELLVKLNREDLLRKQRTFDNGSIPHQIHLGELHAILRRQEDFYPFLKDNREKIEKILTFRIPYYVGPLARGNSRFAWMTRKSEETITPWNFEEVVDKGASAQSFIERMTNFDKNLPNEKVLPKHSLLYEYFTVYNELTKVKYVTEGMRKPAFLSGEQKKAIVDLLFKTNRKVTVKQLKEDYFKKIECFDSVEISGVEDRFNASLGTYHDLLKIIKDKDFLDNEENEDILEDIVLTLTLFEDREMIEERLKTYAHLFDDKVMKQLKRRRYTGWGRLSRKLINGIRDKQSGKTILDFLKSDGFANRNFMQLIHDDSLTFKEDIQKAQVSGQGDSLHEHIANLAGSPAIKKGILQTVKVVDELVKVMGRHKPENIVIEMARENQTTQKGQKNSRERMKRIEEGIKELGSQILKEHPVENTQLQNEKLYLYYLQNGRDMYVDQELDINRLSDYDVDHIVPQSFLKDDSIDNKVLTRSDKARGKSDNVPSEEVVKKMKNYWRQLLNAKLITQRKFDNLTKAERGGLSELDKAGFIKRQLVETRQITKHVAQILDSRMNTKYDENDKLIREVKVITLKSKLVSDFRKDFQFYKVREINNYHHAHDAYLNAVVGTALIKKYPKLESEFVYGDYKVYDVRKMIAKSEQEIGKATAKYFFYSNIMNFFKTEITLANGEIRKRPLIETNGETGEIVWDKGRDFATVRKVLSMPQVNIVKKTEVQTGGFSKESILPKRNSDKLIARKKDWDPKKYGGFDSPTVAYSVLVVAKVEKGKSKKLKSVKELLGITIMERSSFEKNPIDFLEAKGYKEVKKDLIIKLPKYSLFELENGRKRMLASAGELQKGNELALPSKYVNFLYLASHYEKLKGSPEDNEQKQLFVEQHKHYLDEIIEQISEFSKRVILADANLDKVLSAYNKHRDKPIREQAENIIHLFTLTNLGAPAAFKYFDTTIDRKRYTSTKEVLDATLIHQSITGLYETRIDLSQLGGDGGEAAAKGGSGGGGGTLGIEDEYRLHETSTEPDVSLGSTWLSDFPQAWAETGGMGLAVRQAPLIIPLKATSTPVSIQQYPMSHEARLGIKPHIQRLLDQGILVPCQSPWNTPLLPVKKPGTNDYRPVQDLREVNKRVEDIHPTVPNPYNLLSGLPPSHQWYTVLDLKDAFFCLRLHPTSQPLFAFEWRDPGMGISGQLTWTRLPQGFKNSPTLFNEALHRDLADFRIQHPDLILLQYVDDILLAATSELDCQQGTRALLQTLGDLGYRASAKKAQICQKQVKYLGYLLREGQRWLTEARKETVMGQPVPKTPRQLREFLGTAGFCRLWIPGFAEMAAPLYPLTKPGTLFSWGPDQQKAYQEIKQALLTAPALGLPDLTKPFELFVDEKQGYAKGVLTQKLGPWRRPVAYLSKKLDPVAAGWPPCLRMVAAIAVLTKDAGKLTMGQPLVILAPHAVEALVKQPPDRWLSNARMTHYQAMLLDTDRVQFGPVVALNPATLLPLPEEGAPHDCLEILAETHGTRPDLTDQPIPDADHTWYTDGSSFLQEGQRKAGAAVTTETEVIWAGALPAGTSAQRAELIALTQALKMAEGKRLNVYTDSRYAFATAHIHGEIYRRRGWLTSEGREIKNKSEILALLKALFLPKRLSIIHCLGHQKGDSAEARGNRLADQAAREAAIKTPPDTSTLLAGKRTADGSEFEKRTADGSEFESPKKKAKVE

SEQ ID NO: 2219 - protein, 2094 aa, synthetic construct
MPAAKRVKLDGGDKKYSIGLDIGTNSVGWAVITDEYKVPSKKFKVLGNTDRHSIKKNLIGALLFDSGETAEATRLKRTARRRYTRRKNRICYLQEIFSNEMAKVDDSFFHRLEESFLVEEDKKHERHPIFGNIVDEVAYHEKYPTIYHLRKKLVDSTDKADLRLIYLALAHMIKFRGHFLIEGDLNPDNSDVDKLFIQLVQTYNQLFEENPINASGVDAKAILSARLSKSRRLENLIAQLPGEKKNGLFGNLIALSLGLTPNFKSNFDLAEDAKLQLSKDTYDDDLDNLLAQIGDQYADLFLAAKNLSDAILLSDILRVNTEITKAPLSASMIKRYDEHHQDLTLLKALVRQQLPEKYKEIFFDQSKNGYAGYIDGGASQEEFYKFIKPILEKMDGTEELLVKLNREDLLRKQRTFDNGSIPHQIHLGELHAILRRQEDFYPFLKDNREKIEKILTFRIPYYVGPLARGNSRFAWMTRKSEETITPWNFEEVVDKGASAQSFIERMTNFDKNLPNEKVLPKHSLLYEYFTVYNELTKVKYVTEGMRKPAFLSGEQKKAIVDLLFKTNRKVTVKQLKEDYFKKIECFDSVEISGVEDRFNASLGTYHDLLKIIKDKDFLDNEENEDILEDIVLTLTLFEDREMIEERLKTYAHLFDDKVMKQLKRRRYTGWGRLSRKLINGIRDKQSGKTILDFLKSDGFANRNFMQLIHDDSLTFKEDIQKAQVSGQGDSLHEHIANLAGSPAIKKGILQTVKVVDELVKVMGRHKPENIVIEMARENQTTQKGQKNSRERMKRIEEGIKELGSQILKEHPVENTQLQNEKLYLYYLQNGRDMYVDQELDINRLSDYDVDHIVPQSFLKDDSIDNKVLTRSDKARGKSDNVPSEEVVKKMKNYWRQLLNAKLITQRKFDNLTKAERGGLSELDKAGFIKRQLVETRQITKHVAQILDSRMNTKYDENDKLIREVKVITLKSKLVSDFRKDFQFYKVREINNYHHAHDAYLNAVVGTALIKKYPKLESEFVYGDYKVYDVRKMIAKSEQEIGKATAKYFFYSNIMNFFKTEITLANGEIRKRPLIETNGETGEIVWDKGRDFATVRKVLSMPQVNIVKKTEVQTGGFSKESILPKRNSDKLIARKKDWDPKKYGGFDSPTVAYSVLVVAKVEKGKSKKLKSVKELLGITIMERSSFEKNPIDFLEAKGYKEVKKDLIIKLPKYSLFELENGRKRMLASAGELQKGNELALPSKYVNFLYLASHYEKLKGSPEDNEQKQLFVEQHKHYLDEIIEQISEFSKRVILADANLDKVLSAYNKHRDKPIREQAENIIHLFTLTNLGAPAAFKYFDTTIDRKRYTSTKEVLDATLIHQSITGLYETRIDLSQLGGDGGGSSGSSGSSGGTLGIEDEYRLHETSTEPDVSLGSTWLSDFPQAWAETGGMGLAVRQAPLIIPLKATSTPVSIQQYPMSHEARLGIKPHIQRLLDQGILVPCQSPWNTPLLPVKKPGTNDYRPVQDLREVNKRVEDIHPTVPNPYNLLSGLPPSHQWYTVLDLKDAFFCLRLHPTSQPLFAFEWRDPGMGISGQLTWTRLPQGFKNSPTLFNEALHRDLADFRIQHPDLILLQYVDDILLAATSELDCQQGTRALLQTLGDLGYRASAKKAQICQKQVKYLGYLLREGQRWLTEARKETVMGQPVPKTPRQLREFLGTAGFCRLWIPGFAEMAAPLYPLTKPGTLFSWGPDQQKAYQEIKQALLTAPALGLPDLTKPFELFVDEKQGYAKGVLTQKLGPWRRPVAYLSKKLDPVAAGWPPCLRMVAAIAVLTKDAGKLTMGQPLVILAPHAVEALVKQPPDRWLSNARMTHYQAMLLDTDRVQFGPVVALNPATLLPLPEEGAPHDCLEILAETHGTRPDLTDQPIPDADHTWYTDGSSFLQEGQRKAGAAVTTETEVIWAGALPAGTSAQRAELIALTQALKMAEGKRLNVYTDSRYAFATAHIHGEIYRRRGWLTSEGREIKNKSEILALLKALFLPKRLSIIHCLGHQKGDSAEARGNRLADQAAREAAIKTPPDTSTLLAGKRTADGSEFEKRTADGSEFESPKKKAKVE

SEQ ID NO: 2220 - protein, 2097 aa, synthetic construct
MPAAKRVKLDGGDKKYSIGLDIGTNSVGWAVITDEYKVPSKKFKVLGNTDRHSIKKNLIGALLFDSGETAEATRLKRTARRRYTRRKNRICYLQEIFSNEMAKVDDSFFHRLEESFLVEEDKKHERHPIFGNIVDEVAYHEKYPTIYHLRKKLVDSTDKADLRLIYLALAHMIKFRGHFLIEGDLNPDNSDVDKLFIQLVQTYNQLFEENPINASGVDAKAILSARLSKSRRLENLIAQLPGEKKNGLFGNLIALSLGLTPNFKSNFDLAEDAKLQLSKDTYDDDLDNLLAQIGDQYADLFLAAKNLSDAILLSDILRVNTEITKAPLSASMIKRYDEHHQDLTLLKALVRQQLPEKYKEIFFDQSKNGYAGYIDGGASQEEFYKFIKPILEKMDGTEELLVKLNREDLLRKQRTFDNGSIPHQIHLGELHAILRRQEDFYPFLKDNREKIEKILTFRIPYYVGPLARGNSRFAWMTRKSEETITPWNFEEVVDKGASAQSFIERMTNFDKNLPNEKVLPKHSLLYEYFTVYNELTKVKYVTEGMRKPAFLSGEQKKAIVDLLFKTNRKVTVKQLKEDYFKKIECFDSVEISGVEDRFNASLGTYHDLLKIIKDKDFLDNEENEDILEDIVLTLTLFEDREMIEERLKTYAHLFDDKVMKQLKRRRYTGWGRLSRKLINGIRDKQSGKTILDFLKSDGFANRNFMQLIHDDSLTFKEDIQKAQVSGQGDSLHEHIANLAGSPAIKKGILQTVKVVDELVKVMGRHKPENIVIEMARENQTTQKGQKNSRERMKRIEEGIKELGSQILKEHPVENTQLQNEKLYLYYLQNGRDMYVDQELDINRLSDYDVDHIVPQSFLKDDSIDNKVLTRSDKARGKSDNVPSEEVVKKMKNYWRQLLNAKLITQRKFDNLTKAERGGLSELDKAGFIKRQLVETRQITKHVAQILDSRMNTKYDENDKLIREVKVITLKSKLVSDFRKDFQFYKVREINNYHHAHDAYLNAVVGTALIKKYPKLESEFVYGDYKVYDVRKMIAKSEQEIGKATAKYFFYSNIMNFFKTEITLANGEIRKRPLIETNGETGEIVWDKGRDFATVRKVLSMPQVNIVKKTEVQTGGFSKESILPKRNSDKLIARKKDWDPKKYGGFDSPTVAYSVLVVAKVEKGKSKKLKSVKELLGITIMERSSFEKNPIDFLEAKGYKEVKKDLIIKLPKYSLFELENGRKRMLASAGELQKGNELALPSKYVNFLYLASHYEKLKGSPEDNEQKQLFVEQHKHYLDEIIEQISEFSKRVILADANLDKVLSAYNKHRDKPIREQAENIIHLFTLTNLGAPAAFKYFDTTIDRKRYTSTKEVLDATLIHQSITGLYETRIDLSQLGGDGGGSAGSAAGSGEFGGTLGIEDEYRLHETSTEPDVSLGSTWLSDFPQAWAETGGMGLAVRQAPLIIPLKATSTPVSIQQYPMSHEARLGIKPHIQRLLDQGILVPCQSPWNTPLLPVKKPGTNDYRPVQDLREVNKRVEDIHPTVPNPYNLLSGLPPSHQWYTVLDLKDAFFCLRLHPTSQPLFAFEWRDPGMGISGQLTWTRLPQGFKNSPTLFNEALHRDLADFRIQHPDLILLQYVDDILLAATSELDCQQGTRALLQTLGDLGYRASAKKAQICQKQVKYLGYLLREGQRWLTEARKETVMGQPVPKTPRQLREFLGTAGFCRLWIPGFAEMAAPLYPLTKPGTLFSWGPDQQKAYQEIKQALLTAPALGLPDLTKPFELFVDEKQGYAKGVLTQKLGPWRRPVAYLSKKLDPVAAGWPPCLRMVAAIAVLTKDAGKLTMGQPLVILAPHAVEALVKQPPDRWLSNARMTHYQAMLLDTDRVQFGPVVALNPATLLPLPEEGAPHDCLEILAETHGTRPDLTDQPIPDADHTWYTDGSSFLQEGQRKAGAAVTTETEVIWAGALPAGTSAQRAELIALTQALKMAEGKRLNVYTDSRYAFATAHIHGEIYRRRGWLTSEGREIKNKSEILALLKALFLPKRLSIIHCLGHQKGDSAEARGNRLADQAAREAAIKTPPDTSTLLAGKRTADGSEFEKRTADGSEFESPKKKAKVE

SEQ ID NO: 2221 - protein, 2090 aa, synthetic construct
MPAAKRVKLDGGDKKYSIGLDIGTNSVGWAVITDEYKVPSKKFKVLGNTDRHSIKKNLIGALLFDSGETAEATRLKRTARRRYTRRKNRICYLQEIFSNEMAKVDDSFFHRLEESFLVEEDKKHERHPIFGNIVDEVAYHEKYPTIYHLRKKLVDSTDKADLRLIYLALAHMIKFRGHFLIEGDLNPDNSDVDKLFIQLVQTYNQLFEENPINASGVDAKAILSARLSKSRRLENLIAQLPGEKKNGLFGNLIALSLGLTPNFKSNFDLAEDAKLQLSKDTYDDDLDNLLAQIGDQYADLFLAAKNLSDAILLSDILRVNTEITKAPLSASMIKRYDEHHQDLTLLKALVRQQLPEKYKEIFFDQSKNGYAGYIDGGASQEEFYKFIKPILEKMDGTEELLVKLNREDLLRKQRTFDNGSIPHQIHLGELHAILRRQEDFYPFLKDNREKIEKILTFRIPYYVGPLARGNSRFAWMTRKSEETITPWNFEEVVDKGASAQSFIERMTNFDKNLPNEKVLPKHSLLYEYFTVYNELTKVKYVTEGMRKPAFLSGEQKKAIVDLLFKTNRKVTVKQLKEDYFKKIECFDSVEISGVEDRFNASLGTYHDLLKIIKDKDFLDNEENEDILEDIVLTLTLFEDREMIEERLKTYAHLFDDKVMKQLKRRRYTGWGRLSRKLINGIRDKQSGKTILDFLKSDGFANRNFMQLIHDDSLTFKEDIQKAQVSGQGDSLHEHIANLAGSPAIKKGILQTVKVVDELVKVMGRHKPENIVIEMARENQTTQKGQKNSRERMKRIEEGIKELGSQILKEHPVENTQLQNEKLYLYYLQNGRDMYVDQELDINRLSDYDVDHIVPQSFLKDDSIDNKVLTRSDKARGKSDNVPSEEVVKKMKNYWRQLLNAKLITQRKFDNLTKAERGGLSELDKAGFIKRQLVETRQITKHVAQILDSRMNTKYDENDKLIREVKVITLKSKLVSDFRKDFQFYKVREINNYHHAHDAYLNAVVGTALIKKYPKLESEFVYGDYKVYDVRKMIAKSEQEIGKATAKYFFYSNIMNFFKTEITLANGEIRKRPLIETNGETGEIVWDKGRDFATVRKVLSMPQVNIVKKTEVQTGGFSKESILPKRNSDKLIARKKDWDPKKYGGFDSPTVAYSVLVVAKVEKGKSKKLKSVKELLGITIMERSSFEKNPIDFLEAKGYKEVKKDLIIKLPKYSLFELENGRKRMLASAGELQKGNELALPSKYVNFLYLASHYEKLKGSPEDNEQKQLFVEQHKHYLDEIIEQISEFSKRVILADANLDKVLSAYNKHRDKPIREQAENIIHLFTLTNLGAPAAFKYFDTTIDRKRYTSTKEVLDATLIHQSITGLYETRIDLSQLGGDGGGGGGGGGTLGIEDEYRLHETSTEPDVSLGSTWLSDFPQAWAETGGMGLAVRQAPLIIPLKATSTPVSIQQYPMSHEARLGIKPHIQRLLDQGILVPCQSPWNTPLLPVKKPGTNDYRPVQDLREVNKRVEDIHPTVPNPYNLLSGLPPSHQWYTVLDLKDAFFCLRLHPTSQPLFAFEWRDPGMGISGQLTWTRLPQGFKNSPTLFNEALHRDLADFRIQHPDLILLQYVDDILLAATSELDCQQGTRALLQTLGDLGYRASAKKAQICQKQVKYLGYLLREGQRWLTEARKETVMGQPVPKTPRQLREFLGTAGFCRLWIPGFAEMAAPLYPLTKPGTLFSWGPDQQKAYQEIKQALLTAPALGLPDLTKPFELFVDEKQGYAKGVLTQKLGPWRRPVAYLSKKLDPVAAGWPPCLRMVAAIAVLTKDAGKLTMGQPLVILAPHAVEALVKQPPDRWLSNARMTHYQAMLLDTDRVQFGPVVALNPATLLPLPEEGAPHDCLEILAETHGTRPDLTDQPIPDADHTWYTDGSSFLQEGQRKAGAAVTTETEVIWAGALPAGTSAQRAELIALTQALKMAEGKRLNVYTDSRYAFATAHIHGEIYRRRGWLTSEGREIKNKSEILALLKALFLPKRLSIIHCLGHQKGDSAEARGNRLADQAAREAAIKTPPDTSTLLAGKRTADGSEFEKRTADGSEFESPKKKAKVE

SEQ ID NO: 2222 - protein, 2094 aa, synthetic construct
MPAAKRVKLDGGDKKYSIGLDIGTNSVGWAVITDEYKVPSKKFKVLGNTDRHSIKKNLIGALLFDSGETAEATRLKRTARRRYTRRKNRICYLQEIFSNEMAKVDDSFFHRLEESFLVEEDKKHERHPIFGNIVDEVAYHEKYPTIYHLRKKLVDSTDKADLRLIYLALAHMIKFRGHFLIEGDLNPDNSDVDKLFIQLVQTYNQLFEENPINASGVDAKAILSARLSKSRRLENLIAQLPGEKKNGLFGNLIALSLGLTPNFKSNFDLAEDAKLQLSKDTYDDDLDNLLAQIGDQYADLFLAAKNLSDAILLSDILRVNTEITKAPLSASMIKRYDEHHQDLTLLKALVRQQLPEKYKEIFFDQSKNGYAGYIDGGASQEEFYKFIKPILEKMDGTEELLVKLNREDLLRKQRTFDNGSIPHQIHLGELHAILRRQEDFYPFLKDNREKIEKILTFRIPYYVGPLARGNSRFAWMTRKSEETITPWNFEEVVDKGASAQSFIERMTNFDKNLPNEKVLPKHSLLYEYFTVYNELTKVKYVTEGMRKPAFLSGEQKKAIVDLLFKTNRKVTVKQLKEDYFKKIECFDSVEISGVEDRFNASLGTYHDLLKIIKDKDFLDNEENEDILEDIVLTLTLFEDREMIEERLKTYAHLFDDKVMKQLKRRRYTGWGRLSRKLINGIRDKQSGKTILDFLKSDGFANRNFMQLIHDDSLTFKEDIQKAQVSGQGDSLHEHIANLAGSPAIKKGILQTVKVVDELVKVMGRHKPENIVIEMARENQTTQKGQKNSRERMKRIEEGIKELGSQILKEHPVENTQLQNEKLYLYYLQNGRDMYVDQELDINRLSDYDVDHIVPQSFLKDDSIDNKVLTRSDKARGKSDNVPSEEVVKKMKNYWRQLLNAKLITQRKFDNLTKAERGGLSELDKAGFIKRQLVETRQITKHVAQILDSRMNTKYDENDKLIREVKVITLKSKLVSDFRKDFQFYKVREINNYHHAHDAYLNAVVGTALIKKYPKLESEFVYGDYKVYDVRKMIAKSEQEIGKATAKYFFYSNIMNFFKTEITLANGEIRKRPLIETNGETGEIVWDKGRDFATVRKVLSMPQVNIVKKTEVQTGGFSKESILPKRNSDKLIARKKDWDPKKYGGFDSPTVAYSVLVVAKVEKGKSKKLKSVKELLGITIMERSSFEKNPIDFLEAKGYKEVKKDLIIKLPKYSLFELENGRKRMLASAGELQKGNELALPSKYVNFLYLASHYEKLKGSPEDNEQKQLFVEQHKHYLDEIIEQISEFSKRVILADANLDKVLSAYNKHRDKPIREQAENIIHLFTLTNLGAPAAFKYFDTTIDRKRYTSTKEVLDATLIHQSITGLYETRIDLSQLGGDGGGSSGGSPAPGGTLGIEDEYRLHETSTEPDVSLGSTWLSDFPQAWAETGGMGLAVRQAPLIIPLKATSTPVSIQQYPMSHEARLGIKPHIQRLLDQGILVPCQSPWNTPLLPVKKPGTNDYRPVQDLREVNKRVEDIHPTVPNPYNLLSGLPPSHQWYTVLDLKDAFFCLRLHPTSQPLFAFEWRDPGMGISGQLTWTRLPQGFKNSPTLFNEALHRDLADFRIQHPDLILLQYVDDILLAATSELDCQQGTRALLQTLGDLGYRASAKKAQICQKQVKYLGYLLREGQRWLTEARKETVMGQPVPKTPRQLREFLGTAGFCRLWIPGFAEMAAPLYPLTKPGTLFSWGPDQQKAYQEIKQALLTAPALGLPDLTKPFELFVDEKQGYAKGVLTQKLGPWRRPVAYLSKKLDPVAAGWPPCLRMVAAIAVLTKDAGKLTMGQPLVILAPHAVEALVKQPPDRWLSNARMTHYQAMLLDTDRVQFGPVVALNPATLLPLPEEGAPHDCLEILAETHGTRPDLTDQPIPDADHTWYTDGSSFLQEGQRKAGAAVTTETEVIWAGALPAGTSAQRAELIALTQALKMAEGKRLNVYTDSRYAFATAHIHGEIYRRRGWLTSEGREIKNKSEILALLKALFLPKRLSIIHCLGHQKGDSAEARGNRLADQAAREAAIKTPPDTSTLLAGKRTADGSEFEKRTADGSEFESPKKKAKVE

SEQ ID NO: 2223 - protein, 2096 aa, synthetic construct
MPAAKRVKLDGGDKKYSIGLDIGTNSVGWAVITDEYKVPSKKFKVLGNTDRHSIKKNLIGALLFDSGETAEATRLKRTARRRYTRRKNRICYLQEIFSNEMAKVDDSFFHRLEESFLVEEDKKHERHPIFGNIVDEVAYHEKYPTIYHLRKKLVDSTDKADLRLIYLALAHMIKFRGHFLIEGDLNPDNSDVDKLFIQLVQTYNQLFEENPINASGVDAKAILSARLSKSRRLENLIAQLPGEKKNGLFGNLIALSLGLTPNFKSNFDLAEDAKLQLSKDTYDDDLDNLLAQIGDQYADLFLAAKNLSDAILLSDILRVNTEITKAPLSASMIKRYDEHHQDLTLLKALVRQQLPEKYKEIFFDQSKNGYAGYIDGGASQEEFYKFIKPILEKMDGTEELLVKLNREDLLRKQRTFDNGSIPHQIHLGELHAILRRQEDFYPFLKDNREKIEKILTFRIPYYVGPLARGNSRFAWMTRKSEETITPWNFEEVVDKGASAQSFIERMTNFDKNLPNEKVLPKHSLLYEYFTVYNELTKVKYVTEGMRKPAFLSGEQKKAIVDLLFKTNRKVTVKQLKEDYFKKIECFDSVEISGVEDRFNASLGTYHDLLKIIKDKDFLDNEENEDILEDIVLTLTLFEDREMIEERLKTYAHLFDDKVMKQLKRRRYTGWGRLSRKLINGIRDKQSGKTILDFLKSDGFANRNFMQLIHDDSLTFKEDIQKAQVSGQGDSLHEHIANLAGSPAIKKGILQTVKVVDELVKVMGRHKPENIVIEMARENQTTQKGQKNSRERMKRIEEGIKELGSQILKEHPVENTQLQNEKLYLYYLQNGRDMYVDQELDINRLSDYDVDHIVPQSFLKDDSIDNKVLTRSDKARGKSDNVPSEEVVKKMKNYWRQLLNAKLITQRKFDNLTKAERGGLSELDKAGFIKRQLVETRQITKHVAQILDSRMNTKYDENDKLIREVKVITLKSKLVSDFRKDFQFYKVREINNYHHAHDAYLNAVVGTALIKKYPKLESEFVYGDYKVYDVRKMIAKSEQEIGKATAKYFFYSNIMNFFKTEITLANGEIRKRPLIETNGETGEIVWDKGRDFATVRKVLSMPQVNIVKKTEVQTGGFSKESILPKRNSDKLIARKKDWDPKKYGGFDSPTVAYSVLVVAKVEKGKSKKLKSVKELLGITIMERSSFEKNPIDFLEAKGYKEVKKDLIIKLPKYSLFELENGRKRMLASAGELQKGNELALPSKYVNFLYLASHYEKLKGSPEDNEQKQLFVEQHKHYLDEIIEQISEFSKRVILADANLDKVLSAYNKHRDKPIREQAENIIHLFTLTNLGAPAAFKYFDTTIDRKRYTSTKEVLDATLIHQSITGLYETRIDLSQLGGDGGEAAAKPAPGGGGGTLNIEDEYRLHETSKEPDVSLGSTWLSDFPQAWAETGGMGLAVRQAPLIIPLKATSTPVSIKQYPMSQEARLGIKPHIQRLLDQGILVPCQSPWNTPLLPVKKPGTNDYRPVQDLREVNKRVEDIHPTVPNPYNLLSGLPPSHQWYTVLDLKDAFFCLRLHPTSQPLFAFEWRDPEMGISGQLTWTRLPQGFKNSPTLFDEALHRDLAGFRIQHPDLILLQYVDDLLLAATSELDCQQGTRALLQTLGDLGYRASAKKAQICQKQVKYLGYLLKEGQRWLTEARKETVMGQPIPKTPRQLREFLGTAGFCRLWIPGFAEMAAPLYPLTKTGTLFNWGPDQQKAFQEIKQALLTAPALGLPDLTKPFELFVDEKQGYAKGVLTQKLGPWRRPVAYLSKKLDPVAAGWPPCLRMVAAIAVLTKDAGKLTMGQPLVILAPHAVEALVKQPPDRWLSNARMTHYQALLLDTDRVQFGPVVALNPATLLPLPEEGLQHDCLDILAEAHGTRSDLMDQPLPDADHTWYTDGSSFLQEGQRKAGAAVTTETEVIWARALPAGTSAQRAELIALTQALKMAEGKKLNVYTDSRYAFATAHIHGEIYRRRGLLTSEGKEIKNKDEILALLKALFLPKRLSIIHCPGHQKGNSAEARGNRMADQAAREVATRETPETSTLLAGKRTADGSEFEKRTADGSEFESPKKKAKVE

SEQ ID NO: 2224 - protein, 2115 aa, synthetic construct
MPAAKRVKLDGGDKKYSIGLDIGTNSVGWAVITDEYKVPSKKFKVLGNTDRHSIKKNLIGALLFDSGETAEATRLKRTARRRYTRRKNRICYLQEIFSNEMAKVDDSFFHRLEESFLVEEDKKHERHPIFGNIVDEVAYHEKYPTIYHLRKKLVDSTDKADLRLIYLALAHMIKFRGHFLIEGDLNPDNSDVDKLFIQLVQTYNQLFEENPINASGVDAKAILSARLSKSRRLENLIAQLPGEKKNGLFGNLIALSLGLTPNFKSNFDLAEDAKLQLSKDTYDDDLDNLLAQIGDQYADLFLAAKNLSDAILLSDILRVNTEITKAPLSASMIKRYDEHHQDLTLLKALVRQQLPEKYKEIFFDQSKNGYAGYIDGGASQEEFYKFIKPILEKMDGTEELLVKLNREDLLRKQRTFDNGSIPHQIHLGELHAILRRQEDFYPFLKDNREKIEKILTFRIPYYVGPLARGNSRFAWMTRKSEETITPWNFEEVVDKGASAQSFIERMTNFDKNLPNEKVLPKHSLLYEYFTVYNELTKVKYVTEGMRKPAFLSGEQKKAIVDLLFKTNRKVTVKQLKEDYFKKIECFDSVEISGVEDRFNASLGTYHDLLKIIKDKDFLDNEENEDILEDIVLTLTLFEDREMIEERLKTYAHLFDDKVMKQLKRRRYTGWGRLSRKLINGIRDKQSGKTILDFLKSDGFANRNFMQLIHDDSLTFKEDIQKAQVSGQGDSLHEHIANLAGSPAIKKGILQTVKVVDELVKVMGRHKPENIVIEMARENQTTQKGQKNSRERMKRIEEGIKELGSQILKEHPVENTQLQNEKLYLYYLQNGRDMYVDQELDINRLSDYDVDHIVPQSFLKDDSIDNKVLTRSDKARGKSDNVPSEEVVKKMKNYWRQLLNAKLITQRKFDNLTKAERGGLSELDKAGFIKRQLVETRQITKHVAQILDSRMNTKYDENDKLIREVKVITLKSKLVSDFRKDFQFYKVREINNYHHAHDAYLNAVVGTALIKKYPKLESEFVYGDYKVYDVRKMIAKSEQEIGKATAKYFFYSNIMNFFKTEITLANGEIRKRPLIETNGETGEIVWDKGRDFATVRKVLSMPQVNIVKKTEVQTGGFSKESILPKRNSDKLIARKKDWDPKKYGGFDSPTVAYSVLVVAKVEKGKSKKLKSVKELLGITIMERSSFEKNPIDFLEAKGYKEVKKDLIIKLPKYSLFELENGRKRMLASAGELQKGNELALPSKYVNFLYLASHYEKLKGSPEDNEQKQLFVEQHKHYLDEIIEQISEFSKRVILADANLDKVLSAYNKHRDKPIREQAENIIHLFTLTNLGAPAAFKYFDTTIDRKRYTSTKEVLDATLIHQSITGLYETRIDLSQLGGDGGGGGGSGGGGSGGGGSGGGGSGGGGSGGGGSGGTLNIEDEYRLHETSKEPDVSLGSTWLSDFPQAWAETGGMGLAVRQAPLIIPLKATSTPVSIKQYPMSQEARLGIKPHIQRLLDQGILVPCQSPWNTPLLPVKKPGTNDYRPVQDLREVNKRVEDIHPTVPNPYNLLSGLPPSHQWYTVLDLKDAFFCLRLHPTSQPLFAFEWRDPEMGISGQLTWTRLPQGFKNSPTLFNEALHRDLAGFRIQHPDLILLQYVDDLLLAATSELDCQQGTRALLQTLGDLGYRASAKKAQICQKQVKYLGYLLKEGQRWLTEARKETVMGQPIPKTPRQLREFLGTAGFCRLWIPGFAEMAAPLYPLTKPGTLFNWGPDQQKAFQEIKQALLTAPALGLPDLTKPFELFVDEKQGYAKGVLTQKLGPWRRPVAYLSKKLDPVAAGWPPCLRMVAAIAVLTKDAGKLTMGQPLVILAPHAVEALVKQPPDRWLSNARMTHYQALLLDTDRVQFGPVVALNPATLLPLPEEGLQHDCLDILAEAHGTRSDLMDQPLPDADHTWYTDGSSFLQEGQRKAGAAVTTETEVIWARALPAGTSAQRAELIALTQALKMAEGKKLNVYTDSRYAFATAHIHGEIYRRRGWLTSEGKEIKNKDEILALLKALFLPKRLSIIHCPGHQKGNSAEARGNRMADQAAREVATRETPETSTLLAGKRTADGSEFEKRTADGSEFESPKKKAKVE

SEQ ID NO: 2225 - protein, 2096 aa, synthetic construct
MPAAKRVKLDGGDKKYSIGLDIGTNSVGWAVITDEYKVPSKKFKVLGNTDRHSIKKNLIGALLFDSGETAEATRLKRTARRRYTRRKNRICYLQEIFSNEMAKVDDSFFHRLEESFLVEEDKKHERHPIFGNIVDEVAYHEKYPTIYHLRKKLVDSTDKADLRLIYLALAHMIKFRGHFLIEGDLNPDNSDVDKLFIQLVQTYNQLFEENPINASGVDAKAILSARLSKSRRLENLIAQLPGEKKNGLFGNLIALSLGLTPNFKSNFDLAEDAKLQLSKDTYDDDLDNLLAQIGDQYADLFLAAKNLSDAILLSDILRVNTEITKAPLSASMIKRYDEHHQDLTLLKALVRQQLPEKYKEIFFDQSKNGYAGYIDGGASQEEFYKFIKPILEKMDGTEELLVKLNREDLLRKQRTFDNGSIPHQIHLGELHAILRRQEDFYPFLKDNREKIEKILTFRIPYYVGPLARGNSRFAWMTRKSEETITPWNFEEVVDKGASAQSFIERMTNFDKNLPNEKVLPKHSLLYEYFTVYNELTKVKYVTEGMRKPAFLSGEQKKAIVDLLFKTNRKVTVKQLKEDYFKKIECFDSVEISGVEDRFNASLGTYHDLLKIIKDKDFLDNEENEDILEDIVLTLTLFEDREMIEERLKTYAHLFDDKVMKQLKRRRYTGWGRLSRKLINGIRDKQSGKTILDFLKSDGFANRNFMQLIHDDSLTFKEDIQKAQVSGQGDSLHEHIANLAGSPAIKKGILQTVKVVDELVKVMGRHKPENIVIEMARENQTTQKGQKNSRERMKRIEEGIKELGSQILKEHPVENTQLQNEKLYLYYLQNGRDMYVDQELDINRLSDYDVDHIVPQSFLKDDSIDNKVLTRSDKARGKSDNVPSEEVVKKMKNYWRQLLNAKLITQRKFDNLTKAERGGLSELDKAGFIKRQLVETRQITKHVAQILDSRMNTKYDENDKLIREVKVITLKSKLVSDFRKDFQFYKVREINNYHHAHDAYLNAVVGTALIKKYPKLESEFVYGDYKVYDVRKMIAKSEQEIGKATAKYFFYSNIMNFFKTEITLANGEIRKRPLIETNGETGEIVWDKGRDFATVRKVLSMPQVNIVKKTEVQTGGFSKESILPKRNSDKLIARKKDWDPKKYGGFDSPTVAYSVLVVAKVEKGKSKKLKSVKELLGITIMERSSFEKNPIDFLEAKGYKEVKKDLIIKLPKYSLFELENGRKRMLASAGELQKGNELALPSKYVNFLYLASHYEKLKGSPEDNEQKQLFVEQHKHYLDEIIEQISEFSKRVILADANLDKVLSAYNKHRDKPIREQAENIIHLFTLTNLGAPAAFKYFDTTIDRKRYTSTKEVLDATLIHQSITGLYETRIDLSQLGGDGGPAPGSSEAAAKGGTLNIEDEYRLHETSKEPDVSLGSTWLSDFPQAWAETGGMGLAVRQAPLIIPLKATSTPVSIKQYPMSQEARLGIKPHIQRLLDQGILVPCQSPWNTPLLPVKKPGTNDYRPVQDLREVNKRVEDIHPTVPNPYNLLSGLPPSHQWYTVLDLKDAFFCLRLHPTSQPLFAFEWRDPEMGISGQLTWTRLPQGFKNSPTLFNEALHRDLAGFRIQHPDLILLQYVDDLLLAATSELDCQQGTRALLQTLGDLGYRASAKKAQICQKQVKYLGYLLKEGQRWLTEARKETVMGQPIPKTPRQLREFLGTAGFCRLWIPGFAEMAAPLYPLTKPGTLFNWGPDQQKAFQEIKQALLTAPALGLPDLTKPFELFVDEKQGYAKGVLTQKLGPWRRPVAYLSKKLDPVAAGWPPCLRMVAAIAVLTKDAGKLTMGQPLVILAPHAVEALVKQPPDRWLSNARMTHYQALLLDTDRVQFGPVVALNPATLLPLPEEGLQHDCLDILAEAHGTRSDLMDQPLPDADHTWYTDGSSFLQEGQRKAGAAVTTETEVIWARALPAGTSAQRAELIALTQALKMAEGKKLNVYTDSRYAFATAHIHGEIYRRRGWLTSEGKEIKNKDEILALLKALFLPKRLSIIHCPGHQKGNSAEARGNRMADQAAREVATRETPETSTLLAGKRTADGSEFEKRTADGSEFESPKKKAKVE

SEQ ID NO: 2226 - protein, 2100 aa, synthetic construct
MPAAKRVKLDGGDKKYSIGLDIGTNSVGWAVITDEYKVPSKKFKVLGNTDRHSIKKNLIGALLFDSGETAEATRLKRTARRRYTRRKNRICYLQEIFSNEMAKVDDSFFHRLEESFLVEEDKKHERHPIFGNIVDEVAYHEKYPTIYHLRKKLVDSTDKADLRLIYLALAHMIKFRGHFLIEGDLNPDNSDVDKLFIQLVQTYNQLFEENPINASGVDAKAILSARLSKSRRLENLIAQLPGEKKNGLFGNLIALSLGLTPNFKSNFDLAEDAKLQLSKDTYDDDLDNLLAQIGDQYADLFLAAKNLSDAILLSDILRVNTEITKAPLSASMIKRYDEHHQDLTLLKALVRQQLPEKYKEIFFDQSKNGYAGYIDGGASQEEFYKFIKPILEKMDGTEELLVKLNREDLLRKQRTFDNGSIPHQIHLGELHAILRRQEDFYPFLKDNREKIEKILTFRIPYYVGPLARGNSRFAWMTRKSEETITPWNFEEVVDKGASAQSFIERMTNFDKNLPNEKVLPKHSLLYEYFTVYNELTKVKYVTEGMRKPAFLSGEQKKAIVDLLFKTNRKVTVKQLKEDYFKKIECFDSVEISGVEDRFNASLGTYHDLLKIIKDKDFLDNEENEDILEDIVLTLTLFEDREMIEERLKTYAHLFDDKVMKQLKRRRYTGWGRLSRKLINGIRDKQSGKTILDFLKSDGFANRNFMQLIHDDSLTFKEDIQKAQVSGQGDSLHEHIANLAGSPAIKKGILQTVKVVDELVKVMGRHKPENIVIEMARENQTTQKGQKNSRERMKRIEEGIKELGSQILKEHPVENTQLQNEKLYLYYLQNGRDMYVDQELDINRLSDYDVDHIVPQSFLKDDSIDNKVLTRSDKARGKSDNVPSEEVVKKMKNYWRQLLNAKLITQRKFDNLTKAERGGLSELDKAGFIKRQLVETRQITKHVAQILDSRMNTKYDENDKLIREVKVITLKSKLVSDFRKDFQFYKVREINNYHHAHDAYLNAVVGTALIKKYPKLESEFVYGDYKVYDVRKMIAKSEQEIGKATAKYFFYSNIMNFFKTEITLANGEIRKRPLIETNGETGEIVWDKGRDFATVRKVLSMPQVNIVKKTEVQTGGFSKESILPKRNSDKLIARKKDWDPKKYGGFDSPTVAYSVLVVAKVEKGKSKKLKSVKELLGITIMERSSFEKNPIDFLEAKGYKEVKKDLIIKLPKYSLFELENGRKRMLASAGELQKGNELALPSKYVNFLYLASHYEKLKGSPEDNEQKQLFVEQHKHYLDEIIEQISEFSKRVILADANLDKVLSAYNKHRDKPIREQAENIIHLFTLTNLGAPAAFKYFDTTIDRKRYTSTKEVLDATLIHQSITGLYETRIDLSQLGGDGGEAAAKGGGGSEAAAKGGTLNIEDEYRLHETSKEPDVSLGSTWLSDFPQAWAETGGMGLAVRQAPLIIPLKATSTPVSIKQYPMSQEARLGIKPHIQRLLDQGILVPCQSPWNTPLLPVKKPGTNDYRPVQDLREVNKRVEDIHPTVPNPYNLLSGLPPSHQWYTVLDLKDAFFCLRLHPTSQPLFAFEWRDPEMGISGQLTWTRLPQGFKNSPTLFNEALHRDLAGFRIQHPDLILLQYVDDLLLAATSELDCQQGTRALLQTLGDLGYRASAKKAQICQKQVKYLGYLLKEGQRWLTEARKETVMGQPIPKTPRQLREFLGTAGFCRLWIPGFAEMAAPLYPLTKPGTLFNWGPDQQKAFQEIKQALLTAPALGLPDLTKPFELFVDEKQGYAKGVLTQKLGPWRRPVAYLSKKLDPVAAGWPPCLRMVAAIAVLTKDAGKLTMGQPLVILAPHAVEALVKQPPDRWLSNARMTHYQALLLDTDRVQFGPVVALNPATLLPLPEEGLQHDCLDILAEAHGTRSDLMDQPLPDADHTWYTDGSSFLQEGQRKAGAAVTTETEVIWARALPAGTSAQRAELIALTQALKMAEGKKLNVYTDSRYAFATAHIHGEIYRRRGWLTSEGKEIKNKDEILALLKALFLPKRLSIIHCPGHQKGNSAEARGNRMADQAAREVATRETPETSTLLAGKRTADGSEFEKRTADGSEFESPKKKAKVE

SEQ ID NO: 2227 - protein, 2091 aa, synthetic construct
MPAAKRVKLDGGDKKYSIGLDIGTNSVGWAVITDEYKVPSKKFKVLGNTDRHSIKKNLIGALLFDSGETAEATRLKRTARRRYTRRKNRICYLQEIFSNEMAKVDDSFFHRLEESFLVEEDKKHERHPIFGNIVDEVAYHEKYPTIYHLRKKLVDSTDKADLRLIYLALAHMIKFRGHFLIEGDLNPDNSDVDKLFIQLVQTYNQLFEENPINASGVDAKAILSARLSKSRRLENLIAQLPGEKKNGLFGNLIALSLGLTPNFKSNFDLAEDAKLQLSKDTYDDDLDNLLAQIGDQYADLFLAAKNLSDAILLSDILRVNTEITKAPLSASMIKRYDEHHQDLTLLKALVRQQLPEKYKEIFFDQSKNGYAGYIDGGASQEEFYKFIKPILEKMDGTEELLVKLNREDLLRKQRTFDNGSIPHQIHLGELHAILRRQEDFYPFLKDNREKIEKILTFRIPYYVGPLARGNSRFAWMTRKSEETITPWNFEEVVDKGASAQSFIERMTNFDKNLPNEKVLPKHSLLYEYFTVYNELTKVKYVTEGMRKPAFLSGEQKKAIVDLLFKTNRKVTVKQLKEDYFKKIECFDSVEISGVEDRFNASLGTYHDLLKIIKDKDFLDNEENEDILEDIVLTLTLFEDREMIEERLKTYAHLFDDKVMKQLKRRRYTGWGRLSRKLINGIRDKQSGKTILDFLKSDGFANRNFMQLIHDDSLTFKEDIQKAQVSGQGDSLHEHIANLAGSPAIKKGILQTVKVVDELVKVMGRHKPENIVIEMARENQTTQKGQKNSRERMKRIEEGIKELGSQILKEHPVENTQLQNEKLYLYYLQNGRDMYVDQELDINRLSDYDVDHIVPQSFLKDDSIDNKVLTRSDKARGKSDNVPSEEVVKKMKNYWRQLLNAKLITQRKFDNLTKAERGGLSELDKAGFIKRQLVETRQITKHVAQILDSRMNTKYDENDKLIREVKVITLKSKLVSDFRKDFQFYKVREINNYHHAHDAYLNAVVGTALIKKYPKLESEFVYGDYKVYDVRKMIAKSEQEIGKATAKYFFYSNIMNFFKTEITLANGEIRKRPLIETNGETGEIVWDKGRDFATVRKVLSMPQVNIVKKTEVQTGGFSKESILPKRNSDKLIARKKDWDPKKYGGFDSPTVAYSVLVVAKVEKGKSKKLKSVKELLGITIMERSSFEKNPIDFLEAKGYKEVKKDLIIKLPKYSLFELENGRKRMLASAGELQKGNELALPSKYVNFLYLASHYEKLKGSPEDNEQKQLFVEQHKHYLDEIIEQISEFSKRVILADANLDKVLSAYNKHRDKPIREQAENIIHLFTLTNLGAPAAFKYFDTTIDRKRYTSTKEVLDATLIHQSITGLYETRIDLSQLGGDGGGSSGSSGGTLNIEDEYRLHETSKEPDVSLGSTWLSDFPQAWAETGGMGLAVRQAPLIIPLKATSTPVSIKQYPMSQEARLGIKPHIQRLLDQGILVPCQSPWNTPLLPVKKPGTNDYRPVQDLREVNKRVEDIHPTVPNPYNLLSGLPPSHQWYTVLDLKDAFFCLRLHPTSQPLFAFEWRDPEMGISGQLTWTRLPQGFKNSPTLFNEALHRDLAGFRIQHPDLILLQYVDDLLLAATSELDCQQGTRALLQTLGDLGYRASAKKAQICQKQVKYLGYLLKEGQRWLTEARKETVMGQPIPKTPRQLREFLGTAGFCRLWIPGFAEMAAPLYPLTKPGTLFNWGPDQQKAFQEIKQALLTAPALGLPDLTKPFELFVDEKQGYAKGVLTQKLGPWRRPVAYLSKKLDPVAAGWPPCLRMVAAIAVLTKDAGKLTMGQPLVILAPHAVEALVKQPPDRWLSNARMTHYQALLLDTDRVQFGPVVALNPATLLPLPEEGLQHDCLDILAEAHGTRSDLMDQPLPDADHTWYTDGSSFLQEGQRKAGAAVTTETEVIWARALPAGTSAQRAELIALTQALKMAEGKKLNVYTDSRYAFATAHIHGEIYRRRGWLTSEGKEIKNKDEILALLKALFLPKRLSIIHCPGHQKGNSAEARGNRMADQAAREVATRETPETSTLLAGKRTADGSEFEKRTADGSEFESPKKKAKVE

SEQ ID NO: 2228 - protein, 2097 aa, synthetic construct
MPAAKRVKLDGGDKKYSIGLDIGTNSVGWAVITDEYKVPSKKFKVLGNTDRHSIKKNLIGALLFDSGETAEATRLKRTARRRYTRRKNRICYLQEIFSNEMAKVDDSFFHRLEESFLVEEDKKHERHPIFGNIVDEVAYHEKYPTIYHLRKKLVDSTDKADLRLIYLALAHMIKFRGHFLIEGDLNPDNSDVDKLFIQLVQTYNQLFEENPINASGVDAKAILSARLSKSRRLENLIAQLPGEKKNGLFGNLIALSLGLTPNFKSNFDLAEDAKLQLSKDTYDDDLDNLLAQIGDQYADLFLAAKNLSDAILLSDILRVNTEITKAPLSASMIKRYDEHHQDLTLLKALVRQQLPEKYKEIFFDQSKNGYAGYIDGGASQEEFYKFIKPILEKMDGTEELLVKLNREDLLRKQRTFDNGSIPHQIHLGELHAILRRQEDFYPFLKDNREKIEKILTFRIPYYVGPLARGNSRFAWMTRKSEETITPWNFEEVVDKGASAQSFIERMTNFDKNLPNEKVLPKHSLLYEYFTVYNELTKVKYVTEGMRKPAFLSGEQKKAIVDLLFKTNRKVTVKQLKEDYFKKIECFDSVEISGVEDRFNASLGTYHDLLKIIKDKDFLDNEENEDILEDIVLTLTLFEDREMIEERLKTYAHLFDDKVMKQLKRRRYTGWGRLSRKLINGIRDKQSGKTILDFLKSDGFANRNFMQLIHDDSLTFKEDIQKAQVSGQGDSLHEHIANLAGSPAIKKGILQTVKVVDELVKVMGRHKPENIVIEMARENQTTQKGQKNSRERMKRIEEGIKELGSQILKEHPVENTQLQNEKLYLYYLQNGRDMYVDQELDINRLSDYDVDHIVPQSFLKDDSIDNKVLTRSDKARGKSDNVPSEEVVKKMKNYWRQLLNAKLITQRKFDNLTKAERGGLSELDKAGFIKRQLVETRQITKHVAQILDSRMNTKYDENDKLIREVKVITLKSKLVSDFRKDFQFYKVREINNYHHAHDAYLNAVVGTALIKKYPKLESEFVYGDYKVYDVRKMIAKSEQEIGKATAKYFFYSNIMNFFKTEITLANGEIRKRPLIETNGETGEIVWDKGRDFATVRKVLSMPQVNIVKKTEVQTGGFSKESILPKRNSDKLIARKKDWDPKKYGGFDSPTVAYSVLVVAKVEKGKSKKLKSVKELLGITIMERSSFEKNPIDFLEAKGYKEVKKDLIIKLPKYSLFELENGRKRMLASAGELQKGNELALPSKYVNFLYLASHYEKLKGSPEDNEQKQLFVEQHKHYLDEIIEQISEFSKRVILADANLDKVLSAYNKHRDKPIREQAENIIHLFTLTNLGAPAAFKYFDTTIDRKRYTSTKEVLDATLIHQSITGLYETRIDLSQLGGDGGGSAGSAAGSGEFGGTLNIEDEYRLHETSKEPDVSLGSTWLSDFPQAWAETGGMGLAVRQAPLIIPLKATSTPVSIKQYPMSQEARLGIKPHIQRLLDQGILVPCQSPWNTPLLPVKKPGTNDYRPVQDLREVNKRVEDIHPTVPNPYNLLSGLPPSHQWYTVLDLKDAFFCLRLHPTSQPLFAFEWRDPEMGISGQLTWTRLPQGFKNSPTLFNEALHRDLAGFRIQHPDLILLQYVDDLLLAATSELDCQQGTRALLQTLGDLGYRASAKKAQICQKQVKYLGYLLKEGQRWLTEARKETVMGQPIPKTPRQLREFLGTAGFCRLWIPGFAEMAAPLYPLTKPGTLFNWGPDQQKAFQEIKQALLTAPALGLPDLTKPFELFVDEKQGYAKGVLTQKLGPWRRPVAYLSKKLDPVAAGWPPCLRMVAAIAVLTKDAGKLTMGQPLVILAPHAVEALVKQPPDRWLSNARMTHYQALLLDTDRVQFGPVVALNPATLLPLPEEGLQHDCLDILAEAHGTRSDLMDQPLPDADHTWYTDGSSFLQEGQRKAGAAVTTETEVIWARALPAGTSAQRAELIALTQALKMAEGKKLNVYTDSRYAFATAHIHGEIYRRRGWLTSEGKEIKNKDEILALLKALFLPKRLSIIHCPGHQKGNSAEARGNRMADQAAREVATRETPETSTLLAGKRTADGSEFEKRTADGSEFESPKKKAKVE

SEQ ID NO: 2229 - protein, 2088 aa, synthetic construct
MPAAKRVKLDGGDKKYSIGLDIGTNSVGWAVITDEYKVPSKKFKVLGNTDRHSIKKNLIGALLFDSGETAEATRLKRTARRRYTRRKNRICYLQEIFSNEMAKVDDSFFHRLEESFLVEEDKKHERHPIFGNIVDEVAYHEKYPTIYHLRKKLVDSTDKADLRLIYLALAHMIKFRGHFLIEGDLNPDNSDVDKLFIQLVQTYNQLFEENPINASGVDAKAILSARLSKSRRLENLIAQLPGEKKNGLFGNLIALSLGLTPNFKSNFDLAEDAKLQLSKDTYDDDLDNLLAQIGDQYADLFLAAKNLSDAILLSDILRVNTEITKAPLSASMIKRYDEHHQDLTLLKALVRQQLPEKYKEIFFDQSKNGYAGYIDGGASQEEFYKFIKPILEKMDGTEELLVKLNREDLLRKQRTFDNGSIPHQIHLGELHAILRRQEDFYPFLKDNREKIEKILTFRIPYYVGPLARGNSRFAWMTRKSEETITPWNFEEVVDKGASAQSFIERMTNFDKNLPNEKVLPKHSLLYEYFTVYNELTKVKYVTEGMRKPAFLSGEQKKAIVDLLFKTNRKVTVKQLKEDYFKKIECFDSVEISGVEDRFNASLGTYHDLLKIIKDKDFLDNEENEDILEDIVLTLTLFEDREMIEERLKTYAHLFDDKVMKQLKRRRYTGWGRLSRKLINGIRDKQSGKTILDFLKSDGFANRNFMQLIHDDSLTFKEDIQKAQVSGQGDSLHEHIANLAGSPAIKKGILQTVKVVDELVKVMGRHKPENIVIEMARENQTTQKGQKNSRERMKRIEEGIKELGSQILKEHPVENTQLQNEKLYLYYLQNGRDMYVDQELDINRLSDYDVDHIVPQSFLKDDSIDNKVLTRSDKARGKSDNVPSEEVVKKMKNYWRQLLNAKLITQRKFDNLTKAERGGLSELDKAGFIKRQLVETRQITKHVAQILDSRMNTKYDENDKLIREVKVITLKSKLVSDFRKDFQFYKVREINNYHHAHDAYLNAVVGTALIKKYPKLESEFVYGDYKVYDVRKMIAKSEQEIGKATAKYFFYSNIMNFFKTEITLANGEIRKRPLIETNGETGEIVWDKGRDFATVRKVLSMPQVNIVKKTEVQTGGFSKESILPKRNSDKLIARKKDWDPKKYGGFDSPTVAYSVLVVAKVEKGKSKKLKSVKELLGITIMERSSFEKNPIDFLEAKGYKEVKKDLIIKLPKYSLFELENGRKRMLASAGELQKGNELALPSKYVNFLYLASHYEKLKGSPEDNEQKQLFVEQHKHYLDEIIEQISEFSKRVILADANLDKVLSAYNKHRDKPIREQAENIIHLFTLTNLGAPAAFKYFDTTIDRKRYTSTKEVLDATLIHQSITGLYETRIDLSQLGGDGGGGGGGTLNIEDEYRLHETSKEPDVSLGSTWLSDFPQAWAETGGMGLAVRQAPLIIPLKATSTPVSIKQYPMSQEARLGIKPHIQRLLDQGILVPCQSPWNTPLLPVKKPGTNDYRPVQDLREVNKRVEDIHPTVPNPYNLLSGLPPSHQWYTVLDLKDAFFCLRLHPTSQPLFAFEWRDPEMGISGQLTWTRLPQGFKNSPTLFNEALHRDLAGFRIQHPDLILLQYVDDLLLAATSELDCQQGTRALLQTLGDLGYRASAKKAQICQKQVKYLGYLLKEGQRWLTEARKETVMGQPIPKTPRQLREFLGTAGFCRLWIPGFAEMAAPLYPLTKPGTLFNWGPDQQKAFQEIKQALLTAPALGLPDLTKPFELFVDEKQGYAKGVLTQKLGPWRRPVAYLSKKLDPVAAGWPPCLRMVAAIAVLTKDAGKLTMGQPLVILAPHAVEALVKQPPDRWLSNARMTHYQALLLDTDRVQFGPVVALNPATLLPLPEEGLQHDCLDILAEAHGTRSDLMDQPLPDADHTWYTDGSSFLQEGQRKAGAAVTTETEVIWARALPAGTSAQRAELIALTQALKMAEGKKLNVYTDSRYAFATAHIHGEIYRRRGWLTSEGKEIKNKDEILALLKALFLPKRLSIIHCPGHQKGNSAEARGNRMADQAAREVATRETPETSTLLAGKRTADGSEFEKRTADGSEFESPKKKAKVE

SEQ ID NO: 2230 - protein, 2096 aa, synthetic construct
MPAAKRVKLDGGDKKYSIGLDIGTNSVGWAVITDEYKVPSKKFKVLGNTDRHSIKKNLIGALLFDSGETAEATRLKRTARRRYTRRKNRICYLQEIFSNEMAKVDDSFFHRLEESFLVEEDKKHERHPIFGNIVDEVAYHEKYPTIYHLRKKLVDSTDKADLRLIYLALAHMIKFRGHFLIEGDLNPDNSDVDKLFIQLVQTYNQLFEENPINASGVDAKAILSARLSKSRRLENLIAQLPGEKKNGLFGNLIALSLGLTPNFKSNFDLAEDAKLQLSKDTYDDDLDNLLAQIGDQYADLFLAAKNLSDAILLSDILRVNTEITKAPLSASMIKRYDEHHQDLTLLKALVRQQLPEKYKEIFFDQSKNGYAGYIDGGASQEEFYKFIKPILEKMDGTEELLVKLNREDLLRKQRTFDNGSIPHQIHLGELHAILRRQEDFYPFLKDNREKIEKILTFRIPYYVGPLARGNSRFAWMTRKSEETITPWNFEEVVDKGASAQSFIERMTNFDKNLPNEKVLPKHSLLYEYFTVYNELTKVKYVTEGMRKPAFLSGEQKKAIVDLLFKTNRKVTVKQLKEDYFKKIECFDSVEISGVEDRFNASLGTYHDLLKIIKDKDFLDNEENEDILEDIVLTLTLFEDREMIEERLKTYAHLFDDKVMKQLKRRRYTGWGRLSRKLINGIRDKQSGKTILDFLKSDGFANRNFMQLIHDDSLTFKEDIQKAQVSGQGDSLHEHIANLAGSPAIKKGILQTVKVVDELVKVMGRHKPENIVIEMARENQTTQKGQKNSRERMKRIEEGIKELGSQILKEHPVENTQLQNEKLYLYYLQNGRDMYVDQELDINRLSDYDVDHIVPQSFLKDDSIDNKVLTRSDKARGKSDNVPSEEVVKKMKNYWRQLLNAKLITQRKFDNLTKAERGGLSELDKAGFIKRQLVETRQITKHVAQILDSRMNTKYDENDKLIREVKVITLKSKLVSDFRKDFQFYKVREINNYHHAHDAYLNAVVGTALIKKYPKLESEFVYGDYKVYDVRKMIAKSEQEIGKATAKYFFYSNIMNFFKTEITLANGEIRKRPLIETNGETGEIVWDKGRDFATVRKVLSMPQVNIVKKTEVQTGGFSKESILPKRNSDKLIARKKDWDPKKYGGFDSPTVAYSVLVVAKVEKGKSKKLKSVKELLGITIMERSSFEKNPIDFLEAKGYKEVKKDLIIKLPKYSLFELENGRKRMLASAGELQKGNELALPSKYVNFLYLASHYEKLKGSPEDNEQKQLFVEQHKHYLDEIIEQISEFSKRVILADANLDKVLSAYNKHRDKPIREQAENIIHLFTLTNLGAPAAFKYFDTTIDRKRYTSTKEVLDATLIHQSITGLYETRIDLSQLGGDGGEAAAKPAPGGGGGTLNIEDEYRLHETSKEPDVSLGSTWLSDFPQAWAETGGMGLAVRQAPLIIPLKATSTPVSIKQYPMSQEARLGIKPHIQRLLDQGILVPCQSPWNTPLLPVKKPGTNDYRPVQDLREVNKRVEDIHPTVPNPYNLLSGLPPSHQWYTVLDLKDAFFCLRLHPTSQPLFAFEWRDPEMGISGQLTWTRLPQGFKNSPTLFNEALHRDLAGFRIQHPDLILLQYVDDLLLAATSELDCQQGTRALLQTLGDLGYRASAKKAQICQKQVKYLGYLLKEGQRWLTEARKETVMGQPIPKTPRQLREFLGTAGFCRLWIPGFAEMAAPLYPLTKPGTLFNWGPDQQKAFQEIKQALLTAPALGLPDLTKPFELFVDEKQGYAKGVLTQKLGPWRRPVAYLSKKLDPVAAGWPPCLRMVAAIAVLTKDAGKLTMGQPLVILAPHAVEALVKQPPDRWLSNARMTHYQALLLDTDRVQFGPVVALNPATLLPLPEEGLQHDCLDILAEAHGTRSDLMDQPLPDADHTWYTDGSSFLQEGQRKAGAAVTTETEVIWARALPAGTSAQRAELIALTQALKMAEGKKLNVYTDSRYAFATAHIHGEIYRRRGWLTSEGKEIKNKDEILALLKALFLPKRLSIIHCPGHQKGNSAEARGNRMADQAAREVATRETPETSTLLAGKRTADGSEFEKRTADGSEFESPKKKAKVE

SEQ ID NO: 2231 - protein, 2094 aa, synthetic construct
MPAAKRVKLDGGDKKYSIGLDIGTNSVGWAVITDEYKVPSKKFKVLGNTDRHSIKKNLIGALLFDSGETAEATRLKRTARRRYTRRKNRICYLQEIFSNEMAKVDDSFFHRLEESFLVEEDKKHERHPIFGNIVDEVAYHEKYPTIYHLRKKLVDSTDKADLRLIYLALAHMIKFRGHFLIEGDLNPDNSDVDKLFIQLVQTYNQLFEENPINASGVDAKAILSARLSKSRRLENLIAQLPGEKKNGLFGNLIALSLGLTPNFKSNFDLAEDAKLQLSKDTYDDDLDNLLAQIGDQYADLFLAAKNLSDAILLSDILRVNTEITKAPLSASMIKRYDEHHQDLTLLKALVRQQLPEKYKEIFFDQSKNGYAGYIDGGASQEEFYKFIKPILEKMDGTEELLVKLNREDLLRKQRTFDNGSIPHQIHLGELHAILRRQEDFYPFLKDNREKIEKILTFRIPYYVGPLARGNSRFAWMTRKSEETITPWNFEEVVDKGASAQSFIERMTNFDKNLPNEKVLPKHSLLYEYFTVYNELTKVKYVTEGMRKPAFLSGEQKKAIVDLLFKTNRKVTVKQLKEDYFKKIECFDSVEISGVEDRFNASLGTYHDLLKIIKDKDFLDNEENEDILEDIVLTLTLFEDREMIEERLKTYAHLFDDKVMKQLKRRRYTGWGRLSRKLINGIRDKQSGKTILDFLKSDGFANRNFMQLIHDDSLTFKEDIQKAQVSGQGDSLHEHIANLAGSPAIKKGILQTVKVVDELVKVMGRHKPENIVIEMARENQTTQKGQKNSRERMKRIEEGIKELGSQILKEHPVENTQLQNEKLYLYYLQNGRDMYVDQELDINRLSDYDVDHIVPQSFLKDDSIDNKVLTRSDKARGKSDNVPSEEVVKKMKNYWRQLLNAKLITQRKFDNLTKAERGGLSELDKAGFIKRQLVETRQITKHVAQILDSRMNTKYDENDKLIREVKVITLKSKLVSDFRKDFQFYKVREINNYHHAHDAYLNAVVGTALIKKYPKLESEFVYGDYKVYDVRKMIAKSEQEIGKATAKYFFYSNIMNFFKTEITLANGEIRKRPLIETNGETGEIVWDKGRDFATVRKVLSMPQVNIVKKTEVQTGGFSKESILPKRNSDKLIARKKDWDPKKYGGFDSPTVAYSVLVVAKVEKGKSKKLKSVKELLGITIMERSSFEKNPIDFLEAKGYKEVKKDLIIKLPKYSLFELENGRKRMLASAGELQKGNELALPSKYVNFLYLASHYEKLKGSPEDNEQKQLFVEQHKHYLDEIIEQISEFSKRVILADANLDKVLSAYNKHRDKPIREQAENIIHLFTLTNLGAPAAFKYFDTTIDRKRYTSTKEVLDATLIHQSITGLYETRIDLSQLGGDGGGGGGGSGSSGGTLNIEDEYRLHETSKEPDVSLGSTWLSDFPQAWAETGGMGLAVRQAPLIIPLKATSTPVSIKQYPMSQEARLGIKPHIQRLLDQGILVPCQSPWNTPLLPVKKPGTNDYRPVQDLREVNKRVEDIHPTVPNPYNLLSGLPPSHQWYTVLDLKDAFFCLRLHPTSQPLFAFEWRDPEMGISGQLTWTRLPQGFKNSPTLFNEALHRDLAGFRIQHPDLILLQYVDDLLLAATSELDCQQGTRALLQTLGDLGYRASAKKAQICQKQVKYLGYLLKEGQRWLTEARKETVMGQPIPKTPRQLREFLGTAGFCRLWIPGFAEMAAPLYPLTKPGTLFNWGPDQQKAFQEIKQALLTAPALGLPDLTKPFELFVDEKQGYAKGVLTQKLGPWRRPVAYLSKKLDPVAAGWPPCLRMVAAIAVLTKDAGKLTMGQPLVILAPHAVEALVKQPPDRWLSNARMTHYQALLLDTDRVQFGPVVALNPATLLPLPEEGLQHDCLDILAEAHGTRSDLMDQPLPDADHTWYTDGSSFLQEGQRKAGAAVTTETEVIWARALPAGTSAQRAELIALTQALKMAEGKKLNVYTDSRYAFATAHIHGEIYRRRGWLTSEGKEIKNKDEILALLKALFLPKRLSIIHCPGHQKGNSAEARGNRMADQAAREVATRETPETSTLLAGKRTADGSEFEKRTADGSEFESPKKKAKVE

SEQ ID NO: 2232 - protein, 2096 aa, synthetic construct
MPAAKRVKLDGGDKKYSIGLDIGTNSVGWAVITDEYKVPSKKFKVLGNTDRHSIKKNLIGALLFDSGETAEATRLKRTARRRYTRRKNRICYLQEIFSNEMAKVDDSFFHRLEESFLVEEDKKHERHPIFGNIVDEVAYHEKYPTIYHLRKKLVDSTDKADLRLIYLALAHMIKFRGHFLIEGDLNPDNSDVDKLFIQLVQTYNQLFEENPINASGVDAKAILSARLSKSRRLENLIAQLPGEKKNGLFGNLIALSLGLTPNFKSNFDLAEDAKLQLSKDTYDDDLDNLLAQIGDQYADLFLAAKNLSDAILLSDILRVNTEITKAPLSASMIKRYDEHHQDLTLLKALVRQQLPEKYKEIFFDQSKNGYAGYIDGGASQEEFYKFIKPILEKMDGTEELLVKLNREDLLRKQRTFDNGSIPHQIHLGELHAILRRQEDFYPFLKDNREKIEKILTFRIPYYVGPLARGNSRFAWMTRKSEETITPWNFEEVVDKGASAQSFIERMTNFDKNLPNEKVLPKHSLLYEYFTVYNELTKVKYVTEGMRKPAFLSGEQKKAIVDLLFKTNRKVTVKQLKEDYFKKIECFDSVEISGVEDRFNASLGTYHDLLKIIKDKDFLDNEENEDILEDIVLTLTLFEDREMIEERLKTYAHLFDDKVMKQLKRRRYTGWGRLSRKLINGIRDKQSGKTILDFLKSDGFANRNFMQLIHDDSLTFKEDIQKAQVSGQGDSLHEHIANLAGSPAIKKGILQTVKVVDELVKVMGRHKPENIVIEMARENQTTQKGQKNSRERMKRIEEGIKELGSQILKEHPVENTQLQNEKLYLYYLQNGRDMYVDQELDINRLSDYDVDHIVPQSFLKDDSIDNKVLTRSDKARGKSDNVPSEEVVKKMKNYWRQLLNAKLITQRKFDNLTKAERGGLSELDKAGFIKRQLVETRQITKHVAQILDSRMNTKYDENDKLIREVKVITLKSKLVSDFRKDFQFYKVREINNYHHAHDAYLNAVVGTALIKKYPKLESEFVYGDYKVYDVRKMIAKSEQEIGKATAKYFFYSNIMNFFKTEITLANGEIRKRPLIETNGETGEIVWDKGRDFATVRKVLSMPQVNIVKKTEVQTGGFSKESILPKRNSDKLIARKKDWDPKKYGGFDSPTVAYSVLVVAKVEKGKSKKLKSVKELLGITIMERSSFEKNPIDFLEAKGYKEVKKDLIIKLPKYSLFELENGRKRMLASAGELQKGNELALPSKYVNFLYLASHYEKLKGSPEDNEQKQLFVEQHKHYLDEIIEQISEFSKRVILADANLDKVLSAYNKHRDKPIREQAENIIHLFTLTNLGAPAAFKYFDTTIDRKRYTSTKEVLDATLIHQSITGLYETRIDLSQLGGDGGPAPEAAAKGGSGGTLNIEDEYRLHETSKEPDVSLGSTWLSDFPQAWAETGGMGLAVRQAPLIIPLKATSTPVSIKQYPMSQEARLGIKPHIQRLLDQGILVPCQSPWNTPLLPVKKPGTNDYRPVQDLREVNKRVEDIHPTVPNPYNLLSGLPPSHQWYTVLDLKDAFFCLRLHPTSQPLFAFEWRDPEMGISGQLTWTRLPQGFKNSPTLFNEALHRDLAGFRIQHPDLILLQYVDDLLLAATSELDCQQGTRALLQTLGDLGYRASAKKAQICQKQVKYLGYLLKEGQRWLTEARKETVMGQPIPKTPRQLREFLGTAGFCRLWIPGFAEMAAPLYPLTKPGTLFNWGPDQQKAFQEIKQALLTAPALGLPDLTKPFELFVDEKQGYAKGVLTQKLGPWRRPVAYLSKKLDPVAAGWPPCLRMVAAIAVLTKDAGKLTMGQPLVILAPHAVEALVKQPPDRWLSNARMTHYQALLLDTDRVQFGPVVALNPATLLPLPEEGLQHDCLDILAEAHGTRSDLMDQPLPDADHTWYTDGSSFLQEGQRKAGAAVTTETEVIWARALPAGTSAQRAELIALTQALKMAEGKKLNVYTDSRYAFATAHIHGEIYRRRGWLTSEGKEIKNKDEILALLKALFLPKRLSIIHCPGHQKGNSAEARGNRMADQAAREVATRETPETSTLLAGKRTADGSEFEKRTADGSEFESPKKKAKVE

SEQ ID NO: 2233 - protein, 2093 aa, synthetic construct
MPAAKRVKLDGGDKKYSIGLDIGTNSVGWAVITDEYKVPSKKFKVLGNTDRHSIKKNLIGALLFDSGETAEATRLKRTARRRYTRRKNRICYLQEIFSNEMAKVDDSFFHRLEESFLVEEDKKHERHPIFGNIVDEVAYHEKYPTIYHLRKKLVDSTDKADLRLIYLALAHMIKFRGHFLIEGDLNPDNSDVDKLFIQLVQTYNQLFEENPINASGVDAKAILSARLSKSRRLENLIAQLPGEKKNGLFGNLIALSLGLTPNFKSNFDLAEDAKLQLSKDTYDDDLDNLLAQIGDQYADLFLAAKNLSDAILLSDILRVNTEITKAPLSASMIKRYDEHHQDLTLLKALVRQQLPEKYKEIFFDQSKNGYAGYIDGGASQEEFYKFIKPILEKMDGTEELLVKLNREDLLRKQRTFDNGSIPHQIHLGELHAILRRQEDFYPFLKDNREKIEKILTFRIPYYVGPLARGNSRFAWMTRKSEETITPWNFEEVVDKGASAQSFIERMTNFDKNLPNEKVLPKHSLLYEYFTVYNELTKVKYVTEGMRKPAFLSGEQKKAIVDLLFKTNRKVTVKQLKEDYFKKIECFDSVEISGVEDRFNASLGTYHDLLKIIKDKDFLDNEENEDILEDIVLTLTLFEDREMIEERLKTYAHLFDDKVMKQLKRRRYTGWGRLSRKLINGIRDKQSGKTILDFLKSDGFANRNFMQLIHDDSLTFKEDIQKAQVSGQGDSLHEHIANLAGSPAIKKGILQTVKVVDELVKVMGRHKPENIVIEMARENQTTQKGQKNSRERMKRIEEGIKELGSQILKEHPVENTQLQNEKLYLYYLQNGRDMYVDQELDINRLSDYDVDHIVPQSFLKDDSIDNKVLTRSDKARGKSDNVPSEEVVKKMKNYWRQLLNAKLITQRKFDNLTKAERGGLSELDKAGFIKRQLVETRQITKHVAQILDSRMNTKYDENDKLIREVKVITLKSKLVSDFRKDFQFYKVREINNYHHAHDAYLNAVVGTALIKKYPKLESEFVYGDYKVYDVRKMIAKSEQEIGKATAKYFFYSNIMNFFKTEITLANGEIRKRPLIETNGETGEIVWDKGRDFATVRKVLSMPQVNIVKKTEVQTGGFSKESILPKRNSDKLIARKKDWDPKKYGGFDSPTVAYSVLVVAKVEKGKSKKLKSVKELLGITIMERSSFEKNPIDFLEAKGYKEVKKDLIIKLPKYSLFELENGRKRMLASAGELQKGNELALPSKYVNFLYLASHYEKLKGSPEDNEQKQLFVEQHKHYLDEIIEQISEFSKRVILADANLDKVLSAYNKHRDKPIREQAENIIHLFTLTNLGAPAAFKYFDTTIDRKRYTSTKEVLDATLIHQSITGLYETRIDLSQLGGDGGGSSEAAAKGGTLNIEDEYRLHETSKEPDVSLGSTWLSDFPQAWAETGGMGLAVRQAPLIIPLKATSTPVSIKQYPMSQEARLGIKPHIQRLLDQGILVPCQSPWNTPLLPVKKPGTNDYRPVQDLREVNKRVEDIHPTVPNPYNLLSGLPPSHQWYTVLDLKDAFFCLRLHPTSQPLFAFEWRDPEMGISGQLTWTRLPQGFKNSPTLFNEALHRDLAGFRIQHPDLILLQYVDDLLLAATSELDCQQGTRALLQTLGDLGYRASAKKAQICQKQVKYLGYLLKEGQRWLTEARKETVMGQPIPKTPRQLREFLGTAGFCRLWIPGFAEMAAPLYPLTKPGTLFNWGPDQQKAFQEIKQALLTAPALGLPDLTKPFELFVDEKQGYAKGVLTQKLGPWRRPVAYLSKKLDPVAAGWPPCLRMVAAIAVLTKDAGKLTMGQPLVILAPHAVEALVKQPPDRWLSNARMTHYQALLLDTDRVQFGPVVALNPATLLPLPEEGLQHDCLDILAEAHGTRSDLMDQPLPDADHTWYTDGSSFLQEGQRKAGAAVTTETEVIWARALPAGTSAQRAELIALTQALKMAEGKKLNVYTDSRYAFATAHIHGEIYRRRGWLTSEGKEIKNKDEILALLKALFLPKRLSIIHCPGHQKGNSAEARGNRMADQAAREVATRETPETSTLLAGKRTADGSEFEKRTADGSEFESPKKKAKVE

SEQ ID NO: 2234 - protein, 2094 aa, synthetic construct
MPAAKRVKLDGGDKKYSIGLDIGTNSVGWAVITDEYKVPSKKFKVLGNTDRHSIKKNLIGALLFDSGETAEATRLKRTARRRYTRRKNRICYLQEIFSNEMAKVDDSFFHRLEESFLVEEDKKHERHPIFGNIVDEVAYHEKYPTIYHLRKKLVDSTDKADLRLIYLALAHMIKFRGHFLIEGDLNPDNSDVDKLFIQLVQTYNQLFEENPINASGVDAKAILSARLSKSRRLENLIAQLPGEKKNGLFGNLIALSLGLTPNFKSNFDLAEDAKLQLSKDTYDDDLDNLLAQIGDQYADLFLAAKNLSDAILLSDILRVNTEITKAPLSASMIKRYDEHHQDLTLLKALVRQQLPEKYKEIFFDQSKNGYAGYIDGGASQEEFYKFIKPILEKMDGTEELLVKLNREDLLRKQRTFDNGSIPHQIHLGELHAILRRQEDFYPFLKDNREKIEKILTFRIPYYVGPLARGNSRFAWMTRKSEETITPWNFEEVVDKGASAQSFIERMTNFDKNLPNEKVLPKHSLLYEYFTVYNELTKVKYVTEGMRKPAFLSGEQKKAIVDLLFKTNRKVTVKQLKEDYFKKIECFDSVEISGVEDRFNASLGTYHDLLKIIKDKDFLDNEENEDILEDIVLTLTLFEDREMIEERLKTYAHLFDDKVMKQLKRRRYTGWGRLSRKLINGIRDKQSGKTILDFLKSDGFANRNFMQLIHDDSLTFKEDIQKAQVSGQGDSLHEHIANLAGSPAIKKGILQTVKVVDELVKVMGRHKPENIVIEMARENQTTQKGQKNSRERMKRIEEGIKELGSQILKEHPVENTQLQNEKLYLYYLQNGRDMYVDQELDINRLSDYDVDHIVPQSFLKDDSIDNKVLTRSDKARGKSDNVPSEEVVKKMKNYWRQLLNAKLITQRKFDNLTKAERGGLSELDKAGFIKRQLVETRQITKHVAQILDSRMNTKYDENDKLIREVKVITLKSKLVSDFRKDFQFYKVREINNYHHAHDAYLNAVVGTALIKKYPKLESEFVYGDYKVYDVRKMIAKSEQEIGKATAKYFFYSNIMNFFKTEITLANGEIRKRPLIETNGETGEIVWDKGRDFATVRKVLSMPQVNIVKKTEVQTGGFSKESILPKRNSDKLIARKKDWDPKKYGGFDSPTVAYSVLVVAKVEKGKSKKLKSVKELLGITIMERSSFEKNPIDFLEAKGYKEVKKDLIIKLPKYSLFELENGRKRMLASAGELQKGNELALPSKYVNFLYLASHYEKLKGSPEDNEQKQLFVEQHKHYLDEIIEQISEFSKRVILADANLDKVLSAYNKHRDKPIREQAENIIHLFTLTNLGAPAAFKYFDTTIDRKRYTSTKEVLDATLIHQSITGLYETRIDLSQLGGDGGPAPGGGGSSGGTLNIEDEYRLHETSKEPDVSLGSTWLSDFPQAWAETGGMGLAVRQAPLIIPLKATSTPVSIKQYPMSQEARLGIKPHIQRLLDQGILVPCQSPWNTPLLPVKKPGTNDYRPVQDLREVNKRVEDIHPTVPNPYNLLSGLPPSHQWYTVLDLKDAFFCLRLHPTSQPLFAFEWRDPEMGISGQLTWTRLPQGFKNSPTLFNEALHRDLAGFRIQHPDLILLQYVDDLLLAATSELDCQQGTRALLQTLGDLGYRASAKKAQICQKQVKYLGYLLKEGQRWLTEARKETVMGQPIPKTPRQLREFLGTAGFCRLWIPGFAEMAAPLYPLTKPGTLFNWGPDQQKAFQEIKQALLTAPALGLPDLTKPFELFVDEKQGYAKGVLTQKLGPWRRPVAYLSKKLDPVAAGWPPCLRMVAAIAVLTKDAGKLTMGQPLVILAPHAVEALVKQPPDRWLSNARMTHYQALLLDTDRVQFGPVVALNPATLLPLPEEGLQHDCLDILAEAHGTRSDLMDQPLPDADHTWYTDGSSFLQEGQRKAGAAVTTETEVIWARALPAGTSAQRAELIALTQALKMAEGKKLNVYTDSRYAFATAHIHGEIYRRRGWLTSEGKEIKNKDEILALLKALFLPKRLSIIHCPGHQKGNSAEARGNRMADQAAREVATRETPETSTLLAGKRTADGSEFEKRTADGSEFESPKKKAKVE

SEQ ID NO: 2235 - protein, 2096 aa, synthetic construct
MPAAKRVKLDGGDKKYSIGLDIGTNSVGWAVITDEYKVPSKKFKVLGNTDRHSIKKNLIGALLFDSGETAEATRLKRTARRRYTRRKNRICYLQEIFSNEMAKVDDSFFHRLEESFLVEEDKKHERHPIFGNIVDEVAYHEKYPTIYHLRKKLVDSTDKADLRLIYLALAHMIKFRGHFLIEGDLNPDNSDVDKLFIQLVQTYNQLFEENPINASGVDAKAILSARLSKSRRLENLIAQLPGEKKNGLFGNLIALSLGLTPNFKSNFDLAEDAKLQLSKDTYDDDLDNLLAQIGDQYADLFLAAKNLSDAILLSDILRVNTEITKAPLSASMIKRYDEHHQDLTLLKALVRQQLPEKYKEIFFDQSKNGYAGYIDGGASQEEFYKFIKPILEKMDGTEELLVKLNREDLLRKQRTFDNGSIPHQIHLGELHAILRRQEDFYPFLKDNREKIEKILTFRIPYYVGPLARGNSRFAWMTRKSEETITPWNFEEVVDKGASAQSFIERMTNFDKNLPNEKVLPKHSLLYEYFTVYNELTKVKYVTEGMRKPAFLSGEQKKAIVDLLFKTNRKVTVKQLKEDYFKKIECFDSVEISGVEDRFNASLGTYHDLLKIIKDKDFLDNEENEDILEDIVLTLTLFEDREMIEERLKTYAHLFDDKVMKQLKRRRYTGWGRLSRKLINGIRDKQSGKTILDFLKSDGFANRNFMQLIHDDSLTFKEDIQKAQVSGQGDSLHEHIANLAGSPAIKKGILQTVKVVDELVKVMGRHKPENIVIEMARENQTTQKGQKNSRERMKRIEEGIKELGSQILKEHPVENTQLQNEKLYLYYLQNGRDMYVDQELDINRLSDYDVDHIVPQSFLKDDSIDNKVLTRSDKARGKSDNVPSEEVVKKMKNYWRQLLNAKLITQRKFDNLTKAERGGLSELDKAGFIKRQLVETRQITKHVAQILDSRMNTKYDENDKLIREVKVITLKSKLVSDFRKDFQFYKVREINNYHHAHDAYLNAVVGTALIKKYPKLESEFVYGDYKVYDVRKMIAKSEQEIGKATAKYFFYSNIMNFFKTEITLANGEIRKRPLIETNGETGEIVWDKGRDFATVRKVLSMPQVNIVKKTEVQTGGFSKESILPKRNSDKLIARKKDWDPKKYGGFDSPTVAYSVLVVAKVEKGKSKKLKSVKELLGITIMERSSFEKNPIDFLEAKGYKEVKKDLIIKLPKYSLFELENGRKRMLASAGELQKGNELALPSKYVNFLYLASHYEKLKGSPEDNEQKQLFVEQHKHYLDEIIEQISEFSKRVILADANLDKVLSAYNKHRDKPIREQAENIIHLFTLTNLGAPAAFKYFDTTIDRKRYTSTKEVLDATLIHQSITGLYETRIDLSQLGGDGGEAAAKGSSPAPGGTLNIEDEYRLHETSKEPDVSLGSTWLSDFPQAWAETGGMGLAVRQAPLIIPLKATSTPVSIKQYPMSQEARLGIKPHIQRLLDQGILVPCQSPWNTPLLPVKKPGTNDYRPVQDLREVNKRVEDIHPTVPNPYNLLSGLPPSHQWYTVLDLKDAFFCLRLHPTSQPLFAFEWRDPEMGISGQLTWTRLPQGFKNSPTLFNEALHRDLAGFRIQHPDLILLQYVDDLLLAATSELDCQQGTRALLQTLGDLGYRASAKKAQICQKQVKYLGYLLKEGQRWLTEARKETVMGQPIPKTPRQLREFLGTAGFCRLWIPGFAEMAAPLYPLTKPGTLFNWGPDQQKAFQEIKQALLTAPALGLPDLTKPFELFVDEKQGYAKGVLTQKLGPWRRPVAYLSKKLDPVAAGWPPCLRMVAAIAVLTKDAGKLTMGQPLVILAPHAVEALVKQPPDRWLSNARMTHYQALLLDTDRVQFGPVVALNPATLLPLPEEGLQHDCLDILAEAHGTRSDLMDQPLPDADHTWYTDGSSFLQEGQRKAGAAVTTETEVIWARALPAGTSAQRAELIALTQALKMAEGKKLNVYTDSRYAFATAHIHGEIYRRRGWLTSEGKEIKNKDEILALLKALFLPKRLSIIHCPGHQKGNSAEARGNRMADQAAREVATRETPETSTLLAGKRTADGSEFEKRTADGSEFESPKKKAKVE

SEQ ID NO: 2236 - protein, 2095 aa, synthetic construct
MPAAKRVKLDGGDKKYSIGLDIGTNSVGWAVITDEYKVPSKKFKVLGNTDRHSIKKNLIGALLFDSGETAEATRLKRTARRRYTRRKNRICYLQEIFSNEMAKVDDSFFHRLEESFLVEEDKKHERHPIFGNIVDEVAYHEKYPTIYHLRKKLVDSTDKADLRLIYLALAHMIKFRGHFLIEGDLNPDNSDVDKLFIQLVQTYNQLFEENPINASGVDAKAILSARLSKSRRLENLIAQLPGEKKNGLFGNLIALSLGLTPNFKSNFDLAEDAKLQLSKDTYDDDLDNLLAQIGDQYADLFLAAKNLSDAILLSDILRVNTEITKAPLSASMIKRYDEHHQDLTLLKALVRQQLPEKYKEIFFDQSKNGYAGYIDGGASQEEFYKFIKPILEKMDGTEELLVKLNREDLLRKQRTFDNGSIPHQIHLGELHAILRRQEDFYPFLKDNREKIEKILTFRIPYYVGPLARGNSRFAWMTRKSEETITPWNFEEVVDKGASAQSFIERMTNFDKNLPNEKVLPKHSLLYEYFTVYNELTKVKYVTEGMRKPAFLSGEQKKAIVDLLFKTNRKVTVKQLKEDYFKKIECFDSVEISGVEDRFNASLGTYHDLLKIIKDKDFLDNEENEDILEDIVLTLTLFEDREMIEERLKTYAHLFDDKVMKQLKRRRYTGWGRLSRKLINGIRDKQSGKTILDFLKSDGFANRNFMQLIHDDSLTFKEDIQKAQVSGQGDSLHEHIANLAGSPAIKKGILQTVKVVDELVKVMGRHKPENIVIEMARENQTTQKGQKNSRERMKRIEEGIKELGSQILKEHPVENTQLQNEKLYLYYLQNGRDMYVDQELDINRLSDYDVDHIVPQSFLKDDSIDNKVLTRSDKARGKSDNVPSEEVVKKMKNYWRQLLNAKLITQRKFDNLTKAERGGLSELDKAGFIKRQLVETRQITKHVAQILDSRMNTKYDENDKLIREVKVITLKSKLVSDFRKDFQFYKVREINNYHHAHDAYLNAVVGTALIKKYPKLESEFVYGDYKVYDVRKMIAKSEQEIGKATAKYFFYSNIMNFFKTEITLANGEIRKRPLIETNGETGEIVWDKGRDFATVRKVLSMPQVNIVKKTEVQTGGFSKESILPKRNSDKLIARKKDWDPKKYGGFDSPTVAYSVLVVAKVEKGKSKKLKSVKELLGITIMERSSFEKNPIDFLEAKGYKEVKKDLIIKLPKYSLFELENGRKRMLASAGELQKGNELALPSKYVNFLYLASHYEKLKGSPEDNEQKQLFVEQHKHYLDEIIEQISEFSKRVILADANLDKVLSAYNKHRDKPIREQAENIIHLFTLTNLGAPAAFKYFDTTIDRKRYTSTKEVLDATLIHQSITGLYETRIDLSQLGGDGGEAAAKEAAAKGGTLNIEDEYRLHETSKEPDVSLGSTWLSDFPQAWAETGGMGLAVRQAPLIIPLKATSTPVSIKQYPMSQEARLGIKPHIQRLLDQGILVPCQSPWNTPLLPVKKPGTNDYRPVQDLREVNKRVEDIHPTVPNPYNLLSGLPPSHQWYTVLDLKDAFFCLRLHPTSQPLFAFEWRDPEMGISGQLTWTRLPQGFKNSPTLFNEALHRDLAGFRIQHPDLILLQYVDDLLLAATSELDCQQGTRALLQTLGDLGYRASAKKAQICQKQVKYLGYLLKEGQRWLTEARKETVMGQPIPKTPRQLREFLGTAGFCRLWIPGFAEMAAPLYPLTKPGTLFNWGPDQQKAFQEIKQALLTAPALGLPDLTKPFELFVDEKQGYAKGVLTQKLGPWRRPVAYLSKKLDPVAAGWPPCLRMVAAIAVLTKDAGKLTMGQPLVILAPHAVEALVKQPPDRWLSNARMTHYQALLLDTDRVQFGPVVALNPATLLPLPEEGLQHDCLDILAEAHGTRSDLMDQPLPDADHTWYTDGSSFLQEGQRKAGAAVTTETEVIWARALPAGTSAQRAELIALTQALKMAEGKKLNVYTDSRYAFATAHIHGEIYRRRGWLTSEGKEIKNKDEILALLKALFLPKRLSIIHCPGHQKGNSAEARGNRMADQAAREVATRETPETSTLLAGKRTADGSEFEKRTADGSEFESPKKKAKVE

SEQ ID NO: 2237 - protein, 2105 aa, synthetic construct
MPAAKRVKLDGGDKKYSIGLDIGTNSVGWAVITDEYKVPSKKFKVLGNTDRHSIKKNLIGALLFDSGETAEATRLKRTARRRYTRRKNRICYLQEIFSNEMAKVDDSFFHRLEESFLVEEDKKHERHPIFGNIVDEVAYHEKYPTIYHLRKKLVDSTDKADLRLIYLALAHMIKFRGHFLIEGDLNPDNSDVDKLFIQLVQTYNQLFEENPINASGVDAKAILSARLSKSRRLENLIAQLPGEKKNGLFGNLIALSLGLTPNFKSNFDLAEDAKLQLSKDTYDDDLDNLLAQIGDQYADLFLAAKNLSDAILLSDILRVNTEITKAPLSASMIKRYDEHHQDLTLLKALVRQQLPEKYKEIFFDQSKNGYAGYIDGGASQEEFYKFIKPILEKMDGTEELLVKLNREDLLRKQRTFDNGSIPHQIHLGELHAILRRQEDFYPFLKDNREKIEKILTFRIPYYVGPLARGNSRFAWMTRKSEETITPWNFEEVVDKGASAQSFIERMTNFDKNLPNEKVLPKHSLLYEYFTVYNELTKVKYVTEGMRKPAFLSGEQKKAIVDLLFKTNRKVTVKQLKEDYFKKIECFDSVEISGVEDRFNASLGTYHDLLKIIKDKDFLDNEENEDILEDIVLTLTLFEDREMIEERLKTYAHLFDDKVMKQLKRRRYTGWGRLSRKLINGIRDKQSGKTILDFLKSDGFANRNFMQLIHDDSLTFKEDIQKAQVSGQGDSLHEHIANLAGSPAIKKGILQTVKVVDELVKVMGRHKPENIVIEMARENQTTQKGQKNSRERMKRIEEGIKELGSQILKEHPVENTQLQNEKLYLYYLQNGRDMYVDQELDINRLSDYDVDHIVPQSFLKDDSIDNKVLTRSDKARGKSDNVPSEEVVKKMKNYWRQLLNAKLITQRKFDNLTKAERGGLSELDKAGFIKRQLVETRQITKHVAQILDSRMNTKYDENDKLIREVKVITLKSKLVSDFRKDFQFYKVREINNYHHAHDAYLNAVVGTALIKKYPKLESEFVYGDYKVYDVRKMIAKSEQEIGKATAKYFFYSNIMNFFKTEITLANGEIRKRPLIETNGETGEIVWDKGRDFATVRKVLSMPQVNIVKKTEVQTGGFSKESILPKRNSDKLIARKKDWDPKKYGGFDSPTVAYSVLVVAKVEKGKSKKLKSVKELLGITIMERSSFEKNPIDFLEAKGYKEVKKDLIIKLPKYSLFELENGRKRMLASAGELQKGNELALPSKYVNFLYLASHYEKLKGSPEDNEQKQLFVEQHKHYLDEIIEQISEFSKRVILADANLDKVLSAYNKHRDKPIREQAENIIHLFTLTNLGAPAAFKYFDTTIDRKRYTSTKEVLDATLIHQSITGLYETRIDLSQLGGDGGEAAAKEAAAKEAAAKEAAAKGGTLNIEDEYRLHETSKEPDVSLGSTWLSDFPQAWAETGGMGLAVRQAPLIIPLKATSTPVSIKQYPMSQEARLGIKPHIQRLLDQGILVPCQSPWNTPLLPVKKPGTNDYRPVQDLREVNKRVEDIHPTVPNPYNLLSGLPPSHQWYTVLDLKDAFFCLRLHPTSQPLFAFEWRDPEMGISGQLTWTRLPQGFKNSPTLFNEALHRDLAGFRIQHPDLILLQYVDDLLLAATSELDCQQGTRALLQTLGDLGYRASAKKAQICQKQVKYLGYLLKEGQRWLTEARKETVMGQPIPKTPRQLREFLGTAGFCRLWIPGFAEMAAPLYPLTKPGTLFNWGPDQQKAFQEIKQALLTAPALGLPDLTKPFELFVDEKQGYAKGVLTQKLGPWRRPVAYLSKKLDPVAAGWPPCLRMVAAIAVLTKDAGKLTMGQPLVILAPHAVEALVKQPPDRWLSNARMTHYQALLLDTDRVQFGPVVALNPATLLPLPEEGLQHDCLDILAEAHGTRSDLMDQPLPDADHTWYTDGSSFLQEGQRKAGAAVTTETEVIWARALPAGTSAQRAELIALTQALKMAEGKKLNVYTDSRYAFATAHIHGEIYRRRGWLTSEGKEIKNKDEILALLKALFLPKRLSIIHCPGHQKGNSAEARGNRMADQAAREVATRETPETSTLLAGKRTADGSEFEKRTADGSEFESPKKKAKVE

SEQ ID NO: 2238 - protein, 2093 aa, synthetic construct
MPAAKRVKLDGGDKKYSIGLDIGTNSVGWAVITDEYKVPSKKFKVLGNTDRHSIKKNLIGALLFDSGETAEATRLKRTARRRYTRRKNRICYLQEIFSNEMAKVDDSFFHRLEESFLVEEDKKHERHPIFGNIVDEVAYHEKYPTIYHLRKKLVDSTDKADLRLIYLALAHMIKFRGHFLIEGDLNPDNSDVDKLFIQLVQTYNQLFEENPINASGVDAKAILSARLSKSRRLENLIAQLPGEKKNGLFGNLIALSLGLTPNFKSNFDLAEDAKLQLSKDTYDDDLDNLLAQIGDQYADLFLAAKNLSDAILLSDILRVNTEITKAPLSASMIKRYDEHHQDLTLLKALVRQQLPEKYKEIFFDQSKNGYAGYIDGGASQEEFYKFIKPILEKMDGTEELLVKLNREDLLRKQRTFDNGSIPHQIHLGELHAILRRQEDFYPFLKDNREKIEKILTFRIPYYVGPLARGNSRFAWMTRKSEETITPWNFEEVVDKGASAQSFIERMTNFDKNLPNEKVLPKHSLLYEYFTVYNELTKVKYVTEGMRKPAFLSGEQKKAIVDLLFKTNRKVTVKQLKEDYFKKIECFDSVEISGVEDRFNASLGTYHDLLKIIKDKDFLDNEENEDILEDIVLTLTLFEDREMIEERLKTYAHLFDDKVMKQLKRRRYTGWGRLSRKLINGIRDKQSGKTILDFLKSDGFANRNFMQLIHDDSLTFKEDIQKAQVSGQGDSLHEHIANLAGSPAIKKGILQTVKVVDELVKVMGRHKPENIVIEMARENQTTQKGQKNSRERMKRIEEGIKELGSQILKEHPVENTQLQNEKLYLYYLQNGRDMYVDQELDINRLSDYDVDHIVPQSFLKDDSIDNKVLTRSDKARGKSDNVPSEEVVKKMKNYWRQLLNAKLITQRKFDNLTKAERGGLSELDKAGFIKRQLVETRQITKHVAQILDSRMNTKYDENDKLIREVKVITLKSKLVSDFRKDFQFYKVREINNYHHAHDAYLNAVVGTALIKKYPKLESEFVYGDYKVYDVRKMIAKSEQEIGKATAKYFFYSNIMNFFKTEITLANGEIRKRPLIETNGETGEIVWDKGRDFATVRKVLSMPQVNIVKKTEVQTGGFSKESILPKRNSDKLIARKKDWDPKKYGGFDSPTVAYSVLVVAKVEKGKSKKLKSVKELLGITIMERSSFEKNPIDFLEAKGYKEVKKDLIIKLPKYSLFELENGRKRMLASAGELQKGNELALPSKYVNFLYLASHYEKLKGSPEDNEQKQLFVEQHKHYLDEIIEQISEFSKRVILADANLDKVLSAYNKHRDKPIREQAENIIHLFTLTNLGAPAAFKYFDTTIDRKRYTSTKEVLDATLIHQSITGLYETRIDLSQLGGDGGEAAAKGGSGGTLNIEDEYRLHETSKEPDVSLGSTWLSDFPQAWAETGGMGLAVRQAPLIIPLKATSTPVSIKQYPMSQEARLGIKPHIQRLLDQGILVPCQSPWNTPLLPVKKPGTNDYRPVQDLREVNKRVEDIHPTVPNPYNLLSGLPPSHQWYTVLDLKDAFFCLRLHPTSQPLFAFEWRDPEMGISGQLTWTRLPQGFKNSPTLFNEALHRDLAGFRIQHPDLILLQYVDDLLLAATSELDCQQGTRALLQTLGDLGYRASAKKAQICQKQVKYLGYLLKEGQRWLTEARKETVMGQPIPKTPRQLREFLGTAGFCRLWIPGFAEMAAPLYPLTKPGTLFNWGPDQQKAFQEIKQALLTAPALGLPDLTKPFELFVDEKQGYAKGVLTQKLGPWRRPVAYLSKKLDPVAAGWPPCLRMVAAIAVLTKDAGKLTMGQPLVILAPHAVEALVKQPPDRWLSNARMTHYQALLLDTDRVQFGPVVALNPATLLPLPEEGLQHDCLDILAEAHGTRSDLMDQPLPDADHTWYTDGSSFLQEGQRKAGAAVTTETEVIWARALPAGTSAQRAELIALTQALKMAEGKKLNVYTDSRYAFATAHIHGEIYRRRGWLTSEGKEIKNKDEILALLKALFLPKRLSIIHCPGHQKGNSAEARGNRMADQAAREVATRETPETSTLLAGKRTADGSEFEKRTADGSEFESPKKKAKVE

SEQ ID NO: 2239 - protein, 2096 aa, synthetic construct
MPAAKRVKLDGGDKKYSIGLDIGTNSVGWAVITDEYKVPSKKFKVLGNTDRHSIKKNLIGALLFDSGETAEATRLKRTARRRYTRRKNRICYLQEIFSNEMAKVDDSFFHRLEESFLVEEDKKHERHPIFGNIVDEVAYHEKYPTIYHLRKKLVDSTDKADLRLIYLALAHMIKFRGHFLIEGDLNPDNSDVDKLFIQLVQTYNQLFEENPINASGVDAKAILSARLSKSRRLENLIAQLPGEKKNGLFGNLIALSLGLTPNFKSNFDLAEDAKLQLSKDTYDDDLDNLLAQIGDQYADLFLAAKNLSDAILLSDILRVNTEITKAPLSASMIKRYDEHHQDLTLLKALVRQQLPEKYKEIFFDQSKNGYAGYIDGGASQEEFYKFIKPILEKMDGTEELLVKLNREDLLRKQRTFDNGSIPHQIHLGELHAILRRQEDFYPFLKDNREKIEKILTFRIPYYVGPLARGNSRFAWMTRKSEETITPWNFEEVVDKGASAQSFIERMTNFDKNLPNEKVLPKHSLLYEYFTVYNELTKVKYVTEGMRKPAFLSGEQKKAIVDLLFKTNRKVTVKQLKEDYFKKIECFDSVEISGVEDRFNASLGTYHDLLKIIKDKDFLDNEENEDILEDIVLTLTLFEDREMIEERLKTYAHLFDDKVMKQLKRRRYTGWGRLSRKLINGIRDKQSGKTILDFLKSDGFANRNFMQLIHDDSLTFKEDIQKAQVSGQGDSLHEHIANLAGSPAIKKGILQTVKVVDELVKVMGRHKPENIVIEMARENQTTQKGQKNSRERMKRIEEGIKELGSQILKEHPVENTQLQNEKLYLYYLQNGRDMYVDQELDINRLSDYDVDHIVPQSFLKDDSIDNKVLTRSDKARGKSDNVPSEEVVKKMKNYWRQLLNAKLITQRKFDNLTKAERGGLSELDKAGFIKRQLVETRQITKHVAQILDSRMNTKYDENDKLIREVKVITLKSKLVSDFRKDFQFYKVREINNYHHAHDAYLNAVVGTALIKKYPKLESEFVYGDYKVYDVRKMIAKSEQEIGKATAKYFFYSNIMNFFKTEITLANGEIRKRPLIETNGETGEIVWDKGRDFATVRKVLSMPQVNIVKKTEVQTGGFSKESILPKRNSDKLIARKKDWDPKKYGGFDSPTVAYSVLVVAKVEKGKSKKLKSVKELLGITIMERSSFEKNPIDFLEAKGYKEVKKDLIIKLPKYSLFELENGRKRMLASAGELQKGNELALPSKYVNFLYLASHYEKLKGSPEDNEQKQLFVEQHKHYLDEIIEQISEFSKRVILADANLDKVLSAYNKHRDKPIREQAENIIHLFTLTNLGAPAAFKYFDTTIDRKRYTSTKEVLDATLIHQSITGLYETRIDLSQLGGDGGEAAAKGGSGSSGGTLNIEDEYRLHETSKEPDVSLGSTWLSDFPQAWAETGGMGLAVRQAPLIIPLKATSTPVSIKQYPMSQEARLGIKPHIQRLLDQGILVPCQSPWNTPLLPVKKPGTNDYRPVQDLREVNKRVEDIHPTVPNPYNLLSGLPPSHQWYTVLDLKDAFFCLRLHPTSQPLFAFEWRDPEMGISGQLTWTRLPQGFKNSPTLFNEALHRDLAGFRIQHPDLILLQYVDDLLLAATSELDCQQGTRALLQTLGDLGYRASAKKAQICQKQVKYLGYLLKEGQRWLTEARKETVMGQPIPKTPRQLREFLGTAGFCRLWIPGFAEMAAPLYPLTKPGTLFNWGPDQQKAFQEIKQALLTAPALGLPDLTKPFELFVDEKQGYAKGVLTQKLGPWRRPVAYLSKKLDPVAAGWPPCLRMVAAIAVLTKDAGKLTMGQPLVILAPHAVEALVKQPPDRWLSNARMTHYQALLLDTDRVQFGPVVALNPATLLPLPEEGLQHDCLDILAEAHGTRSDLMDQPLPDADHTWYTDGSSFLQEGQRKAGAAVTTETEVIWARALPAGTSAQRAELIALTQALKMAEGKKLNVYTDSRYAFATAHIHGEIYRRRGWLTSEGKEIKNKDEILALLKALFLPKRLSIIHCPGHQKGNSAEARGNRMADQAAREVATRETPETSTLLAGKRTADGSEFEKRTADGSEFESPKKKAKVE

SEQ ID NO: 2240 - protein, 2100 aa, synthetic construct
MPAAKRVKLDGGDKKYSIGLDIGTNSVGWAVITDEYKVPSKKFKVLGNTDRHSIKKNLIGALLFDSGETAEATRLKRTARRRYTRRKNRICYLQEIFSNEMAKVDDSFFHRLEESFLVEEDKKHERHPIFGNIVDEVAYHEKYPTIYHLRKKLVDSTDKADLRLIYLALAHMIKFRGHFLIEGDLNPDNSDVDKLFIQLVQTYNQLFEENPINASGVDAKAILSARLSKSRRLENLIAQLPGEKKNGLFGNLIALSLGLTPNFKSNFDLAEDAKLQLSKDTYDDDLDNLLAQIGDQYADLFLAAKNLSDAILLSDILRVNTEITKAPLSASMIKRYDEHHQDLTLLKALVRQQLPEKYKEIFFDQSKNGYAGYIDGGASQEEFYKFIKPILEKMDGTEELLVKLNREDLLRKQRTFDNGSIPHQIHLGELHAILRRQEDFYPFLKDNREKIEKILTFRIPYYVGPLARGNSRFAWMTRKSEETITPWNFEEVVDKGASAQSFIERMTNFDKNLPNEKVLPKHSLLYEYFTVYNELTKVKYVTEGMRKPAFLSGEQKKAIVDLLFKTNRKVTVKQLKEDYFKKIECFDSVEISGVEDRFNASLGTYHDLLKIIKDKDFLDNEENEDILEDIVLTLTLFEDREMIEERLKTYAHLFDDKVMKQLKRRRYTGWGRLSRKLINGIRDKQSGKTILDFLKSDGFANRNFMQLIHDDSLTFKEDIQKAQVSGQGDSLHEHIANLAGSPAIKKGILQTVKVVDELVKVMGRHKPENIVIEMARENQTTQKGQKNSRERMKRIEEGIKELGSQILKEHPVENTQLQNEKLYLYYLQNGRDMYVDQELDINRLSDYDVDHIVPQSFLKDDSIDNKVLTRSDKARGKSDNVPSEEVVKKMKNYWRQLLNAKLITQRKFDNLTKAERGGLSELDKAGFIKRQLVETRQITKHVAQILDSRMNTKYDENDKLIREVKVITLKSKLVSDFRKDFQFYKVREINNYHHAHDAYLNAVVGTALIKKYPKLESEFVYGDYKVYDVRKMIAKSEQEIGKATAKYFFYSNIMNFFKTEITLANGEIRKRPLIETNGETGEIVWDKGRDFATVRKVLSMPQVNIVKKTEVQTGGFSKESILPKRNSDKLIARKKDWDPKKYGGFDSPTVAYSVLVVAKVEKGKSKKLKSVKELLGITIMERSSFEKNPIDFLEAKGYKEVKKDLIIKLPKYSLFELENGRKRMLASAGELQKGNELALPSKYVNFLYLASHYEKLKGSPEDNEQKQLFVEQHKHYLDEIIEQISEFSKRVILADANLDKVLSAYNKHRDKPIREQAENIIHLFTLTNLGAPAAFKYFDTTIDRKRYTSTKEVLDATLIHQSITGLYETRIDLSQLGGDGGGGGGSGGGGSGGGGSGGTLNIEDEYRLHETSKEPDVSLGSTWLSDFPQAWAETGGMGLAVRQAPLIIPLKATSTPVSIKQYPMSQEARLGIKPHIQRLLDQGILVPCQSPWNTPLLPVKKPGTNDYRPVQDLREVNKRVEDIHPTVPNPYNLLSGLPPSHQWYTVLDLKDAFFCLRLHPTSQPLFAFEWRDPEMGISGQLTWTRLPQGFKNSPTLFNEALHRDLAGFRIQHPDLILLQYVDDLLLAATSELDCQQGTRALLQTLGDLGYRASAKKAQICQKQVKYLGYLLKEGQRWLTEARKETVMGQPIPKTPRQLREFLGTAGFCRLWIPGFAEMAAPLYPLTKPGTLFNWGPDQQKAFQEIKQALLTAPALGLPDLTKPFELFVDEKQGYAKGVLTQKLGPWRRPVAYLSKKLDPVAAGWPPCLRMVAAIAVLTKDAGKLTMGQPLVILAPHAVEALVKQPPDRWLSNARMTHYQALLLDTDRVQFGPVVALNPATLLPLPEEGLQHDCLDILAEAHGTRSDLMDQPLPDADHTWYTDGSSFLQEGQRKAGAAVTTETEVIWARALPAGTSAQRAELIALTQALKMAEGKKLNVYTDSRYAFATAHIHGEIYRRRGWLTSEGKEIKNKDEILALLKALFLPKRLSIIHCPGHQKGNSAEARGNRMADQAAREVATRETPETSTLLAGKRTADGSEFEKRTADGSEFESPKKKAKVE

SEQ ID NO: 2241 - protein, 2093 aa, synthetic construct
MPAAKRVKLDGGDKKYSIGLDIGTNSVGWAVITDEYKVPSKKFKVLGNTDRHSIKKNLIGALLFDSGETAEATRLKRTARRRYTRRKNRICYLQEIFSNEMAKVDDSFFHRLEESFLVEEDKKHERHPIFGNIVDEVAYHEKYPTIYHLRKKLVDSTDKADLRLIYLALAHMIKFRGHFLIEGDLNPDNSDVDKLFIQLVQTYNQLFEENPINASGVDAKAILSARLSKSRRLENLIAQLPGEKKNGLFGNLIALSLGLTPNFKSNFDLAEDAKLQLSKDTYDDDLDNLLAQIGDQYADLFLAAKNLSDAILLSDILRVNTEITKAPLSASMIKRYDEHHQDLTLLKALVRQQLPEKYKEIFFDQSKNGYAGYIDGGASQEEFYKFIKPILEKMDGTEELLVKLNREDLLRKQRTFDNGSIPHQIHLGELHAILRRQEDFYPFLKDNREKIEKILTFRIPYYVGPLARGNSRFAWMTRKSEETITPWNFEEVVDKGASAQSFIERMTNFDKNLPNEKVLPKHSLLYEYFTVYNELTKVKYVTEGMRKPAFLSGEQKKAIVDLLFKTNRKVTVKQLKEDYFKKIECFDSVEISGVEDRFNASLGTYHDLLKIIKDKDFLDNEENEDILEDIVLTLTLFEDREMIEERLKTYAHLFDDKVMKQLKRRRYTGWGRLSRKLINGIRDKQSGKTILDFLKSDGFANRNFMQLIHDDSLTFKEDIQKAQVSGQGDSLHEHIANLAGSPAIKKGILQTVKVVDELVKVMGRHKPENIVIEMARENQTTQKGQKNSRERMKRIEEGIKELGSQILKEHPVENTQLQNEKLYLYYLQNGRDMYVDQELDINRLSDYDVDHIVPQSFLKDDSIDNKVLTRSDKARGKSDNVPSEEVVKKMKNYWRQLLNAKLITQRKFDNLTKAERGGLSELDKAGFIKRQLVETRQITKHVAQILDSRMNTKYDENDKLIREVKVITLKSKLVSDFRKDFQFYKVREINNYHHAHDAYLNAVVGTALIKKYPKLESEFVYGDYKVYDVRKMIAKSEQEIGKATAKYFFYSNIMNFFKTEITLANGEIRKRPLIETNGETGEIVWDKGRDFATVRKVLSMPQVNIVKKTEVQTGGFSKESILPKRNSDKLIARKKDWDPKKYGGFDSPTVAYSVLVVAKVEKGKSKKLKSVKELLGITIMERSSFEKNPIDFLEAKGYKEVKKDLIIKLPKYSLFELENGRKRMLASAGELQKGNELALPSKYVNFLYLASHYEKLKGSPEDNEQKQLFVEQHKHYLDEIIEQISEFSKRVILADANLDKVLSAYNKHRDKPIREQAENIIHLFTLTNLGAPAAFKYFDTTIDRKRYTSTKEVLDATLIHQSITGLYETRIDLSQLGGDGGGGGEAAAKGGTLNIEDEYRLHETSKEPDVSLGSTWLSDFPQAWAETGGMGLAVRQAPLIIPLKATSTPVSIKQYPMSQEARLGIKPHIQRLLDQGILVPCQSPWNTPLLPVKKPGTNDYRPVQDLREVNKRVEDIHPTVPNPYNLLSGLPPSHQWYTVLDLKDAFFCLRLHPTSQPLFAFEWRDPEMGISGQLTWTRLPQGFKNSPTLFNEALHRDLAGFRIQHPDLILLQYVDDLLLAATSELDCQQGTRALLQTLGDLGYRASAKKAQICQKQVKYLGYLLKEGQRWLTEARKETVMGQPIPKTPRQLREFLGTAGFCRLWIPGFAEMAAPLYPLTKPGTLFNWGPDQQKAFQEIKQALLTAPALGLPDLTKPFELFVDEKQGYAKGVLTQKLGPWRRPVAYLSKKLDPVAAGWPPCLRMVAAIAVLTKDAGKLTMGQPLVILAPHAVEALVKQPPDRWLSNARMTHYQALLLDTDRVQFGPVVALNPATLLPLPEEGLQHDCLDILAEAHGTRSDLMDQPLPDADHTWYTDGSSFLQEGQRKAGAAVTTETEVIWARALPAGTSAQRAELIALTQALKMAEGKKLNVYTDSRYAFATAHIHGEIYRRRGWLTSEGKEIKNKDEILALLKALFLPKRLSIIHCPGHQKGNSAEARGNRMADQAAREVATRETPETSTLLAGKRTADGSEFEKRTADGSEFESPKKKAKVE

SEQ ID NO: 2242 - protein, 2088 aa, synthetic construct
MPAAKRVKLDGGDKKYSIGLDIGTNSVGWAVITDEYKVPSKKFKVLGNTDRHSIKKNLIGALLFDSGETAEATRLKRTARRRYTRRKNRICYLQEIFSNEMAKVDDSFFHRLEESFLVEEDKKHERHPIFGNIVDEVAYHEKYPTIYHLRKKLVDSTDKADLRLIYLALAHMIKFRGHFLIEGDLNPDNSDVDKLFIQLVQTYNQLFEENPINASGVDAKAILSARLSKSRRLENLIAQLPGEKKNGLFGNLIALSLGLTPNFKSNFDLAEDAKLQLSKDTYDDDLDNLLAQIGDQYADLFLAAKNLSDAILLSDILRVNTEITKAPLSASMIKRYDEHHQDLTLLKALVRQQLPEKYKEIFFDQSKNGYAGYIDGGASQEEFYKFIKPILEKMDGTEELLVKLNREDLLRKQRTFDNGSIPHQIHLGELHAILRRQEDFYPFLKDNREKIEKILTFRIPYYVGPLARGNSRFAWMTRKSEETITPWNFEEVVDKGASAQSFIERMTNFDKNLPNEKVLPKHSLLYEYFTVYNELTKVKYVTEGMRKPAFLSGEQKKAIVDLLFKTNRKVTVKQLKEDYFKKIECFDSVEISGVEDRFNASLGTYHDLLKIIKDKDFLDNEENEDILEDIVLTLTLFEDREMIEERLKTYAHLFDDKVMKQLKRRRYTGWGRLSRKLINGIRDKQSGKTILDFLKSDGFANRNFMQLIHDDSLTFKEDIQKAQVSGQGDSLHEHIANLAGSPAIKKGILQTVKVVDELVKVMGRHKPENIVIEMARENQTTQKGQKNSRERMKRIEEGIKELGSQILKEHPVENTQLQNEKLYLYYLQNGRDMYVDQELDINRLSDYDVDHIVPQSFLKDDSIDNKVLTRSDKARGKSDNVPSEEVVKKMKNYWRQLLNAKLITQRKFDNLTKAERGGLSELDKAGFIKRQLVETRQITKHVAQILDSRMNTKYDENDKLIREVKVITLKSKLVSDFRKDFQFYKVREINNYHHAHDAYLNAVVGTALIKKYPKLESEFVYGDYKVYDVRKMIAKSEQEIGKATAKYFFYSNIMNFFKTEITLANGEIRKRPLIETNGETGEIVWDKGRDFATVRKVLSMPQVNIVKKTEVQTGGFSKESILPKRNSDKLIARKKDWDPKKYGGFDSPTVAYSVLVVAKVEKGKSKKLKSVKELLGITIMERSSFEKNPIDFLEAKGYKEVKKDLIIKLPKYSLFELENGRKRMLASAGELQKGNELALPSKYVNFLYLASHYEKLKGSPEDNEQKQLFVEQHKHYLDEIIEQISEFSKRVILADANLDKVLSAYNKHRDKPIREQAENIIHLFTLTNLGAPAAFKYFDTTIDRKRYTSTKEVLDATLIHQSITGLYETRIDLSQLGGDGGGSSGGTLNIEDEYRLHETSKEPDVSLGSTWLSDFPQAWAETGGMGLAVRQAPLIIPLKATSTPVSIKQYPMSQEARLGIKPHIQRLLDQGILVPCQSPWNTPLLPVKKPGTNDYRPVQDLREVNKRVEDIHPTVPNPYNLLSGLPPSHQWYTVLDLKDAFFCLRLHPTSQPLFAFEWRDPEMGISGQLTWTRLPQGFKNSPTLFNEALHRDLAGFRIQHPDLILLQYVDDLLLAATSELDCQQGTRALLQTLGDLGYRASAKKAQICQKQVKYLGYLLKEGQRWLTEARKETVMGQPIPKTPRQLREFLGTAGFCRLWIPGFAEMAAPLYPLTKPGTLFNWGPDQQKAFQEIKQALLTAPALGLPDLTKPFELFVDEKQGYAKGVLTQKLGPWRRPVAYLSKKLDPVAAGWPPCLRMVAAIAVLTKDAGKLTMGQPLVILAPHAVEALVKQPPDRWLSNARMTHYQALLLDTDRVQFGPVVALNPATLLPLPEEGLQHDCLDILAEAHGTRSDLMDQPLPDADHTWYTDGSSFLQEGQRKAGAAVTTETEVIWARALPAGTSAQRAELIALTQALKMAEGKKLNVYTDSRYAFATAHIHGEIYRRRGWLTSEGKEIKNKDEILALLKALFLPKRLSIIHCPGHQKGNSAEARGNRMADQAAREVATRETPETSTLLAGKRTADGSEFEKRTADGSEFESPKKKAKVE

SEQ ID NO: 2243 - protein, 2090 aa, synthetic construct
MPAAKRVKLDGGDKKYSIGLDIGTNSVGWAVITDEYKVPSKKFKVLGNTDRHSIKKNLIGALLFDSGETAEATRLKRTARRRYTRRKNRICYLQEIFSNEMAKVDDSFFHRLEESFLVEEDKKHERHPIFGNIVDEVAYHEKYPTIYHLRKKLVDSTDKADLRLIYLALAHMIKFRGHFLIEGDLNPDNSDVDKLFIQLVQTYNQLFEENPINASGVDAKAILSARLSKSRRLENLIAQLPGEKKNGLFGNLIALSLGLTPNFKSNFDLAEDAKLQLSKDTYDDDLDNLLAQIGDQYADLFLAAKNLSDAILLSDILRVNTEITKAPLSASMIKRYDEHHQDLTLLKALVRQQLPEKYKEIFFDQSKNGYAGYIDGGASQEEFYKFIKPILEKMDGTEELLVKLNREDLLRKQRTFDNGSIPHQIHLGELHAILRRQEDFYPFLKDNREKIEKILTFRIPYYVGPLARGNSRFAWMTRKSEETITPWNFEEVVDKGASAQSFIERMTNFDKNLPNEKVLPKHSLLYEYFTVYNELTKVKYVTEGMRKPAFLSGEQKKAIVDLLFKTNRKVTVKQLKEDYFKKIECFDSVEISGVEDRFNASLGTYHDLLKIIKDKDFLDNEENEDILEDIVLTLTLFEDREMIEERLKTYAHLFDDKVMKQLKRRRYTGWGRLSRKLINGIRDKQSGKTILDFLKSDGFANRNFMQLIHDDSLTFKEDIQKAQVSGQGDSLHEHIANLAGSPAIKKGILQTVKVVDELVKVMGRHKPENIVIEMARENQTTQKGQKNSRERMKRIEEGIKELGSQILKEHPVENTQLQNEKLYLYYLQNGRDMYVDQELDINRLSDYDVDHIVPQSFLKDDSIDNKVLTRSDKARGKSDNVPSEEVVKKMKNYWRQLLNAKLITQRKFDNLTKAERGGLSELDKAGFIKRQLVETRQITKHVAQILDSRMNTKYDENDKLIREVKVITLKSKLVSDFRKDFQFYKVREINNYHHAHDAYLNAVVGTALIKKYPKLESEFVYGDYKVYDVRKMIAKSEQEIGKATAKYFFYSNIMNFFKTEITLANGEIRKRPLIETNGETGEIVWDKGRDFATVRKVLSMPQVNIVKKTEVQTGGFSKESILPKRNSDKLIARKKDWDPKKYGGFDSPTVAYSVLVVAKVEKGKSKKLKSVKELLGITIMERSSFEKNPIDFLEAKGYKEVKKDLIIKLPKYSLFELENGRKRMLASAGELQKGNELALPSKYVNFLYLASHYEKLKGSPEDNEQKQLFVEQHKHYLDEIIEQISEFSKRVILADANLDKVLSAYNKHRDKPIREQAENIIHLFTLTNLGAPAAFKYFDTTIDRKRYTSTKEVLDATLIHQSITGLYETRIDLSQLGGDGGPAPAPGGTLNIEDEYRLHETSKEPDVSLGSTWLSDFPQAWAETGGMGLAVRQAPLIIPLKATSTPVSIKQYPMSQEARLGIKPHIQRLLDQGILVPCQSPWNTPLLPVKKPGTNDYRPVQDLREVNKRVEDIHPTVPNPYNLLSGLPPSHQWYTVLDLKDAFFCLRLHPTSQPLFAFEWRDPEMGISGQLTWTRLPQGFKNSPTLFNEALHRDLAGFRIQHPDLILLQYVDDLLLAATSELDCQQGTRALLQTLGDLGYRASAKKAQICQKQVKYLGYLLKEGQRWLTEARKETVMGQPIPKTPRQLREFLGTAGFCRLWIPGFAEMAAPLYPLTKPGTLFNWGPDQQKAFQEIKQALLTAPALGLPDLTKPFELFVDEKQGYAKGVLTQKLGPWRRPVAYLSKKLDPVAAGWPPCLRMVAAIAVLTKDAGKLTMGQPLVILAPHAVEALVKQPPDRWLSNARMTHYQALLLDTDRVQFGPVVALNPATLLPLPEEGLQHDCLDILAEAHGTRSDLMDQPLPDADHTWYTDGSSFLQEGQRKAGAAVTTETEVIWARALPAGTSAQRAELIALTQALKMAEGKKLNVYTDSRYAFATAHIHGEIYRRRGWLTSEGKEIKNKDEILALLKALFLPKRLSIIHCPGHQKGNSAEARGNRMADQAAREVATRETPETSTLLAGKRTADGSEFEKRTADGSEFESPKKKAKVE

SEQ ID NO: 2244 - protein, 2096 aa, synthetic construct
MPAAKRVKLDGGDKKYSIGLDIGTNSVGWAVITDEYKVPSKKFKVLGNTDRHSIKKNLIGALLFDSGETAEATRLKRTARRRYTRRKNRICYLQEIFSNEMAKVDDSFFHRLEESFLVEEDKKHERHPIFGNIVDEVAYHEKYPTIYHLRKKLVDSTDKADLRLIYLALAHMIKFRGHFLIEGDLNPDNSDVDKLFIQLVQTYNQLFEENPINASGVDAKAILSARLSKSRRLENLIAQLPGEKKNGLFGNLIALSLGLTPNFKSNFDLAEDAKLQLSKDTYDDDLDNLLAQIGDQYADLFLAAKNLSDAILLSDILRVNTEITKAPLSASMIKRYDEHHQDLTLLKALVRQQLPEKYKEIFFDQSKNGYAGYIDGGASQEEFYKFIKPILEKMDGTEELLVKLNREDLLRKQRTFDNGSIPHQIHLGELHAILRRQEDFYPFLKDNREKIEKILTFRIPYYVGPLARGNSRFAWMTRKSEETITPWNFEEVVDKGASAQSFIERMTNFDKNLPNEKVLPKHSLLYEYFTVYNELTKVKYVTEGMRKPAFLSGEQKKAIVDLLFKTNRKVTVKQLKEDYFKKIECFDSVEISGVEDRFNASLGTYHDLLKIIKDKDFLDNEENEDILEDIVLTLTLFEDREMIEERLKTYAHLFDDKVMKQLKRRRYTGWGRLSRKLINGIRDKQSGKTILDFLKSDGFANRNFMQLIHDDSLTFKEDIQKAQVSGQGDSLHEHIANLAGSPAIKKGILQTVKVVDELVKVMGRHKPENIVIEMARENQTTQKGQKNSRERMKRIEEGIKELGSQILKEHPVENTQLQNEKLYLYYLQNGRDMYVDQELDINRLSDYDVDHIVPQSFLKDDSIDNKVLTRSDKARGKSDNVPSEEVVKKMKNYWRQLLNAKLITQRKFDNLTKAERGGLSELDKAGFIKRQLVETRQITKHVAQILDSRMNTKYDENDKLIREVKVITLKSKLVSDFRKDFQFYKVREINNYHHAHDAYLNAVVGTALIKKYPKLESEFVYGDYKVYDVRKMIAKSEQEIGKATAKYFFYSNIMNFFKTEITLANGEIRKRPLIETNGETGEIVWDKGRDFATVRKVLSMPQVNIVKKTEVQTGGFSKESILPKRNSDKLIARKKDWDPKKYGGFDSPTVAYSVLVVAKVEKGKSKKLKSVKELLGITIMERSSFEKNPIDFLEAKGYKEVKKDLIIKLPKYSLFELENGRKRMLASAGELQKGNELALPSKYVNFLYLASHYEKLKGSPEDNEQKQLFVEQHKHYLDEIIEQISEFSKRVILADANLDKVLSAYNKHRDKPIREQAENIIHLFTLTNLGAPAAFKYFDTTIDRKRYTSTKEVLDATLIHQSITGLYETRIDLSQLGGDGGGSSEAAAKGGSGGTLNIEDEYRLHETSKEPDVSLGSTWLSDFPQAWAETGGMGLAVRQAPLIIPLKATSTPVSIKQYPMSQEARLGIKPHIQRLLDQGILVPCQSPWNTPLLPVKKPGTNDYRPVQDLREVNKRVEDIHPTVPNPYNLLSGLPPSHQWYTVLDLKDAFFCLRLHPTSQPLFAFEWRDPEMGISGQLTWTRLPQGFKNSPTLFNEALHRDLAGFRIQHPDLILLQYVDDLLLAATSELDCQQGTRALLQTLGDLGYRASAKKAQICQKQVKYLGYLLKEGQRWLTEARKETVMGQPIPKTPRQLREFLGTAGFCRLWIPGFAEMAAPLYPLTKPGTLFNWGPDQQKAFQEIKQALLTAPALGLPDLTKPFELFVDEKQGYAKGVLTQKLGPWRRPVAYLSKKLDPVAAGWPPCLRMVAAIAVLTKDAGKLTMGQPLVILAPHAVEALVKQPPDRWLSNARMTHYQALLLDTDRVQFGPVVALNPATLLPLPEEGLQHDCLDILAEAHGTRSDLMDQPLPDADHTWYTDGSSFLQEGQRKAGAAVTTETEVIWARALPAGTSAQRAELIALTQALKMAEGKKLNVYTDSRYAFATAHIHGEIYRRRGWLTSEGKEIKNKDEILALLKALFLPKRLSIIHCPGHQKGNSAEARGNRMADQAAREVATRETPETSTLLAGKRTADGSEFEKRTADGSEFESPKKKAKVE

SEQ ID NO: 2245 - protein, 2091 aa, synthetic construct
MPAAKRVKLDGGDKKYSIGLDIGTNSVGWAVITDEYKVPSKKFKVLGNTDRHSIKKNLIGALLFDSGETAEATRLKRTARRRYTRRKNRICYLQEIFSNEMAKVDDSFFHRLEESFLVEEDKKHERHPIFGNIVDEVAYHEKYPTIYHLRKKLVDSTDKADLRLIYLALAHMIKFRGHFLIEGDLNPDNSDVDKLFIQLVQTYNQLFEENPINASGVDAKAILSARLSKSRRLENLIAQLPGEKKNGLFGNLIALSLGLTPNFKSNFDLAEDAKLQLSKDTYDDDLDNLLAQIGDQYADLFLAAKNLSDAILLSDILRVNTEITKAPLSASMIKRYDEHHQDLTLLKALVRQQLPEKYKEIFFDQSKNGYAGYIDGGASQEEFYKFIKPILEKMDGTEELLVKLNREDLLRKQRTFDNGSIPHQIHLGELHAILRRQEDFYPFLKDNREKIEKILTFRIPYYVGPLARGNSRFAWMTRKSEETITPWNFEEVVDKGASAQSFIERMTNFDKNLPNEKVLPKHSLLYEYFTVYNELTKVKYVTEGMRKPAFLSGEQKKAIVDLLFKTNRKVTVKQLKEDYFKKIECFDSVEISGVEDRFNASLGTYHDLLKIIKDKDFLDNEENEDILEDIVLTLTLFEDREMIEERLKTYAHLFDDKVMKQLKRRRYTGWGRLSRKLINGIRDKQSGKTILDFLKSDGFANRNFMQLIHDDSLTFKEDIQKAQVSGQGDSLHEHIANLAGSPAIKKGILQTVKVVDELVKVMGRHKPENIVIEMARENQTTQKGQKNSRERMKRIEEGIKELGSQILKEHPVENTQLQNEKLYLYYLQNGRDMYVDQELDINRLSDYDVDHIVPQSFLKDDSIDNKVLTRSDKARGKSDNVPSEEVVKKMKNYWRQLLNAKLITQRKFDNLTKAERGGLSELDKAGFIKRQLVETRQITKHVAQILDSRMNTKYDENDKLIREVKVITLKSKLVSDFRKDFQFYKVREINNYHHAHDAYLNAVVGTALIKKYPKLESEFVYGDYKVYDVRKMIAKSEQEIGKATAKYFFYSNIMNFFKTEITLANGEIRKRPLIETNGETGEIVWDKGRDFATVRKVLSMPQVNIVKKTEVQTGGFSKESILPKRNSDKLIARKKDWDPKKYGGFDSPTVAYSVLVVAKVEKGKSKKLKSVKELLGITIMERSSFEKNPIDFLEAKGYKEVKKDLIIKLPKYSLFELENGRKRMLASAGELQKGNELALPSKYVNFLYLASHYEKLKGSPEDNEQKQLFVEQHKHYLDEIIEQISEFSKRVILADANLDKVLSAYNKHRDKPIREQAENIIHLFTLTNLGAPAAFKYFDTTIDRKRYTSTKEVLDATLIHQSITGLYETRIDLSQLGGDGGPAPGGSGGTLNIEDEYRLHETSKEPDVSLGSTWLSDFPQAWAETGGMGLAVRQAPLIIPLKATSTPVSIKQYPMSQEARLGIKPHIQRLLDQGILVPCQSPWNTPLLPVKKPGTNDYRPVQDLREVNKRVEDIHPTVPNPYNLLSGLPPSHQWYTVLDLKDAFFCLRLHPTSQPLFAFEWRDPEMGISGQLTWTRLPQGFKNSPTLFNEALHRDLAGFRIQHPDLILLQYVDDLLLAATSELDCQQGTRALLQTLGDLGYRASAKKAQICQKQVKYLGYLLKEGQRWLTEARKETVMGQPIPKTPRQLREFLGTAGFCRLWIPGFAEMAAPLYPLTKPGTLFNWGPDQQKAFQEIKQALLTAPALGLPDLTKPFELFVDEKQGYAKGVLTQKLGPWRRPVAYLSKKLDPVAAGWPPCLRMVAAIAVLTKDAGKLTMGQPLVILAPHAVEALVKQPPDRWLSNARMTHYQALLLDTDRVQFGPVVALNPATLLPLPEEGLQHDCLDILAEAHGTRSDLMDQPLPDADHTWYTDGSSFLQEGQRKAGAAVTTETEVIWARALPAGTSAQRAELIALTQALKMAEGKKLNVYTDSRYAFATAHIHGEIYRRRGWLTSEGKEIKNKDEILALLKALFLPKRLSIIHCPGHQKGNSAEARGNRMADQAAREVATRETPETSTLLAGKRTADGSEFEKRTADGSEFESPKKKAKVE

SEQ ID NO: 2246 - protein, 2096 aa, synthetic construct
MPAAKRVKLDGGDKKYSIGLDIGTNSVGWAVITDEYKVPSKKFKVLGNTDRHSIKKNLIGALLFDSGETAEATRLKRTARRRYTRRKNRICYLQEIFSNEMAKVDDSFFHRLEESFLVEEDKKHERHPIFGNIVDEVAYHEKYPTIYHLRKKLVDSTDKADLRLIYLALAHMIKFRGHFLIEGDLNPDNSDVDKLFIQLVQTYNQLFEENPINASGVDAKAILSARLSKSRRLENLIAQLPGEKKNGLFGNLIALSLGLTPNFKSNFDLAEDAKLQLSKDTYDDDLDNLLAQIGDQYADLFLAAKNLSDAILLSDILRVNTEITKAPLSASMIKRYDEHHQDLTLLKALVRQQLPEKYKEIFFDQSKNGYAGYIDGGASQEEFYKFIKPILEKMDGTEELLVKLNREDLLRKQRTFDNGSIPHQIHLGELHAILRRQEDFYPFLKDNREKIEKILTFRIPYYVGPLARGNSRFAWMTRKSEETITPWNFEEVVDKGASAQSFIERMTNFDKNLPNEKVLPKHSLLYEYFTVYNELTKVKYVTEGMRKPAFLSGEQKKAIVDLLFKTNRKVTVKQLKEDYFKKIECFDSVEISGVEDRFNASLGTYHDLLKIIKDKDFLDNEENEDILEDIVLTLTLFEDREMIEERLKTYAHLFDDKVMKQLKRRRYTGWGRLSRKLINGIRDKQSGKTILDFLKSDGFANRNFMQLIHDDSLTFKEDIQKAQVSGQGDSLHEHIANLAGSPAIKKGILQTVKVVDELVKVMGRHKPENIVIEMARENQTTQKGQKNSRERMKRIEEGIKELGSQILKEHPVENTQLQNEKLYLYYLQNGRDMYVDQELDINRLSDYDVDHIVPQSFLKDDSIDNKVLTRSDKARGKSDNVPSEEVVKKMKNYWRQLLNAKLITQRKFDNLTKAERGGLSELDKAGFIKRQLVETRQITKHVAQILDSRMNTKYDENDKLIREVKVITLKSKLVSDFRKDFQFYKVREINNYHHAHDAYLNAVVGTALIKKYPKLESEFVYGDYKVYDVRKMIAKSEQEIGKATAKYFFYSNIMNFFKTEITLANGEIRKRPLIETNGETGEIVWDKGRDFATVRKVLSMPQVNIVKKTEVQTGGFSKESILPKRNSDKLIARKKDWDPKKYGGFDSPTVAYSVLVVAKVEKGKSKKLKSVKELLGITIMERSSFEKNPIDFLEAKGYKEVKKDLIIKLPKYSLFELENGRKRMLASAGELQKGNELALPSKYVNFLYLASHYEKLKGSPEDNEQKQLFVEQHKHYLDEIIEQISEFSKRVILADANLDKVLSAYNKHRDKPIREQAENIIHLFTLTNLGAPAAFKYFDTTIDRKRYTSTKEVLDATLIHQSITGLYETRIDLSQLGGDGGGGGGGSEAAAKGGTLNIEDEYRLHETSKEPDVSLGSTWLSDFPQAWAETGGMGLAVRQAPLIIPLKATSTPVSIKQYPMSQEARLGIKPHIQRLLDQGILVPCQSPWNTPLLPVKKPGTNDYRPVQDLREVNKRVEDIHPTVPNPYNLLSGLPPSHQWYTVLDLKDAFFCLRLHPTSQPLFAFEWRDPEMGISGQLTWTRLPQGFKNSPTLFNEALHRDLAGFRIQHPDLILLQYVDDLLLAATSELDCQQGTRALLQTLGDLGYRASAKKAQICQKQVKYLGYLLKEGQRWLTEARKETVMGQPIPKTPRQLREFLGTAGFCRLWIPGFAEMAAPLYPLTKPGTLFNWGPDQQKAFQEIKQALLTAPALGLPDLTKPFELFVDEKQGYAKGVLTQKLGPWRRPVAYLSKKLDPVAAGWPPCLRMVAAIAVLTKDAGKLTMGQPLVILAPHAVEALVKQPPDRWLSNARMTHYQALLLDTDRVQFGPVVALNPATLLPLPEEGLQHDCLDILAEAHGTRSDLMDQPLPDADHTWYTDGSSFLQEGQRKAGAAVTTETEVIWARALPAGTSAQRAELIALTQALKMAEGKKLNVYTDSRYAFATAHIHGEIYRRRGWLTSEGKEIKNKDEILALLKALFLPKRLSIIHCPGHQKGNSAEARGNRMADQAAREVATRETPETSTLLAGKRTADGSEFEKRTADGSEFESPKKKAKVE

SEQ ID NO: 2247 - protein, 2096 aa, synthetic construct
MPAAKRVKLDGGDKKYSIGLDIGTNSVGWAVITDEYKVPSKKFKVLGNTDRHSIKKNLIGALLFDSGETAEATRLKRTARRRYTRRKNRICYLQEIFSNEMAKVDDSFFHRLEESFLVEEDKKHERHPIFGNIVDEVAYHEKYPTIYHLRKKLVDSTDKADLRLIYLALAHMIKFRGHFLIEGDLNPDNSDVDKLFIQLVQTYNQLFEENPINASGVDAKAILSARLSKSRRLENLIAQLPGEKKNGLFGNLIALSLGLTPNFKSNFDLAEDAKLQLSKDTYDDDLDNLLAQIGDQYADLFLAAKNLSDAILLSDILRVNTEITKAPLSASMIKRYDEHHQDLTLLKALVRQQLPEKYKEIFFDQSKNGYAGYIDGGASQEEFYKFIKPILEKMDGTEELLVKLNREDLLRKQRTFDNGSIPHQIHLGELHAILRRQEDFYPFLKDNREKIEKILTFRIPYYVGPLARGNSRFAWMTRKSEETITPWNFEEVVDKGASAQSFIERMTNFDKNLPNEKVLPKHSLLYEYFTVYNELTKVKYVTEGMRKPAFLSGEQKKAIVDLLFKTNRKVTVKQLKEDYFKKIECFDSVEISGVEDRFNASLGTYHDLLKIIKDKDFLDNEENEDILEDIVLTLTLFEDREMIEERLKTYAHLFDDKVMKQLKRRRYTGWGRLSRKLINGIRDKQSGKTILDFLKSDGFANRNFMQLIHDDSLTFKEDIQKAQVSGQGDSLHEHIANLAGSPAIKKGILQTVKVVDELVKVMGRHKPENIVIEMARENQTTQKGQKNSRERMKRIEEGIKELGSQILKEHPVENTQLQNEKLYLYYLQNGRDMYVDQELDINRLSDYDVDHIVPQSFLKDDSIDNKVLTRSDKARGKSDNVPSEEVVKKMKNYWRQLLNAKLITQRKFDNLTKAERGGLSELDKAGFIKRQLVETRQITKHVAQILDSRMNTKYDENDKLIREVKVITLKSKLVSDFRKDFQFYKVREINNYHHAHDAYLNAVVGTALIKKYPKLESEFVYGDYKVYDVRKMIAKSEQEIGKATAKYFFYSNIMNFFKTEITLANGEIRKRPLIETNGETGEIVWDKGRDFATVRKVLSMPQVNIVKKTEVQTGGFSKESILPKRNSDKLIARKKDWDPKKYGGFDSPTVAYSVLVVAKVEKGKSKKLKSVKELLGITIMERSSFEKNPIDFLEAKGYKEVKKDLIIKLPKYSLFELENGRKRMLASAGELQKGNELALPSKYVNFLYLASHYEKLKGSPEDNEQKQLFVEQHKHYLDEIIEQISEFSKRVILADANLDKVLSAYNKHRDKPIREQAENIIHLFTLTNLGAPAAFKYFDTTIDRKRYTSTKEVLDATLIHQSITGLYETRIDLSQLGGDGGPAPAPAPAPAPGGTLNIEDEYRLHETSKEPDVSLGSTWLSDFPQAWAETGGMGLAVRQAPLIIPLKATSTPVSIKQYPMSQEARLGIKPHIQRLLDQGILVPCQSPWNTPLLPVKKPGTNDYRPVQDLREVNKRVEDIHPTVPNPYNLLSGLPPSHQWYTVLDLKDAFFCLRLHPTSQPLFAFEWRDPEMGISGQLTWTRLPQGFKNSPTLFNEALHRDLAGFRIQHPDLILLQYVDDLLLAATSELDCQQGTRALLQTLGDLGYRASAKKAQICQKQVKYLGYLLKEGQRWLTEARKETVMGQPIPKTPRQLREFLGTAGFCRLWIPGFAEMAAPLYPLTKPGTLFNWGPDQQKAFQEIKQALLTAPALGLPDLTKPFELFVDEKQGYAKGVLTQKLGPWRRPVAYLSKKLDPVAAGWPPCLRMVAAIAVLTKDAGKLTMGQPLVILAPHAVEALVKQPPDRWLSNARMTHYQALLLDTDRVQFGPVVALNPATLLPLPEEGLQHDCLDILAEAHGTRSDLMDQPLPDADHTWYTDGSSFLQEGQRKAGAAVTTETEVIWARALPAGTSAQRAELIALTQALKMAEGKKLNVYTDSRYAFATAHIHGEIYRRRGWLTSEGKEIKNKDEILALLKALFLPKRLSIIHCPGHQKGNSAEARGNRMADQAAREVATRETPETSTLLAGKRTADGSEFEKRTADGSEFESPKKKAKVE

SEQ ID NO: 2248 - protein, 2096 aa, synthetic construct
MPAAKRVKLDGGDKKYSIGLDIGTNSVGWAVITDEYKVPSKKFKVLGNTDRHSIKKNLIGALLFDSGETAEATRLKRTARRRYTRRKNRICYLQEIFSNEMAKVDDSFFHRLEESFLVEEDKKHERHPIFGNIVDEVAYHEKYPTIYHLRKKLVDSTDKADLRLIYLALAHMIKFRGHFLIEGDLNPDNSDVDKLFIQLVQTYNQLFEENPINASGVDAKAILSARLSKSRRLENLIAQLPGEKKNGLFGNLIALSLGLTPNFKSNFDLAEDAKLQLSKDTYDDDLDNLLAQIGDQYADLFLAAKNLSDAILLSDILRVNTEITKAPLSASMIKRYDEHHQDLTLLKALVRQQLPEKYKEIFFDQSKNGYAGYIDGGASQEEFYKFIKPILEKMDGTEELLVKLNREDLLRKQRTFDNGSIPHQIHLGELHAILRRQEDFYPFLKDNREKIEKILTFRIPYYVGPLARGNSRFAWMTRKSEETITPWNFEEVVDKGASAQSFIERMTNFDKNLPNEKVLPKHSLLYEYFTVYNELTKVKYVTEGMRKPAFLSGEQKKAIVDLLFKTNRKVTVKQLKEDYFKKIECFDSVEISGVEDRFNASLGTYHDLLKIIKDKDFLDNEENEDILEDIVLTLTLFEDREMIEERLKTYAHLFDDKVMKQLKRRRYTGWGRLSRKLINGIRDKQSGKTILDFLKSDGFANRNFMQLIHDDSLTFKEDIQKAQVSGQGDSLHEHIANLAGSPAIKKGILQTVKVVDELVKVMGRHKPENIVIEMARENQTTQKGQKNSRERMKRIEEGIKELGSQILKEHPVENTQLQNEKLYLYYLQNGRDMYVDQELDINRLSDYDVDHIVPQSFLKDDSIDNKVLTRSDKARGKSDNVPSEEVVKKMKNYWRQLLNAKLITQRKFDNLTKAERGGLSELDKAGFIKRQLVETRQITKHVAQILDSRMNTKYDENDKLIREVKVITLKSKLVSDFRKDFQFYKVREINNYHHAHDAYLNAVVGTALIKKYPKLESEFVYGDYKVYDVRKMIAKSEQEIGKATAKYFFYSNIMNFFKTEITLANGEIRKRPLIETNGETGEIVWDKGRDFATVRKVLSMPQVNIVKKTEVQTGGFSKESILPKRNSDKLIARKKDWDPKKYGGFDSPTVAYSVLVVAKVEKGKSKKLKSVKELLGITIMERSSFEKNPIDFLEAKGYKEVKKDLIIKLPKYSLFELENGRKRMLASAGELQKGNELALPSKYVNFLYLASHYEKLKGSPEDNEQKQLFVEQHKHYLDEIIEQISEFSKRVILADANLDKVLSAYNKHRDKPIREQAENIIHLFTLTNLGAPAAFKYFDTTIDRKRYTSTKEVLDATLIHQSITGLYETRIDLSQLGGDGGPAPGGSEAAAKGGTLNIEDEYRLHETSKEPDVSLGSTWLSDFPQAWAETGGMGLAVRQAPLIIPLKATSTPVSIKQYPMSQEARLGIKPHIQRLLDQGILVPCQSPWNTPLLPVKKPGTNDYRPVQDLREVNKRVEDIHPTVPNPYNLLSGLPPSHQWYTVLDLKDAFFCLRLHPTSQPLFAFEWRDPEMGISGQLTWTRLPQGFKNSPTLFNEALHRDLAGFRIQHPDLILLQYVDDLLLAATSELDCQQGTRALLQTLGDLGYRASAKKAQICQKQVKYLGYLLKEGQRWLTEARKETVMGQPIPKTPRQLREFLGTAGFCRLWIPGFAEMAAPLYPLTKPGTLFNWGPDQQKAFQEIKQALLTAPALGLPDLTKPFELFVDEKQGYAKGVLTQKLGPWRRPVAYLSKKLDPVAAGWPPCLRMVAAIAVLTKDAGKLTMGQPLVILAPHAVEALVKQPPDRWLSNARMTHYQALLLDTDRVQFGPVVALNPATLLPLPEEGLQHDCLDILAEAHGTRSDLMDQPLPDADHTWYTDGSSFLQEGQRKAGAAVTTETEVIWARALPAGTSAQRAELIALTQALKMAEGKKLNVYTDSRYAFATAHIHGEIYRRRGWLTSEGKEIKNKDEILALLKALFLPKRLSIIHCPGHQKGNSAEARGNRMADQAAREVATRETPETSTLLAGKRTADGSEFEKRTADGSEFESPKKKAKVE

SEQ ID NO: 2249 - protein, 2115 aa, synthetic construct
MPAAKRVKLDGGDKKYSIGLDIGTNSVGWAVITDEYKVPSKKFKVLGNTDRHSIKKNLIGALLFDSGETAEATRLKRTARRRYTRRKNRICYLQEIFSNEMAKVDDSFFHRLEESFLVEEDKKHERHPIFGNIVDEVAYHEKYPTIYHLRKKLVDSTDKADLRLIYLALAHMIKFRGHFLIEGDLNPDNSDVDKLFIQLVQTYNQLFEENPINASGVDAKAILSARLSKSRRLENLIAQLPGEKKNGLFGNLIALSLGLTPNFKSNFDLAEDAKLQLSKDTYDDDLDNLLAQIGDQYADLFLAAKNLSDAILLSDILRVNTEITKAPLSASMIKRYDEHHQDLTLLKALVRQQLPEKYKEIFFDQSKNGYAGYIDGGASQEEFYKFIKPILEKMDGTEELLVKLNREDLLRKQRTFDNGSIPHQIHLGELHAILRRQEDFYPFLKDNREKIEKILTFRIPYYVGPLARGNSRFAWMTRKSEETITPWNFEEVVDKGASAQSFIERMTNFDKNLPNEKVLPKHSLLYEYFTVYNELTKVKYVTEGMRKPAFLSGEQKKAIVDLLFKTNRKVTVKQLKEDYFKKIECFDSVEISGVEDRFNASLGTYHDLLKIIKDKDFLDNEENEDILEDIVLTLTLFEDREMIEERLKTYAHLFDDKVMKQLKRRRYTGWGRLSRKLINGIRDKQSGKTILDFLKSDGFANRNFMQLIHDDSLTFKEDIQKAQVSGQGDSLHEHIANLAGSPAIKKGILQTVKVVDELVKVMGRHKPENIVIEMARENQTTQKGQKNSRERMKRIEEGIKELGSQILKEHPVENTQLQNEKLYLYYLQNGRDMYVDQELDINRLSDYDVDHIVPQSFLKDDSIDNKVLTRSDKARGKSDNVPSEEVVKKMKNYWRQLLNAKLITQRKFDNLTKAERGGLSELDKAGFIKRQLVETRQITKHVAQILDSRMNTKYDENDKLIREVKVITLKSKLVSDFRKDFQFYKVREINNYHHAHDAYLNAVVGTALIKKYPKLESEFVYGDYKVYDVRKMIAKSEQEIGKATAKYFFYSNIMNFFKTEITLANGEIRKRPLIETNGETGEIVWDKGRDFATVRKVLSMPQVNIVKKTEVQTGGFSKESILPKRNSDKLIARKKDWDPKKYGGFDSPTVAYSVLVVAKVEKGKSKKLKSVKELLGITIMERSSFEKNPIDFLEAKGYKEVKKDLIIKLPKYSLFELENGRKRMLASAGELQKGNELALPSKYVNFLYLASHYEKLKGSPEDNEQKQLFVEQHKHYLDEIIEQISEFSKRVILADANLDKVLSAYNKHRDKPIREQAENIIHLFTLTNLGAPAAFKYFDTTIDRKRYTSTKEVLDATLIHQSITGLYETRIDLSQLGGDGGEAAAKEAAAKEAAAKEAAAKEAAAKEAAAKGGTLNIEDEYRLHETSKEPDVSLGSTWLSDFPQAWAETGGMGLAVRQAPLIIPLKATSTPVSIKQYPMSQEARLGIKPHIQRLLDQGILVPCQSPWNTPLLPVKKPGTNDYRPVQDLREVNKRVEDIHPTVPNPYNLLSGLPPSHQWYTVLDLKDAFFCLRLHPTSQPLFAFEWRDPEMGISGQLTWTRLPQGFKNSPTLFNEALHRDLAGFRIQHPDLILLQYVDDLLLAATSELDCQQGTRALLQTLGDLGYRASAKKAQICQKQVKYLGYLLKEGQRWLTEARKETVMGQPIPKTPRQLREFLGTAGFCRLWIPGFAEMAAPLYPLTKPGTLFNWGPDQQKAFQEIKQALLTAPALGLPDLTKPFELFVDEKQGYAKGVLTQKLGPWRRPVAYLSKKLDPVAAGWPPCLRMVAAIAVLTKDAGKLTMGQPLVILAPHAVEALVKQPPDRWLSNARMTHYQALLLDTDRVQFGPVVALNPATLLPLPEEGLQHDCLDILAEAHGTRSDLMDQPLPDADHTWYTDGSSFLQEGQRKAGAAVTTETEVIWARALPAGTSAQRAELIALTQALKMAEGKKLNVYTDSRYAFATAHIHGEIYRRRGWLTSEGKEIKNKDEILALLKALFLPKRLSIIHCPGHQKGNSAEARGNRMADQAAREVATRETPETSTLLAGKRTADGSEFEKRTADGSEFESPKKKAKVE

SEQ ID NO: 2250 - protein, 2097 aa, synthetic construct
MPAAKRVKLDGGDKKYSIGLDIGTNSVGWAVITDEYKVPSKKFKVLGNTDRHSIKKNLIGALLFDSGETAEATRLKRTARRRYTRRKNRICYLQEIFSNEMAKVDDSFFHRLEESFLVEEDKKHERHPIFGNIVDEVAYHEKYPTIYHLRKKLVDSTDKADLRLIYLALAHMIKFRGHFLIEGDLNPDNSDVDKLFIQLVQTYNQLFEENPINASGVDAKAILSARLSKSRRLENLIAQLPGEKKNGLFGNLIALSLGLTPNFKSNFDLAEDAKLQLSKDTYDDDLDNLLAQIGDQYADLFLAAKNLSDAILLSDILRVNTEITKAPLSASMIKRYDEHHQDLTLLKALVRQQLPEKYKEIFFDQSKNGYAGYIDGGASQEEFYKFIKPILEKMDGTEELLVKLNREDLLRKQRTFDNGSIPHQIHLGELHAILRRQEDFYPFLKDNREKIEKILTFRIPYYVGPLARGNSRFAWMTRKSEETITPWNFEEVVDKGASAQSFIERMTNFDKNLPNEKVLPKHSLLYEYFTVYNELTKVKYVTEGMRKPAFLSGEQKKAIVDLLFKTNRKVTVKQLKEDYFKKIECFDSVEISGVEDRFNASLGTYHDLLKIIKDKDFLDNEENEDILEDIVLTLTLFEDREMIEERLKTYAHLFDDKVMKQLKRRRYTGWGRLSRKLINGIRDKQSGKTILDFLKSDGFANRNFMQLIHDDSLTFKEDIQKAQVSGQGDSLHEHIANLAGSPAIKKGILQTVKVVDELVKVMGRHKPENIVIEMARENQTTQKGQKNSRERMKRIEEGIKELGSQILKEHPVENTQLQNEKLYLYYLQNGRDMYVDQELDINRLSDYDVDHIVPQSFLKDDSIDNKVLTRSDKARGKSDNVPSEEVVKKMKNYWRQLLNAKLITQRKFDNLTKAERGGLSELDKAGFIKRQLVETRQITKHVAQILDSRMNTKYDENDKLIREVKVITLKSKLVSDFRKDFQFYKVREINNYHHAHDAYLNAVVGTALIKKYPKLESEFVYGDYKVYDVRKMIAKSEQEIGKATAKYFFYSNIMNFFKTEITLANGEIRKRPLIETNGETGEIVWDKGRDFATVRKVLSMPQVNIVKKTEVQTGGFSKESILPKRNSDKLIARKKDWDPKKYGGFDSPTVAYSVLVVAKVEKGKSKKLKSVKELLGITIMERSSFEKNPIDFLEAKGYKEVKKDLIIKLPKYSLFELENGRKRMLASAGELQKGNELALPSKYVNFLYLASHYEKLKGSPEDNEQKQLFVEQHKHYLDEIIEQISEFSKRVILADANLDKVLSAYNKHRDKPIREQAENIIHLFTLTNLGAPAAFKYFDTTIDRKRYTSTKEVLDATLIHQSITGLYETRIDLSQLGGDGGGGSGGSGGSGGSGGTLNIEDEYRLHETSKEPDVSLGSTWLSDFPQAWAETGGMGLAVRQAPLIIPLKATSTPVSIKQYPMSQEARLGIKPHIQRLLDQGILVPCQSPWNTPLLPVKKPGTNDYRPVQDLREVNKRVEDIHPTVPNPYNLLSGLPPSHQWYTVLDLKDAFFCLRLHPTSQPLFAFEWRDPEMGISGQLTWTRLPQGFKNSPTLFNEALHRDLAGFRIQHPDLILLQYVDDLLLAATSELDCQQGTRALLQTLGDLGYRASAKKAQICQKQVKYLGYLLKEGQRWLTEARKETVMGQPIPKTPRQLREFLGTAGFCRLWIPGFAEMAAPLYPLTKPGTLFNWGPDQQKAFQEIKQALLTAPALGLPDLTKPFELFVDEKQGYAKGVLTQKLGPWRRPVAYLSKKLDPVAAGWPPCLRMVAAIAVLTKDAGKLTMGQPLVILAPHAVEALVKQPPDRWLSNARMTHYQALLLDTDRVQFGPVVALNPATLLPLPEEGLQHDCLDILAEAHGTRSDLMDQPLPDADHTWYTDGSSFLQEGQRKAGAAVTTETEVIWARALPAGTSAQRAELIALTQALKMAEGKKLNVYTDSRYAFATAHIHGEIYRRRGWLTSEGKEIKNKDEILALLKALFLPKRLSIIHCPGHQKGNSAEARGNRMADQAAREVATRETPETSTLLAGKRTADGSEFEKRTADGSEFESPKKKAKVE

SEQ ID NO: 2251 - protein, 2096 aa, synthetic construct
MPAAKRVKLDGGDKKYSIGLDIGTNSVGWAVITDEYKVPSKKFKVLGNTDRHSIKKNLIGALLFDSGETAEATRLKRTARRRYTRRKNRICYLQEIFSNEMAKVDDSFFHRLEESFLVEEDKKHERHPIFGNIVDEVAYHEKYPTIYHLRKKLVDSTDKADLRLIYLALAHMIKFRGHFLIEGDLNPDNSDVDKLFIQLVQTYNQLFEENPINASGVDAKAILSARLSKSRRLENLIAQLPGEKKNGLFGNLIALSLGLTPNFKSNFDLAEDAKLQLSKDTYDDDLDNLLAQIGDQYADLFLAAKNLSDAILLSDILRVNTEITKAPLSASMIKRYDEHHQDLTLLKALVRQQLPEKYKEIFFDQSKNGYAGYIDGGASQEEFYKFIKPILEKMDGTEELLVKLNREDLLRKQRTFDNGSIPHQIHLGELHAILRRQEDFYPFLKDNREKIEKILTFRIPYYVGPLARGNSRFAWMTRKSEETITPWNFEEVVDKGASAQSFIERMTNFDKNLPNEKVLPKHSLLYEYFTVYNELTKVKYVTEGMRKPAFLSGEQKKAIVDLLFKTNRKVTVKQLKEDYFKKIECFDSVEISGVEDRFNASLGTYHDLLKIIKDKDFLDNEENEDILEDIVLTLTLFEDREMIEERLKTYAHLFDDKVMKQLKRRRYTGWGRLSRKLINGIRDKQSGKTILDFLKSDGFANRNFMQLIHDDSLTFKEDIQKAQVSGQGDSLHEHIANLAGSPAIKKGILQTVKVVDELVKVMGRHKPENIVIEMARENQTTQKGQKNSRERMKRIEEGIKELGSQILKEHPVENTQLQNEKLYLYYLQNGRDMYVDQELDINRLSDYDVDHIVPQSFLKDDSIDNKVLTRSDKARGKSDNVPSEEVVKKMKNYWRQLLNAKLITQRKFDNLTKAERGGLSELDKAGFIKRQLVETRQITKHVAQILDSRMNTKYDENDKLIREVKVITLKSKLVSDFRKDFQFYKVREINNYHHAHDAYLNAVVGTALIKKYPKLESEFVYGDYKVYDVRKMIAKSEQEIGKATAKYFFYSNIMNFFKTEITLANGEIRKRPLIETNGETGEIVWDKGRDFATVRKVLSMPQVNIVKKTEVQTGGFSKESILPKRNSDKLIARKKDWDPKKYGGFDSPTVAYSVLVVAKVEKGKSKKLKSVKELLGITIMERSSFEKNPIDFLEAKGYKEVKKDLIIKLPKYSLFELENGRKRMLASAGELQKGNELALPSKYVNFLYLASHYEKLKGSPEDNEQKQLFVEQHKHYLDEIIEQISEFSKRVILADANLDKVLSAYNKHRDKPIREQAENIIHLFTLTNLGAPAAFKYFDTTIDRKRYTSTKEVLDATLIHQSITGLYETRIDLSQLGGDGGGGSEAAAKPAPGGTLNIEDEYRLHETSKEPDVSLGSTWLSDFPQAWAETGGMGLAVRQAPLIIPLKATSTPVSIKQYPMSQEARLGIKPHIQRLLDQGILVPCQSPWNTPLLPVKKPGTNDYRPVQDLREVNKRVEDIHPTVPNPYNLLSGLPPSHQWYTVLDLKDAFFCLRLHPTSQPLFAFEWRDPEMGISGQLTWTRLPQGFKNSPTLFNEALHRDLAGFRIQHPDLILLQYVDDLLLAATSELDCQQGTRALLQTLGDLGYRASAKKAQICQKQVKYLGYLLKEGQRWLTEARKETVMGQPIPKTPRQLREFLGTAGFCRLWIPGFAEMAAPLYPLTKPGTLFNWGPDQQKAFQEIKQALLTAPALGLPDLTKPFELFVDEKQGYAKGVLTQKLGPWRRPVAYLSKKLDPVAAGWPPCLRMVAAIAVLTKDAGKLTMGQPLVILAPHAVEALVKQPPDRWLSNARMTHYQALLLDTDRVQFGPVVALNPATLLPLPEEGLQHDCLDILAEAHGTRSDLMDQPLPDADHTWYTDGSSFLQEGQRKAGAAVTTETEVIWARALPAGTSAQRAELIALTQALKMAEGKKLNVYTDSRYAFATAHIHGEIYRRRGWLTSEGKEIKNKDEILALLKALFLPKRLSIIHCPGHQKGNSAEARGNRMADQAAREVATRETPETSTLLAGKRTADGSEFEKRTADGSEFESPKKKAKVE

SEQ ID NO: 2252 - protein, 2100 aa, synthetic construct
MPAAKRVKLDGGDKKYSIGLDIGTNSVGWAVITDEYKVPSKKFKVLGNTDRHSIKKNLIGALLFDSGETAEATRLKRTARRRYTRRKNRICYLQEIFSNEMAKVDDSFFHRLEESFLVEEDKKHERHPIFGNIVDEVAYHEKYPTIYHLRKKLVDSTDKADLRLIYLALAHMIKFRGHFLIEGDLNPDNSDVDKLFIQLVQTYNQLFEENPINASGVDAKAILSARLSKSRRLENLIAQLPGEKKNGLFGNLIALSLGLTPNFKSNFDLAEDAKLQLSKDTYDDDLDNLLAQIGDQYADLFLAAKNLSDAILLSDILRVNTEITKAPLSASMIKRYDEHHQDLTLLKALVRQQLPEKYKEIFFDQSKNGYAGYIDGGASQEEFYKFIKPILEKMDGTEELLVKLNREDLLRKQRTFDNGSIPHQIHLGELHAILRRQEDFYPFLKDNREKIEKILTFRIPYYVGPLARGNSRFAWMTRKSEETITPWNFEEVVDKGASAQSFIERMTNFDKNLPNEKVLPKHSLLYEYFTVYNELTKVKYVTEGMRKPAFLSGEQKKAIVDLLFKTNRKVTVKQLKEDYFKKIECFDSVEISGVEDRFNASLGTYHDLLKIIKDKDFLDNEENEDILEDIVLTLTLFEDREMIEERLKTYAHLFDDKVMKQLKRRRYTGWGRLSRKLINGIRDKQSGKTILDFLKSDGFANRNFMQLIHDDSLTFKEDIQKAQVSGQGDSLHEHIANLAGSPAIKKGILQTVKVVDELVKVMGRHKPENIVIEMARENQTTQKGQKNSRERMKRIEEGIKELGSQILKEHPVENTQLQNEKLYLYYLQNGRDMYVDQELDINRLSDYDVDHIVPQSFLKDDSIDNKVLTRSDKARGKSDNVPSEEVVKKMKNYWRQLLNAKLITQRKFDNLTKAERGGLSELDKAGFIKRQLVETRQITKHVAQILDSRMNTKYDENDKLIREVKVITLKSKLVSDFRKDFQFYKVREINNYHHAHDAYLNAVVGTALIKKYPKLESEFVYGDYKVYDVRKMIAKSEQEIGKATAKYFFYSNIMNFFKTEITLANGEIRKRPLIETNGETGEIVWDKGRDFATVRKVLSMPQVNIVKKTEVQTGGFSKESILPKRNSDKLIARKKDWDPKKYGGFDSPTVAYSVLVVAKVEKGKSKKLKSVKELLGITIMERSSFEKNPIDFLEAKGYKEVKKDLIIKLPKYSLFELENGRKRMLASAGELQKGNELALPSKYVNFLYLASHYEKLKGSPEDNEQKQLFVEQHKHYLDEIIEQISEFSKRVILADANLDKVLSAYNKHRDKPIREQAENIIHLFTLTNLGAPAAFKYFDTTIDRKRYTSTKEVLDATLIHQSITGLYETRIDLSQLGGDGGEAAAKEAAAKEAAAKGGTLNIEDEYRLHETSKEPDVSLGSTWLSDFPQAWAETGGMGLAVRQAPLIIPLKATSTPVSIKQYPMSQEARLGIKPHIQRLLDQGILVPCQSPWNTPLLPVKKPGTNDYRPVQDLREVNKRVEDIHPTVPNPYNLLSGLPPSHQWYTVLDLKDAFFCLRLHPTSQPLFAFEWRDPEMGISGQLTWTRLPQGFKNSPTLFNEALHRDLAGFRIQHPDLILLQYVDDLLLAATSELDCQQGTRALLQTLGDLGYRASAKKAQICQKQVKYLGYLLKEGQRWLTEARKETVMGQPIPKTPRQLREFLGTAGFCRLWIPGFAEMAAPLYPLTKPGTLFNWGPDQQKAFQEIKQALLTAPALGLPDLTKPFELFVDEKQGYAKGVLTQKLGPWRRPVAYLSKKLDPVAAGWPPCLRMVAAIAVLTKDAGKLTMGQPLVILAPHAVEALVKQPPDRWLSNARMTHYQALLLDTDRVQFGPVVALNPATLLPLPEEGLQHDCLDILAEAHGTRSDLMDQPLPDADHTWYTDGSSFLQEGQRKAGAAVTTETEVIWARALPAGTSAQRAELIALTQALKMAEGKKLNVYTDSRYAFATAHIHGEIYRRRGWLTSEGKEIKNKDEILALLKALFLPKRLSIIHCPGHQKGNSAEARGNRMADQAAREVATRETPETSTLLAGKRTADGSEFEKRTADGSEFESPKKKAKVE

SEQ ID NO: 2253 - protein, 2096 aa, synthetic construct
MPAAKRVKLDGGDKKYSIGLDIGTNSVGWAVITDEYKVPSKKFKVLGNTDRHSIKKNLIGALLFDSGETAEATRLKRTARRRYTRRKNRICYLQEIFSNEMAKVDDSFFHRLEESFLVEEDKKHERHPIFGNIVDEVAYHEKYPTIYHLRKKLVDSTDKADLRLIYLALAHMIKFRGHFLIEGDLNPDNSDVDKLFIQLVQTYNQLFEENPINASGVDAKAILSARLSKSRRLENLIAQLPGEKKNGLFGNLIALSLGLTPNFKSNFDLAEDAKLQLSKDTYDDDLDNLLAQIGDQYADLFLAAKNLSDAILLSDILRVNTEITKAPLSASMIKRYDEHHQDLTLLKALVRQQLPEKYKEIFFDQSKNGYAGYIDGGASQEEFYKFIKPILEKMDGTEELLVKLNREDLLRKQRTFDNGSIPHQIHLGELHAILRRQEDFYPFLKDNREKIEKILTFRIPYYVGPLARGNSRFAWMTRKSEETITPWNFEEVVDKGASAQSFIERMTNFDKNLPNEKVLPKHSLLYEYFTVYNELTKVKYVTEGMRKPAFLSGEQKKAIVDLLFKTNRKVTVKQLKEDYFKKIECFDSVEISGVEDRFNASLGTYHDLLKIIKDKDFLDNEENEDILEDIVLTLTLFEDREMIEERLKTYAHLFDDKVMKQLKRRRYTGWGRLSRKLINGIRDKQSGKTILDFLKSDGFANRNFMQLIHDDSLTFKEDIQKAQVSGQGDSLHEHIANLAGSPAIKKGILQTVKVVDELVKVMGRHKPENIVIEMARENQTTQKGQKNSRERMKRIEEGIKELGSQILKEHPVENTQLQNEKLYLYYLQNGRDMYVDQELDINRLSDYDVDHIVPQSFLKDDSIDNKVLTRSDKARGKSDNVPSEEVVKKMKNYWRQLLNAKLITQRKFDNLTKAERGGLSELDKAGFIKRQLVETRQITKHVAQILDSRMNTKYDENDKLIREVKVITLKSKLVSDFRKDFQFYKVREINNYHHAHDAYLNAVVGTALIKKYPKLESEFVYGDYKVYDVRKMIAKSEQEIGKATAKYFFYSNIMNFFKTEITLANGEIRKRPLIETNGETGEIVWDKGRDFATVRKVLSMPQVNIVKKTEVQTGGFSKESILPKRNSDKLIARKKDWDPKKYGGFDSPTVAYSVLVVAKVEKGKSKKLKSVKELLGITIMERSSFEKNPIDFLEAKGYKEVKKDLIIKLPKYSLFELENGRKRMLASAGELQKGNELALPSKYVNFLYLASHYEKLKGSPEDNEQKQLFVEQHKHYLDEIIEQISEFSKRVILADANLDKVLSAYNKHRDKPIREQAENIIHLFTLTNLGAPAAFKYFDTTIDRKRYTSTKEVLDATLIHQSITGLYETRIDLSQLGGDGGPAPEAAAKGSSGGTLNIEDEYRLHETSKEPDVSLGSTWLSDFPQAWAETGGMGLAVRQAPLIIPLKATSTPVSIKQYPMSQEARLGIKPHIQRLLDQGILVPCQSPWNTPLLPVKKPGTNDYRPVQDLREVNKRVEDIHPTVPNPYNLLSGLPPSHQWYTVLDLKDAFFCLRLHPTSQPLFAFEWRDPEMGISGQLTWTRLPQGFKNSPTLFNEALHRDLAGFRIQHPDLILLQYVDDLLLAATSELDCQQGTRALLQTLGDLGYRASAKKAQICQKQVKYLGYLLKEGQRWLTEARKETVMGQPIPKTPRQLREFLGTAGFCRLWIPGFAEMAAPLYPLTKPGTLFNWGPDQQKAFQEIKQALLTAPALGLPDLTKPFELFVDEKQGYAKGVLTQKLGPWRRPVAYLSKKLDPVAAGWPPCLRMVAAIAVLTKDAGKLTMGQPLVILAPHAVEALVKQPPDRWLSNARMTHYQALLLDTDRVQFGPVVALNPATLLPLPEEGLQHDCLDILAEAHGTRSDLMDQPLPDADHTWYTDGSSFLQEGQRKAGAAVTTETEVIWARALPAGTSAQRAELIALTQALKMAEGKKLNVYTDSRYAFATAHIHGEIYRRRGWLTSEGKEIKNKDEILALLKALFLPKRLSIIHCPGHQKGNSAEARGNRMADQAAREVATRETPETSTLLAGKRTADGSEFEKRTADGSEFESPKKKAKVE

SEQ ID NO: 2254 - protein, 2090 aa, synthetic construct
MPAAKRVKLDGGDKKYSIGLDIGTNSVGWAVITDEYKVPSKKFKVLGNTDRHSIKKNLIGALLFDSGETAEATRLKRTARRRYTRRKNRICYLQEIFSNEMAKVDDSFFHRLEESFLVEEDKKHERHPIFGNIVDEVAYHEKYPTIYHLRKKLVDSTDKADLRLIYLALAHMIKFRGHFLIEGDLNPDNSDVDKLFIQLVQTYNQLFEENPINASGVDAKAILSARLSKSRRLENLIAQLPGEKKNGLFGNLIALSLGLTPNFKSNFDLAEDAKLQLSKDTYDDDLDNLLAQIGDQYADLFLAAKNLSDAILLSDILRVNTEITKAPLSASMIKRYDEHHQDLTLLKALVRQQLPEKYKEIFFDQSKNGYAGYIDGGASQEEFYKFIKPILEKMDGTEELLVKLNREDLLRKQRTFDNGSIPHQIHLGELHAILRRQEDFYPFLKDNREKIEKILTFRIPYYVGPLARGNSRFAWMTRKSEETITPWNFEEVVDKGASAQSFIERMTNFDKNLPNEKVLPKHSLLYEYFTVYNELTKVKYVTEGMRKPAFLSGEQKKAIVDLLFKTNRKVTVKQLKEDYFKKIECFDSVEISGVEDRFNASLGTYHDLLKIIKDKDFLDNEENEDILEDIVLTLTLFEDREMIEERLKTYAHLFDDKVMKQLKRRRYTGWGRLSRKLINGIRDKQSGKTILDFLKSDGFANRNFMQLIHDDSLTFKEDIQKAQVSGQGDSLHEHIANLAGSPAIKKGILQTVKVVDELVKVMGRHKPENIVIEMARENQTTQKGQKNSRERMKRIEEGIKELGSQILKEHPVENTQLQNEKLYLYYLQNGRDMYVDQELDINRLSDYDVDHIVPQSFLKDDSIDNKVLTRSDKARGKSDNVPSEEVVKKMKNYWRQLLNAKLITQRKFDNLTKAERGGLSELDKAGFIKRQLVETRQITKHVAQILDSRMNTKYDENDKLIREVKVITLKSKLVSDFRKDFQFYKVREINNYHHAHDAYLNAVVGTALIKKYPKLESEFVYGDYKVYDVRKMIAKSEQEIGKATAKYFFYSNIMNFFKTEITLANGEIRKRPLIETNGETGEIVWDKGRDFATVRKVLSMPQVNIVKKTEVQTGGFSKESILPKRNSDKLIARKKDWDPKKYGGFDSPTVAYSVLVVAKVEKGKSKKLKSVKELLGITIMERSSFEKNPIDFLEAKGYKEVKKDLIIKLPKYSLFELENGRKRMLASAGELQKGNELALPSKYVNFLYLASHYEKLKGSPEDNEQKQLFVEQHKHYLDEIIEQISEFSKRVILADANLDKVLSAYNKHRDKPIREQAENIIHLFTLTNLGAPAAFKYFDTTIDRKRYTSTKEVLDATLIHQSITGLYETRIDLSQLGGDGGGGGGGGGTLNIEDEYRLHETSKEPDVSLGSTWLSDFPQAWAETGGMGLAVRQAPLIIPLKATSTPVSIKQYPMSQEARLGIKPHIQRLLDQGILVPCQSPWNTPLLPVKKPGTNDYRPVQDLREVNKRVEDIHPTVPNPYNLLSGLPPSHQWYTVLDLKDAFFCLRLHPTSQPLFAFEWRDPEMGISGQLTWTRLPQGFKNSPTLFNEALHRDLAGFRIQHPDLILLQYVDDLLLAATSELDCQQGTRALLQTLGDLGYRASAKKAQICQKQVKYLGYLLKEGQRWLTEARKETVMGQPIPKTPRQLREFLGTAGFCRLWIPGFAEMAAPLYPLTKPGTLFNWGPDQQKAFQEIKQALLTAPALGLPDLTKPFELFVDEKQGYAKGVLTQKLGPWRRPVAYLSKKLDPVAAGWPPCLRMVAAIAVLTKDAGKLTMGQPLVILAPHAVEALVKQPPDRWLSNARMTHYQALLLDTDRVQFGPVVALNPATLLPLPEEGLQHDCLDILAEAHGTRSDLMDQPLPDADHTWYTDGSSFLQEGQRKAGAAVTTETEVIWARALPAGTSAQRAELIALTQALKMAEGKKLNVYTDSRYAFATAHIHGEIYRRRGWLTSEGKEIKNKDEILALLKALFLPKRLSIIHCPGHQKGNSAEARGNRMADQAAREVATRETPETSTLLAGKRTADGSEFEKRTADGSEFESPKKKAKVE

SEQ ID NO: 2255 - protein, 2096 aa, synthetic construct
MPAAKRVKLDGGDKKYSIGLDIGTNSVGWAVITDEYKVPSKKFKVLGNTDRHSIKKNLIGALLFDSGETAEATRLKRTARRRYTRRKNRICYLQEIFSNEMAKVDDSFFHRLEESFLVEEDKKHERHPIFGNIVDEVAYHEKYPTIYHLRKKLVDSTDKADLRLIYLALAHMIKFRGHFLIEGDLNPDNSDVDKLFIQLVQTYNQLFEENPINASGVDAKAILSARLSKSRRLENLIAQLPGEKKNGLFGNLIALSLGLTPNFKSNFDLAEDAKLQLSKDTYDDDLDNLLAQIGDQYADLFLAAKNLSDAILLSDILRVNTEITKAPLSASMIKRYDEHHQDLTLLKALVRQQLPEKYKEIFFDQSKNGYAGYIDGGASQEEFYKFIKPILEKMDGTEELLVKLNREDLLRKQRTFDNGSIPHQIHLGELHAILRRQEDFYPFLKDNREKIEKILTFRIPYYVGPLARGNSRFAWMTRKSEETITPWNFEEVVDKGASAQSFIERMTNFDKNLPNEKVLPKHSLLYEYFTVYNELTKVKYVTEGMRKPAFLSGEQKKAIVDLLFKTNRKVTVKQLKEDYFKKIECFDSVEISGVEDRFNASLGTYHDLLKIIKDKDFLDNEENEDILEDIVLTLTLFEDREMIEERLKTYAHLFDDKVMKQLKRRRYTGWGRLSRKLINGIRDKQSGKTILDFLKSDGFANRNFMQLIHDDSLTFKEDIQKAQVSGQGDSLHEHIANLAGSPAIKKGILQTVKVVDELVKVMGRHKPENIVIEMARENQTTQKGQKNSRERMKRIEEGIKELGSQILKEHPVENTQLQNEKLYLYYLQNGRDMYVDQELDINRLSDYDVDHIVPQSFLKDDSIDNKVLTRSDKARGKSDNVPSEEVVKKMKNYWRQLLNAKLITQRKFDNLTKAERGGLSELDKAGFIKRQLVETRQITKHVAQILDSRMNTKYDENDKLIREVKVITLKSKLVSDFRKDFQFYKVREINNYHHAHDAYLNAVVGTALIKKYPKLESEFVYGDYKVYDVRKMIAKSEQEIGKATAKYFFYSNIMNFFKTEITLANGEIRKRPLIETNGETGEIVWDKGRDFATVRKVLSMPQVNIVKKTEVQTGGFSKESILPKRNSDKLIARKKDWDPKKYGGFDSPTVAYSVLVVAKVEKGKSKKLKSVKELLGITIMERSSFEKNPIDFLEAKGYKEVKKDLIIKLPKYSLFELENGRKRMLASAGELQKGNELALPSKYVNFLYLASHYEKLKGSPEDNEQKQLFVEQHKHYLDEIIEQISEFSKRVILADANLDKVLSAYNKHRDKPIREQAENIIHLFTLTNLGAPAAFKYFDTTIDRKRYTSTKEVLDATLIHQSITGLYETRIDLSQLGGDGGEAAAKPAPGSSGGTLNIEDEYRLHETSKEPDVSLGSTWLSDFPQAWAETGGMGLAVRQAPLIIPLKATSTPVSIKQYPMSQEARLGIKPHIQRLLDQGILVPCQSPWNTPLLPVKKPGTNDYRPVQDLREVNKRVEDIHPTVPNPYNLLSGLPPSHQWYTVLDLKDAFFCLRLHPTSQPLFAFEWRDPEMGISGQLTWTRLPQGFKNSPTLFNEALHRDLAGFRIQHPDLILLQYVDDLLLAATSELDCQQGTRALLQTLGDLGYRASAKKAQICQKQVKYLGYLLKEGQRWLTEARKETVMGQPIPKTPRQLREFLGTAGFCRLWIPGFAEMAAPLYPLTKPGTLFNWGPDQQKAFQEIKQALLTAPALGLPDLTKPFELFVDEKQGYAKGVLTQKLGPWRRPVAYLSKKLDPVAAGWPPCLRMVAAIAVLTKDAGKLTMGQPLVILAPHAVEALVKQPPDRWLSNARMTHYQALLLDTDRVQFGPVVALNPATLLPLPEEGLQHDCLDILAEAHGTRSDLMDQPLPDADHTWYTDGSSFLQEGQRKAGAAVTTETEVIWARALPAGTSAQRAELIALTQALKMAEGKKLNVYTDSRYAFATAHIHGEIYRRRGWLTSEGKEIKNKDEILALLKALFLPKRLSIIHCPGHQKGNSAEARGNRMADQAAREVATRETPETSTLLAGKRTADGSEFEKRTADGSEFESPKKKAKVE

SEQ ID NO: 2256 - protein, 2096 aa, synthetic construct
MPAAKRVKLDGGDKKYSIGLDIGTNSVGWAVITDEYKVPSKKFKVLGNTDRHSIKKNLIGALLFDSGETAEATRLKRTARRRYTRRKNRICYLQEIFSNEMAKVDDSFFHRLEESFLVEEDKKHERHPIFGNIVDEVAYHEKYPTIYHLRKKLVDSTDKADLRLIYLALAHMIKFRGHFLIEGDLNPDNSDVDKLFIQLVQTYNQLFEENPINASGVDAKAILSARLSKSRRLENLIAQLPGEKKNGLFGNLIALSLGLTPNFKSNFDLAEDAKLQLSKDTYDDDLDNLLAQIGDQYADLFLAAKNLSDAILLSDILRVNTEITKAPLSASMIKRYDEHHQDLTLLKALVRQQLPEKYKEIFFDQSKNGYAGYIDGGASQEEFYKFIKPILEKMDGTEELLVKLNREDLLRKQRTFDNGSIPHQIHLGELHAILRRQEDFYPFLKDNREKIEKILTFRIPYYVGPLARGNSRFAWMTRKSEETITPWNFEEVVDKGASAQSFIERMTNFDKNLPNEKVLPKHSLLYEYFTVYNELTKVKYVTEGMRKPAFLSGEQKKAIVDLLFKTNRKVTVKQLKEDYFKKIECFDSVEISGVEDRFNASLGTYHDLLKIIKDKDFLDNEENEDILEDIVLTLTLFEDREMIEERLKTYAHLFDDKVMKQLKRRRYTGWGRLSRKLINGIRDKQSGKTILDFLKSDGFANRNFMQLIHDDSLTFKEDIQKAQVSGQGDSLHEHIANLAGSPAIKKGILQTVKVVDELVKVMGRHKPENIVIEMARENQTTQKGQKNSRERMKRIEEGIKELGSQILKEHPVENTQLQNEKLYLYYLQNGRDMYVDQELDINRLSDYDVDHIVPQSFLKDDSIDNKVLTRSDKARGKSDNVPSEEVVKKMKNYWRQLLNAKLITQRKFDNLTKAERGGLSELDKAGFIKRQLVETRQITKHVAQILDSRMNTKYDENDKLIREVKVITLKSKLVSDFRKDFQFYKVREINNYHHAHDAYLNAVVGTALIKKYPKLESEFVYGDYKVYDVRKMIAKSEQEIGKATAKYFFYSNIMNFFKTEITLANGEIRKRPLIETNGETGEIVWDKGRDFATVRKVLSMPQVNIVKKTEVQTGGFSKESILPKRNSDKLIARKKDWDPKKYGGFDSPTVAYSVLVVAKVEKGKSKKLKSVKELLGITIMERSSFEKNPIDFLEAKGYKEVKKDLIIKLPKYSLFELENGRKRMLASAGELQKGNELALPSKYVNFLYLASHYEKLKGSPEDNEQKQLFVEQHKHYLDEIIEQISEFSKRVILADANLDKVLSAYNKHRDKPIREQAENIIHLFTLTNLGAPAAFKYFDTTIDRKRYTSTKEVLDATLIHQSITGLYETRIDLSQLGGDGGEAAAKGGGGGSGGTLNIEDEYRLHETSKEPDVSLGSTWLSDFPQAWAETGGMGLAVRQAPLIIPLKATSTPVSIKQYPMSQEARLGIKPHIQRLLDQGILVPCQSPWNTPLLPVKKPGTNDYRPVQDLREVNKRVEDIHPTVPNPYNLLSGLPPSHQWYTVLDLKDAFFCLRLHPTSQPLFAFEWRDPEMGISGQLTWTRLPQGFKNSPTLFNEALHRDLAGFRIQHPDLILLQYVDDLLLAATSELDCQQGTRALLQTLGDLGYRASAKKAQICQKQVKYLGYLLKEGQRWLTEARKETVMGQPIPKTPRQLREFLGTAGFCRLWIPGFAEMAAPLYPLTKPGTLFNWGPDQQKAFQEIKQALLTAPALGLPDLTKPFELFVDEKQGYAKGVLTQKLGPWRRPVAYLSKKLDPVAAGWPPCLRMVAAIAVLTKDAGKLTMGQPLVILAPHAVEALVKQPPDRWLSNARMTHYQALLLDTDRVQFGPVVALNPATLLPLPEEGLQHDCLDILAEAHGTRSDLMDQPLPDADHTWYTDGSSFLQEGQRKAGAAVTTETEVIWARALPAGTSAQRAELIALTQALKMAEGKKLNVYTDSRYAFATAHIHGEIYRRRGWLTSEGKEIKNKDEILALLKALFLPKRLSIIHCPGHQKGNSAEARGNRMADQAAREVATRETPETSTLLAGKRTADGSEFEKRTADGSEFESPKKKAKVE

SEQ ID NO: 2257 - protein, 2096 aa, synthetic construct
MPAAKRVKLDGGDKKYSIGLDIGTNSVGWAVITDEYKVPSKKFKVLGNTDRHSIKKNLIGALLFDSGETAEATRLKRTARRRYTRRKNRICYLQEIFSNEMAKVDDSFFHRLEESFLVEEDKKHERHPIFGNIVDEVAYHEKYPTIYHLRKKLVDSTDKADLRLIYLALAHMIKFRGHFLIEGDLNPDNSDVDKLFIQLVQTYNQLFEENPINASGVDAKAILSARLSKSRRLENLIAQLPGEKKNGLFGNLIALSLGLTPNFKSNFDLAEDAKLQLSKDTYDDDLDNLLAQIGDQYADLFLAAKNLSDAILLSDILRVNTEITKAPLSASMIKRYDEHHQDLTLLKALVRQQLPEKYKEIFFDQSKNGYAGYIDGGASQEEFYKFIKPILEKMDGTEELLVKLNREDLLRKQRTFDNGSIPHQIHLGELHAILRRQEDFYPFLKDNREKIEKILTFRIPYYVGPLARGNSRFAWMTRKSEETITPWNFEEVVDKGASAQSFIERMTNFDKNLPNEKVLPKHSLLYEYFTVYNELTKVKYVTEGMRKPAFLSGEQKKAIVDLLFKTNRKVTVKQLKEDYFKKIECFDSVEISGVEDRFNASLGTYHDLLKIIKDKDFLDNEENEDILEDIVLTLTLFEDREMIEERLKTYAHLFDDKVMKQLKRRRYTGWGRLSRKLINGIRDKQSGKTILDFLKSDGFANRNFMQLIHDDSLTFKEDIQKAQVSGQGDSLHEHIANLAGSPAIKKGILQTVKVVDELVKVMGRHKPENIVIEMARENQTTQKGQKNSRERMKRIEEGIKELGSQILKEHPVENTQLQNEKLYLYYLQNGRDMYVDQELDINRLSDYDVDHIVPQSFLKDDSIDNKVLTRSDKARGKSDNVPSEEVVKKMKNYWRQLLNAKLITQRKFDNLTKAERGGLSELDKAGFIKRQLVETRQITKHVAQILDSRMNTKYDENDKLIREVKVITLKSKLVSDFRKDFQFYKVREINNYHHAHDAYLNAVVGTALIKKYPKLESEFVYGDYKVYDVRKMIAKSEQEIGKATAKYFFYSNIMNFFKTEITLANGEIRKRPLIETNGETGEIVWDKGRDFATVRKVLSMPQVNIVKKTEVQTGGFSKESILPKRNSDKLIARKKDWDPKKYGGFDSPTVAYSVLVVAKVEKGKSKKLKSVKELLGITIMERSSFEKNPIDFLEAKGYKEVKKDLIIKLPKYSLFELENGRKRMLASAGELQKGNELALPSKYVNFLYLASHYEKLKGSPEDNEQKQLFVEQHKHYLDEIIEQISEFSKRVILADANLDKVLSAYNKHRDKPIREQAENIIHLFTLTNLGAPAAFKYFDTTIDRKRYTSTKEVLDATLIHQSITGLYETRIDLSQLGGDGGEAAAKGGSPAPGGTLNIEDEYRLHETSKEPDVSLGSTWLSDFPQAWAETGGMGLAVRQAPLIIPLKATSTPVSIKQYPMSQEARLGIKPHIQRLLDQGILVPCQSPWNTPLLPVKKPGTNDYRPVQDLREVNKRVEDIHPTVPNPYNLLSGLPPSHQWYTVLDLKDAFFCLRLHPTSQPLFAFEWRDPEMGISGQLTWTRLPQGFKNSPTLFNEALHRDLAGFRIQHPDLILLQYVDDLLLAATSELDCQQGTRALLQTLGDLGYRASAKKAQICQKQVKYLGYLLKEGQRWLTEARKETVMGQPIPKTPRQLREFLGTAGFCRLWIPGFAEMAAPLYPLTKPGTLFNWGPDQQKAFQEIKQALLTAPALGLPDLTKPFELFVDEKQGYAKGVLTQKLGPWRRPVAYLSKKLDPVAAGWPPCLRMVAAIAVLTKDAGKLTMGQPLVILAPHAVEALVKQPPDRWLSNARMTHYQALLLDTDRVQFGPVVALNPATLLPLPEEGLQHDCLDILAEAHGTRSDLMDQPLPDADHTWYTDGSSFLQEGQRKAGAAVTTETEVIWARALPAGTSAQRAELIALTQALKMAEGKKLNVYTDSRYAFATAHIHGEIYRRRGWLTSEGKEIKNKDEILALLKALFLPKRLSIIHCPGHQKGNSAEARGNRMADQAAREVATRETPETSTLLAGKRTADGSEFEKRTADGSEFESPKKKAKVE

SEQ ID NO: 2258 - protein, 2088 aa, synthetic construct
MPAAKRVKLDGGDKKYSIGLDIGTNSVGWAVITDEYKVPSKKFKVLGNTDRHSIKKNLIGALLFDSGETAEATRLKRTARRRYTRRKNRICYLQEIFSNEMAKVDDSFFHRLEESFLVEEDKKHERHPIFGNIVDEVAYHEKYPTIYHLRKKLVDSTDKADLRLIYLALAHMIKFRGHFLIEGDLNPDNSDVDKLFIQLVQTYNQLFEENPINASGVDAKAILSARLSKSRRLENLIAQLPGEKKNGLFGNLIALSLGLTPNFKSNFDLAEDAKLQLSKDTYDDDLDNLLAQIGDQYADLFLAAKNLSDAILLSDILRVNTEITKAPLSASMIKRYDEHHQDLTLLKALVRQQLPEKYKEIFFDQSKNGYAGYIDGGASQEEFYKFIKPILEKMDGTEELLVKLNREDLLRKQRTFDNGSIPHQIHLGELHAILRRQEDFYPFLKDNREKIEKILTFRIPYYVGPLARGNSRFAWMTRKSEETITPWNFEEVVDKGASAQSFIERMTNFDKNLPNEKVLPKHSLLYEYFTVYNELTKVKYVTEGMRKPAFLSGEQKKAIVDLLFKTNRKVTVKQLKEDYFKKIECFDSVEISGVEDRFNASLGTYHDLLKIIKDKDFLDNEENEDILEDIVLTLTLFEDREMIEERLKTYAHLFDDKVMKQLKRRRYTGWGRLSRKLINGIRDKQSGKTILDFLKSDGFANRNFMQLIHDDSLTFKEDIQKAQVSGQGDSLHEHIANLAGSPAIKKGILQTVKVVDELVKVMGRHKPENIVIEMARENQTTQKGQKNSRERMKRIEEGIKELGSQILKEHPVENTQLQNEKLYLYYLQNGRDMYVDQELDINRLSDYDVDHIVPQSFLKDDSIDNKVLTRSDKARGKSDNVPSEEVVKKMKNYWRQLLNAKLITQRKFDNLTKAERGGLSELDKAGFIKRQLVETRQITKHVAQILDSRMNTKYDENDKLIREVKVITLKSKLVSDFRKDFQFYKVREINNYHHAHDAYLNAVVGTALIKKYPKLESEFVYGDYKVYDVRKMIAKSEQEIGKATAKYFFYSNIMNFFKTEITLANGEIRKRPLIETNGETGEIVWDKGRDFATVRKVLSMPQVNIVKKTEVQTGGFSKESILPKRNSDKLIARKKDWDPKKYGGFDSPTVAYSVLVVAKVEKGKSKKLKSVKELLGITIMERSSFEKNPIDFLEAKGYKEVKKDLIIKLPKYSLFELENGRKRMLASAGELQKGNELALPSKYVNFLYLASHYEKLKGSPEDNEQKQLFVEQHKHYLDEIIEQISEFSKRVILADANLDKVLSAYNKHRDKPIREQAENIIHLFTLTNLGAPAAFKYFDTTIDRKRYTSTKEVLDATLIHQSITGLYETRIDLSQLGGDGGPAPGGTLNIEDEYRLHETSKEPDVSLGSTWLSDFPQAWAETGGMGLAVRQAPLIIPLKATSTPVSIKQYPMSQEARLGIKPHIQRLLDQGILVPCQSPWNTPLLPVKKPGTNDYRPVQDLREVNKRVEDIHPTVPNPYNLLSGLPPSHQWYTVLDLKDAFFCLRLHPTSQPLFAFEWRDPEMGISGQLTWTRLPQGFKNSPTLFNEALHRDLAGFRIQHPDLILLQYVDDLLLAATSELDCQQGTRALLQTLGDLGYRASAKKAQICQKQVKYLGYLLKEGQRWLTEARKETVMGQPIPKTPRQLREFLGTAGFCRLWIPGFAEMAAPLYPLTKPGTLFNWGPDQQKAFQEIKQALLTAPALGLPDLTKPFELFVDEKQGYAKGVLTQKLGPWRRPVAYLSKKLDPVAAGWPPCLRMVAAIAVLTKDAGKLTMGQPLVILAPHAVEALVKQPPDRWLSNARMTHYQALLLDTDRVQFGPVVALNPATLLPLPEEGLQHDCLDILAEAHGTRSDLMDQPLPDADHTWYTDGSSFLQEGQRKAGAAVTTETEVIWARALPAGTSAQRAELIALTQALKMAEGKKLNVYTDSRYAFATAHIHGEIYRRRGWLTSEGKEIKNKDEILALLKALFLPKRLSIIHCPGHQKGNSAEARGNRMADQAAREVATRETPETSTLLAGKRTADGSEFEKRTADGSEFESPKKKAKVE

SEQ ID NO: 2259 - protein, 2094 aa, synthetic construct
MPAAKRVKLDGGDKKYSIGLDIGTNSVGWAVITDEYKVPSKKFKVLGNTDRHSIKKNLIGALLFDSGETAEATRLKRTARRRYTRRKNRICYLQEIFSNEMAKVDDSFFHRLEESFLVEEDKKHERHPIFGNIVDEVAYHEKYPTIYHLRKKLVDSTDKADLRLIYLALAHMIKFRGHFLIEGDLNPDNSDVDKLFIQLVQTYNQLFEENPINASGVDAKAILSARLSKSRRLENLIAQLPGEKKNGLFGNLIALSLGLTPNFKSNFDLAEDAKLQLSKDTYDDDLDNLLAQIGDQYADLFLAAKNLSDAILLSDILRVNTEITKAPLSASMIKRYDEHHQDLTLLKALVRQQLPEKYKEIFFDQSKNGYAGYIDGGASQEEFYKFIKPILEKMDGTEELLVKLNREDLLRKQRTFDNGSIPHQIHLGELHAILRRQEDFYPFLKDNREKIEKILTFRIPYYVGPLARGNSRFAWMTRKSEETITPWNFEEVVDKGASAQSFIERMTNFDKNLPNEKVLPKHSLLYEYFTVYNELTKVKYVTEGMRKPAFLSGEQKKAIVDLLFKTNRKVTVKQLKEDYFKKIECFDSVEISGVEDRFNASLGTYHDLLKIIKDKDFLDNEENEDILEDIVLTLTLFEDREMIEERLKTYAHLFDDKVMKQLKRRRYTGWGRLSRKLINGIRDKQSGKTILDFLKSDGFANRNFMQLIHDDSLTFKEDIQKAQVSGQGDSLHEHIANLAGSPAIKKGILQTVKVVDELVKVMGRHKPENIVIEMARENQTTQKGQKNSRERMKRIEEGIKELGSQILKEHPVENTQLQNEKLYLYYLQNGRDMYVDQELDINRLSDYDVDHIVPQSFLKDDSIDNKVLTRSDKARGKSDNVPSEEVVKKMKNYWRQLLNAKLITQRKFDNLTKAERGGLSELDKAGFIKRQLVETRQITKHVAQILDSRMNTKYDENDKLIREVKVITLKSKLVSDFRKDFQFYKVREINNYHHAHDAYLNAVVGTALIKKYPKLESEFVYGDYKVYDVRKMIAKSEQEIGKATAKYFFYSNIMNFFKTEITLANGEIRKRPLIETNGETGEIVWDKGRDFATVRKVLSMPQVNIVKKTEVQTGGFSKESILPKRNSDKLIARKKDWDPKKYGGFDSPTVAYSVLVVAKVEKGKSKKLKSVKELLGITIMERSSFEKNPIDFLEAKGYKEVKKDLIIKLPKYSLFELENGRKRMLASAGELQKGNELALPSKYVNFLYLASHYEKLKGSPEDNEQKQLFVEQHKHYLDEIIEQISEFSKRVILADANLDKVLSAYNKHRDKPIREQAENIIHLFTLTNLGAPAAFKYFDTTIDRKRYTSTKEVLDATLIHQSITGLYETRIDLSQLGGDGGGGSGGGPAPGGTLNIEDEYRLHETSKEPDVSLGSTWLSDFPQAWAETGGMGLAVRQAPLIIPLKATSTPVSIKQYPMSQEARLGIKPHIQRLLDQGILVPCQSPWNTPLLPVKKPGTNDYRPVQDLREVNKRVEDIHPTVPNPYNLLSGLPPSHQWYTVLDLKDAFFCLRLHPTSQPLFAFEWRDPEMGISGQLTWTRLPQGFKNSPTLFNEALHRDLAGFRIQHPDLILLQYVDDLLLAATSELDCQQGTRALLQTLGDLGYRASAKKAQICQKQVKYLGYLLKEGQRWLTEARKETVMGQPIPKTPRQLREFLGTAGFCRLWIPGFAEMAAPLYPLTKPGTLFNWGPDQQKAFQEIKQALLTAPALGLPDLTKPFELFVDEKQGYAKGVLTQKLGPWRRPVAYLSKKLDPVAAGWPPCLRMVAAIAVLTKDAGKLTMGQPLVILAPHAVEALVKQPPDRWLSNARMTHYQALLLDTDRVQFGPVVALNPATLLPLPEEGLQHDCLDILAEAHGTRSDLMDQPLPDADHTWYTDGSSFLQEGQRKAGAAVTTETEVIWARALPAGTSAQRAELIALTQALKMAEGKKLNVYTDSRYAFATAHIHGEIYRRRGWLTSEGKEIKNKDEILALLKALFLPKRLSIIHCPGHQKGNSAEARGNRMADQAAREVATRETPETSTLLAGKRTADGSEFEKRTADGSEFESPKKKAKVE

SEQ ID NO: 2260 - protein, 2094 aa, synthetic construct
MPAAKRVKLDGGDKKYSIGLDIGTNSVGWAVITDEYKVPSKKFKVLGNTDRHSIKKNLIGALLFDSGETAEATRLKRTARRRYTRRKNRICYLQEIFSNEMAKVDDSFFHRLEESFLVEEDKKHERHPIFGNIVDEVAYHEKYPTIYHLRKKLVDSTDKADLRLIYLALAHMIKFRGHFLIEGDLNPDNSDVDKLFIQLVQTYNQLFEENPINASGVDAKAILSARLSKSRRLENLIAQLPGEKKNGLFGNLIALSLGLTPNFKSNFDLAEDAKLQLSKDTYDDDLDNLLAQIGDQYADLFLAAKNLSDAILLSDILRVNTEITKAPLSASMIKRYDEHHQDLTLLKALVRQQLPEKYKEIFFDQSKNGYAGYIDGGASQEEFYKFIKPILEKMDGTEELLVKLNREDLLRKQRTFDNGSIPHQIHLGELHAILRRQEDFYPFLKDNREKIEKILTFRIPYYVGPLARGNSRFAWMTRKSEETITPWNFEEVVDKGASAQSFIERMTNFDKNLPNEKVLPKHSLLYEYFTVYNELTKVKYVTEGMRKPAFLSGEQKKAIVDLLFKTNRKVTVKQLKEDYFKKIECFDSVEISGVEDRFNASLGTYHDLLKIIKDKDFLDNEENEDILEDIVLTLTLFEDREMIEERLKTYAHLFDDKVMKQLKRRRYTGWGRLSRKLINGIRDKQSGKTILDFLKSDGFANRNFMQLIHDDSLTFKEDIQKAQVSGQGDSLHEHIANLAGSPAIKKGILQTVKVVDELVKVMGRHKPENIVIEMARENQTTQKGQKNSRERMKRIEEGIKELGSQILKEHPVENTQLQNEKLYLYYLQNGRDMYVDQELDINRLSDYDVDHIVPQSFLKDDSIDNKVLTRSDKARGKSDNVPSEEVVKKMKNYWRQLLNAKLITQRKFDNLTKAERGGLSELDKAGFIKRQLVETRQITKHVAQILDSRMNTKYDENDKLIREVKVITLKSKLVSDFRKDFQFYKVREINNYHHAHDAYLNAVVGTALIKKYPKLESEFVYGDYKVYDVRKMIAKSEQEIGKATAKYFFYSNIMNFFKTEITLANGEIRKRPLIETNGETGEIVWDKGRDFATVRKVLSMPQVNIVKKTEVQTGGFSKESILPKRNSDKLIARKKDWDPKKYGGFDSPTVAYSVLVVAKVEKGKSKKLKSVKELLGITIMERSSFEKNPIDFLEAKGYKEVKKDLIIKLPKYSLFELENGRKRMLASAGELQKGNELALPSKYVNFLYLASHYEKLKGSPEDNEQKQLFVEQHKHYLDEIIEQISEFSKRVILADANLDKVLSAYNKHRDKPIREQAENIIHLFTLTNLGAPAAFKYFDTTIDRKRYTSTKEVLDATLIHQSITGLYETRIDLSQLGGDGGGGSPAPGSSGGTLNIEDEYRLHETSKEPDVSLGSTWLSDFPQAWAETGGMGLAVRQAPLIIPLKATSTPVSIKQYPMSQEARLGIKPHIQRLLDQGILVPCQSPWNTPLLPVKKPGTNDYRPVQDLREVNKRVEDIHPTVPNPYNLLSGLPPSHQWYTVLDLKDAFFCLRLHPTSQPLFAFEWRDPEMGISGQLTWTRLPQGFKNSPTLFNEALHRDLAGFRIQHPDLILLQYVDDLLLAATSELDCQQGTRALLQTLGDLGYRASAKKAQICQKQVKYLGYLLKEGQRWLTEARKETVMGQPIPKTPRQLREFLGTAGFCRLWIPGFAEMAAPLYPLTKPGTLFNWGPDQQKAFQEIKQALLTAPALGLPDLTKPFELFVDEKQGYAKGVLTQKLGPWRRPVAYLSKKLDPVAAGWPPCLRMVAAIAVLTKDAGKLTMGQPLVILAPHAVEALVKQPPDRWLSNARMTHYQALLLDTDRVQFGPVVALNPATLLPLPEEGLQHDCLDILAEAHGTRSDLMDQPLPDADHTWYTDGSSFLQEGQRKAGAAVTTETEVIWARALPAGTSAQRAELIALTQALKMAEGKKLNVYTDSRYAFATAHIHGEIYRRRGWLTSEGKEIKNKDEILALLKALFLPKRLSIIHCPGHQKGNSAEARGNRMADQAAREVATRETPETSTLLAGKRTADGSEFEKRTADGSEFESPKKKAKVE

SEQ ID NO: 2261 - protein, 2096 aa, synthetic construct
MPAAKRVKLDGGDKKYSIGLDIGTNSVGWAVITDEYKVPSKKFKVLGNTDRHSIKKNLIGALLFDSGETAEATRLKRTARRRYTRRKNRICYLQEIFSNEMAKVDDSFFHRLEESFLVEEDKKHERHPIFGNIVDEVAYHEKYPTIYHLRKKLVDSTDKADLRLIYLALAHMIKFRGHFLIEGDLNPDNSDVDKLFIQLVQTYNQLFEENPINASGVDAKAILSARLSKSRRLENLIAQLPGEKKNGLFGNLIALSLGLTPNFKSNFDLAEDAKLQLSKDTYDDDLDNLLAQIGDQYADLFLAAKNLSDAILLSDILRVNTEITKAPLSASMIKRYDEHHQDLTLLKALVRQQLPEKYKEIFFDQSKNGYAGYIDGGASQEEFYKFIKPILEKMDGTEELLVKLNREDLLRKQRTFDNGSIPHQIHLGELHAILRRQEDFYPFLKDNREKIEKILTFRIPYYVGPLARGNSRFAWMTRKSEETITPWNFEEVVDKGASAQSFIERMTNFDKNLPNEKVLPKHSLLYEYFTVYNELTKVKYVTEGMRKPAFLSGEQKKAIVDLLFKTNRKVTVKQLKEDYFKKIECFDSVEISGVEDRFNASLGTYHDLLKIIKDKDFLDNEENEDILEDIVLTLTLFEDREMIEERLKTYAHLFDDKVMKQLKRRRYTGWGRLSRKLINGIRDKQSGKTILDFLKSDGFANRNFMQLIHDDSLTFKEDIQKAQVSGQGDSLHEHIANLAGSPAIKKGILQTVKVVDELVKVMGRHKPENIVIEMARENQTTQKGQKNSRERMKRIEEGIKELGSQILKEHPVENTQLQNEKLYLYYLQNGRDMYVDQELDINRLSDYDVDHIVPQSFLKDDSIDNKVLTRSDKARGKSDNVPSEEVVKKMKNYWRQLLNAKLITQRKFDNLTKAERGGLSELDKAGFIKRQLVETRQITKHVAQILDSRMNTKYDENDKLIREVKVITLKSKLVSDFRKDFQFYKVREINNYHHAHDAYLNAVVGTALIKKYPKLESEFVYGDYKVYDVRKMIAKSEQEIGKATAKYFFYSNIMNFFKTEITLANGEIRKRPLIETNGETGEIVWDKGRDFATVRKVLSMPQVNIVKKTEVQTGGFSKESILPKRNSDKLIARKKDWDPKKYGGFDSPTVAYSVLVVAKVEKGKSKKLKSVKELLGITIMERSSFEKNPIDFLEAKGYKEVKKDLIIKLPKYSLFELENGRKRMLASAGELQKGNELALPSKYVNFLYLASHYEKLKGSPEDNEQKQLFVEQHKHYLDEIIEQISEFSKRVILADANLDKVLSAYNKHRDKPIREQAENIIHLFTLTNLGAPAAFKYFDTTIDRKRYTSTKEVLDATLIHQSITGLYETRIDLSQLGGDGGEAAAKGGGGSSGGTLNIEDEYRLHETSKEPDVSLGSTWLSDFPQAWAETGGMGLAVRQAPLIIPLKATSTPVSIKQYPMSQEARLGIKPHIQRLLDQGILVPCQSPWNTPLLPVKKPGTNDYRPVQDLREVNKRVEDIHPTVPNPYNLLSGLPPSHQWYTVLDLKDAFFCLRLHPTSQPLFAFEWRDPEMGISGQLTWTRLPQGFKNSPTLFNEALHRDLAGFRIQHPDLILLQYVDDLLLAATSELDCQQGTRALLQTLGDLGYRASAKKAQICQKQVKYLGYLLKEGQRWLTEARKETVMGQPIPKTPRQLREFLGTAGFCRLWIPGFAEMAAPLYPLTKPGTLFNWGPDQQKAFQEIKQALLTAPALGLPDLTKPFELFVDEKQGYAKGVLTQKLGPWRRPVAYLSKKLDPVAAGWPPCLRMVAAIAVLTKDAGKLTMGQPLVILAPHAVEALVKQPPDRWLSNARMTHYQALLLDTDRVQFGPVVALNPATLLPLPEEGLQHDCLDILAEAHGTRSDLMDQPLPDADHTWYTDGSSFLQEGQRKAGAAVTTETEVIWARALPAGTSAQRAELIALTQALKMAEGKKLNVYTDSRYAFATAHIHGEIYRRRGWLTSEGKEIKNKDEILALLKALFLPKRLSIIHCPGHQKGNSAEARGNRMADQAAREVATRETPETSTLLAGKRTADGSEFEKRTADGSEFESPKKKAKVE

SEQ ID NO: 2262 - protein, 2094 aa, synthetic construct
MPAAKRVKLDGGDKKYSIGLDIGTNSVGWAVITDEYKVPSKKFKVLGNTDRHSIKKNLIGALLFDSGETAEATRLKRTARRRYTRRKNRICYLQEIFSNEMAKVDDSFFHRLEESFLVEEDKKHERHPIFGNIVDEVAYHEKYPTIYHLRKKLVDSTDKADLRLIYLALAHMIKFRGHFLIEGDLNPDNSDVDKLFIQLVQTYNQLFEENPINASGVDAKAILSARLSKSRRLENLIAQLPGEKKNGLFGNLIALSLGLTPNFKSNFDLAEDAKLQLSKDTYDDDLDNLLAQIGDQYADLFLAAKNLSDAILLSDILRVNTEITKAPLSASMIKRYDEHHQDLTLLKALVRQQLPEKYKEIFFDQSKNGYAGYIDGGASQEEFYKFIKPILEKMDGTEELLVKLNREDLLRKQRTFDNGSIPHQIHLGELHAILRRQEDFYPFLKDNREKIEKILTFRIPYYVGPLARGNSRFAWMTRKSEETITPWNFEEVVDKGASAQSFIERMTNFDKNLPNEKVLPKHSLLYEYFTVYNELTKVKYVTEGMRKPAFLSGEQKKAIVDLLFKTNRKVTVKQLKEDYFKKIECFDSVEISGVEDRFNASLGTYHDLLKIIKDKDFLDNEENEDILEDIVLTLTLFEDREMIEERLKTYAHLFDDKVMKQLKRRRYTGWGRLSRKLINGIRDKQSGKTILDFLKSDGFANRNFMQLIHDDSLTFKEDIQKAQVSGQGDSLHEHIANLAGSPAIKKGILQTVKVVDELVKVMGRHKPENIVIEMARENQTTQKGQKNSRERMKRIEEGIKELGSQILKEHPVENTQLQNEKLYLYYLQNGRDMYVDQELDINRLSDYDVDHIVPQSFLKDDSIDNKVLTRSDKARGKSDNVPSEEVVKKMKNYWRQLLNAKLITQRKFDNLTKAERGGLSELDKAGFIKRQLVETRQITKHVAQILDSRMNTKYDENDKLIREVKVITLKSKLVSDFRKDFQFYKVREINNYHHAHDAYLNAVVGTALIKKYPKLESEFVYGDYKVYDVRKMIAKSEQEIGKATAKYFFYSNIMNFFKTEITLANGEIRKRPLIETNGETGEIVWDKGRDFATVRKVLSMPQVNIVKKTEVQTGGFSKESILPKRNSDKLIARKKDWDPKKYGGFDSPTVAYSVLVVAKVEKGKSKKLKSVKELLGITIMERSSFEKNPIDFLEAKGYKEVKKDLIIKLPKYSLFELENGRKRMLASAGELQKGNELALPSKYVNFLYLASHYEKLKGSPEDNEQKQLFVEQHKHYLDEIIEQISEFSKRVILADANLDKVLSAYNKHRDKPIREQAENIIHLFTLTNLGAPAAFKYFDTTIDRKRYTSTKEVLDATLIHQSITGLYETRIDLSQLGGDGGPAPGSSGGGGGTLNIEDEYRLHETSKEPDVSLGSTWLSDFPQAWAETGGMGLAVRQAPLIIPLKATSTPVSIKQYPMSQEARLGIKPHIQRLLDQGILVPCQSPWNTPLLPVKKPGTNDYRPVQDLREVNKRVEDIHPTVPNPYNLLSGLPPSHQWYTVLDLKDAFFCLRLHPTSQPLFAFEWRDPEMGISGQLTWTRLPQGFKNSPTLFNEALHRDLAGFRIQHPDLILLQYVDDLLLAATSELDCQQGTRALLQTLGDLGYRASAKKAQICQKQVKYLGYLLKEGQRWLTEARKETVMGQPIPKTPRQLREFLGTAGFCRLWIPGFAEMAAPLYPLTKPGTLFNWGPDQQKAFQEIKQALLTAPALGLPDLTKPFELFVDEKQGYAKGVLTQKLGPWRRPVAYLSKKLDPVAAGWPPCLRMVAAIAVLTKDAGKLTMGQPLVILAPHAVEALVKQPPDRWLSNARMTHYQALLLDTDRVQFGPVVALNPATLLPLPEEGLQHDCLDILAEAHGTRSDLMDQPLPDADHTWYTDGSSFLQEGQRKAGAAVTTETEVIWARALPAGTSAQRAELIALTQALKMAEGKKLNVYTDSRYAFATAHIHGEIYRRRGWLTSEGKEIKNKDEILALLKALFLPKRLSIIHCPGHQKGNSAEARGNRMADQAAREVATRETPETSTLLAGKRTADGSEFEKRTADGSEFESPKKKAKVE

SEQ ID NO: 2263 - protein, 2096 aa, synthetic construct
MPAAKRVKLDGGDKKYSIGLDIGTNSVGWAVITDEYKVPSKKFKVLGNTDRHSIKKNLIGALLFDSGETAEATRLKRTARRRYTRRKNRICYLQEIFSNEMAKVDDSFFHRLEESFLVEEDKKHERHPIFGNIVDEVAYHEKYPTIYHLRKKLVDSTDKADLRLIYLALAHMIKFRGHFLIEGDLNPDNSDVDKLFIQLVQTYNQLFEENPINASGVDAKAILSARLSKSRRLENLIAQLPGEKKNGLFGNLIALSLGLTPNFKSNFDLAEDAKLQLSKDTYDDDLDNLLAQIGDQYADLFLAAKNLSDAILLSDILRVNTEITKAPLSASMIKRYDEHHQDLTLLKALVRQQLPEKYKEIFFDQSKNGYAGYIDGGASQEEFYKFIKPILEKMDGTEELLVKLNREDLLRKQRTFDNGSIPHQIHLGELHAILRRQEDFYPFLKDNREKIEKILTFRIPYYVGPLARGNSRFAWMTRKSEETITPWNFEEVVDKGASAQSFIERMTNFDKNLPNEKVLPKHSLLYEYFTVYNELTKVKYVTEGMRKPAFLSGEQKKAIVDLLFKTNRKVTVKQLKEDYFKKIECFDSVEISGVEDRFNASLGTYHDLLKIIKDKDFLDNEENEDILEDIVLTLTLFEDREMIEERLKTYAHLFDDKVMKQLKRRRYTGWGRLSRKLINGIRDKQSGKTILDFLKSDGFANRNFMQLIHDDSLTFKEDIQKAQVSGQGDSLHEHIANLAGSPAIKKGILQTVKVVDELVKVMGRHKPENIVIEMARENQTTQKGQKNSRERMKRIEEGIKELGSQILKEHPVENTQLQNEKLYLYYLQNGRDMYVDQELDINRLSDYDVDHIVPQSFLKDDSIDNKVLTRSDKARGKSDNVPSEEVVKKMKNYWRQLLNAKLITQRKFDNLTKAERGGLSELDKAGFIKRQLVETRQITKHVAQILDSRMNTKYDENDKLIREVKVITLKSKLVSDFRKDFQFYKVREINNYHHAHDAYLNAVVGTALIKKYPKLESEFVYGDYKVYDVRKMIAKSEQEIGKATAKYFFYSNIMNFFKTEITLANGEIRKRPLIETNGETGEIVWDKGRDFATVRKVLSMPQVNIVKKTEVQTGGFSKESILPKRNSDKLIARKKDWDPKKYGGFDSPTVAYSVLVVAKVEKGKSKKLKSVKELLGITIMERSSFEKNPIDFLEAKGYKEVKKDLIIKLPKYSLFELENGRKRMLASAGELQKGNELALPSKYVNFLYLASHYEKLKGSPEDNEQKQLFVEQHKHYLDEIIEQISEFSKRVILADANLDKVLSAYNKHRDKPIREQAENIIHLFTLTNLGAPAAFKYFDTTIDRKRYTSTKEVLDATLIHQSITGLYETRIDLSQLGGDGGGGSGSSEAAAKGGTLNIEDEYRLHETSKEPDVSLGSTWLSDFPQAWAETGGMGLAVRQAPLIIPLKATSTPVSIKQYPMSQEARLGIKPHIQRLLDQGILVPCQSPWNTPLLPVKKPGTNDYRPVQDLREVNKRVEDIHPTVPNPYNLLSGLPPSHQWYTVLDLKDAFFCLRLHPTSQPLFAFEWRDPEMGISGQLTWTRLPQGFKNSPTLFNEALHRDLAGFRIQHPDLILLQYVDDLLLAATSELDCQQGTRALLQTLGDLGYRASAKKAQICQKQVKYLGYLLKEGQRWLTEARKETVMGQPIPKTPRQLREFLGTAGFCRLWIPGFAEMAAPLYPLTKPGTLFNWGPDQQKAFQEIKQALLTAPALGLPDLTKPFELFVDEKQGYAKGVLTQKLGPWRRPVAYLSKKLDPVAAGWPPCLRMVAAIAVLTKDAGKLTMGQPLVILAPHAVEALVKQPPDRWLSNARMTHYQALLLDTDRVQFGPVVALNPATLLPLPEEGLQHDCLDILAEAHGTRSDLMDQPLPDADHTWYTDGSSFLQEGQRKAGAAVTTETEVIWARALPAGTSAQRAELIALTQALKMAEGKKLNVYTDSRYAFATAHIHGEIYRRRGWLTSEGKEIKNKDEILALLKALFLPKRLSIIHCPGHQKGNSAEARGNRMADQAAREVATRETPETSTLLAGKRTADGSEFEKRTADGSEFESPKKKAKVE

SEQ ID NO: 2264 - protein, 2091 aa, synthetic construct
MPAAKRVKLDGGDKKYSIGLDIGTNSVGWAVITDEYKVPSKKFKVLGNTDRHSIKKNLIGALLFDSGETAEATRLKRTARRRYTRRKNRICYLQEIFSNEMAKVDDSFFHRLEESFLVEEDKKHERHPIFGNIVDEVAYHEKYPTIYHLRKKLVDSTDKADLRLIYLALAHMIKFRGHFLIEGDLNPDNSDVDKLFIQLVQTYNQLFEENPINASGVDAKAILSARLSKSRRLENLIAQLPGEKKNGLFGNLIALSLGLTPNFKSNFDLAEDAKLQLSKDTYDDDLDNLLAQIGDQYADLFLAAKNLSDAILLSDILRVNTEITKAPLSASMIKRYDEHHQDLTLLKALVRQQLPEKYKEIFFDQSKNGYAGYIDGGASQEEFYKFIKPILEKMDGTEELLVKLNREDLLRKQRTFDNGSIPHQIHLGELHAILRRQEDFYPFLKDNREKIEKILTFRIPYYVGPLARGNSRFAWMTRKSEETITPWNFEEVVDKGASAQSFIERMTNFDKNLPNEKVLPKHSLLYEYFTVYNELTKVKYVTEGMRKPAFLSGEQKKAIVDLLFKTNRKVTVKQLKEDYFKKIECFDSVEISGVEDRFNASLGTYHDLLKIIKDKDFLDNEENEDILEDIVLTLTLFEDREMIEERLKTYAHLFDDKVMKQLKRRRYTGWGRLSRKLINGIRDKQSGKTILDFLKSDGFANRNFMQLIHDDSLTFKEDIQKAQVSGQGDSLHEHIANLAGSPAIKKGILQTVKVVDELVKVMGRHKPENIVIEMARENQTTQKGQKNSRERMKRIEEGIKELGSQILKEHPVENTQLQNEKLYLYYLQNGRDMYVDQELDINRLSDYDVDHIVPQSFLKDDSIDNKVLTRSDKARGKSDNVPSEEVVKKMKNYWRQLLNAKLITQRKFDNLTKAERGGLSELDKAGFIKRQLVETRQITKHVAQILDSRMNTKYDENDKLIREVKVITLKSKLVSDFRKDFQFYKVREINNYHHAHDAYLNAVVGTALIKKYPKLESEFVYGDYKVYDVRKMIAKSEQEIGKATAKYFFYSNIMNFFKTEITLANGEIRKRPLIETNGETGEIVWDKGRDFATVRKVLSMPQVNIVKKTEVQTGGFSKESILPKRNSDKLIARKKDWDPKKYGGFDSPTVAYSVLVVAKVEKGKSKKLKSVKELLGITIMERSSFEKNPIDFLEAKGYKEVKKDLIIKLPKYSLFELENGRKRMLASAGELQKGNELALPSKYVNFLYLASHYEKLKGSPEDNEQKQLFVEQHKHYLDEIIEQISEFSKRVILADANLDKVLSAYNKHRDKPIREQAENIIHLFTLTNLGAPAAFKYFDTTIDRKRYTSTKEVLDATLIHQSITGLYETRIDLSQLGGDGGGSSGGGGGTLNIEDEYRLHETSKEPDVSLGSTWLSDFPQAWAETGGMGLAVRQAPLIIPLKATSTPVSIKQYPMSQEARLGIKPHIQRLLDQGILVPCQSPWNTPLLPVKKPGTNDYRPVQDLREVNKRVEDIHPTVPNPYNLLSGLPPSHQWYTVLDLKDAFFCLRLHPTSQPLFAFEWRDPEMGISGQLTWTRLPQGFKNSPTLFNEALHRDLAGFRIQHPDLILLQYVDDLLLAATSELDCQQGTRALLQTLGDLGYRASAKKAQICQKQVKYLGYLLKEGQRWLTEARKETVMGQPIPKTPRQLREFLGTAGFCRLWIPGFAEMAAPLYPLTKPGTLFNWGPDQQKAFQEIKQALLTAPALGLPDLTKPFELFVDEKQGYAKGVLTQKLGPWRRPVAYLSKKLDPVAAGWPPCLRMVAAIAVLTKDAGKLTMGQPLVILAPHAVEALVKQPPDRWLSNARMTHYQALLLDTDRVQFGPVVALNPATLLPLPEEGLQHDCLDILAEAHGTRSDLMDQPLPDADHTWYTDGSSFLQEGQRKAGAAVTTETEVIWARALPAGTSAQRAELIALTQALKMAEGKKLNVYTDSRYAFATAHIHGEIYRRRGWLTSEGKEIKNKDEILALLKALFLPKRLSIIHCPGHQKGNSAEARGNRMADQAAREVATRETPETSTLLAGKRTADGSEFEKRTADGSEFESPKKKAKVE

SEQ ID NO: 2265 - protein, 2094 aa, synthetic construct
MPAAKRVKLDGGDKKYSIGLDIGTNSVGWAVITDEYKVPSKKFKVLGNTDRHSIKKNLIGALLFDSGETAEATRLKRTARRRYTRRKNRICYLQEIFSNEMAKVDDSFFHRLEESFLVEEDKKHERHPIFGNIVDEVAYHEKYPTIYHLRKKLVDSTDKADLRLIYLALAHMIKFRGHFLIEGDLNPDNSDVDKLFIQLVQTYNQLFEENPINASGVDAKAILSARLSKSRRLENLIAQLPGEKKNGLFGNLIALSLGLTPNFKSNFDLAEDAKLQLSKDTYDDDLDNLLAQIGDQYADLFLAAKNLSDAILLSDILRVNTEITKAPLSASMIKRYDEHHQDLTLLKALVRQQLPEKYKEIFFDQSKNGYAGYIDGGASQEEFYKFIKPILEKMDGTEELLVKLNREDLLRKQRTFDNGSIPHQIHLGELHAILRRQEDFYPFLKDNREKIEKILTFRIPYYVGPLARGNSRFAWMTRKSEETITPWNFEEVVDKGASAQSFIERMTNFDKNLPNEKVLPKHSLLYEYFTVYNELTKVKYVTEGMRKPAFLSGEQKKAIVDLLFKTNRKVTVKQLKEDYFKKIECFDSVEISGVEDRFNASLGTYHDLLKIIKDKDFLDNEENEDILEDIVLTLTLFEDREMIEERLKTYAHLFDDKVMKQLKRRRYTGWGRLSRKLINGIRDKQSGKTILDFLKSDGFANRNFMQLIHDDSLTFKEDIQKAQVSGQGDSLHEHIANLAGSPAIKKGILQTVKVVDELVKVMGRHKPENIVIEMARENQTTQKGQKNSRERMKRIEEGIKELGSQILKEHPVENTQLQNEKLYLYYLQNGRDMYVDQELDINRLSDYDVDHIVPQSFLKDDSIDNKVLTRSDKARGKSDNVPSEEVVKKMKNYWRQLLNAKLITQRKFDNLTKAERGGLSELDKAGFIKRQLVETRQITKHVAQILDSRMNTKYDENDKLIREVKVITLKSKLVSDFRKDFQFYKVREINNYHHAHDAYLNAVVGTALIKKYPKLESEFVYGDYKVYDVRKMIAKSEQEIGKATAKYFFYSNIMNFFKTEITLANGEIRKRPLIETNGETGEIVWDKGRDFATVRKVLSMPQVNIVKKTEVQTGGFSKESILPKRNSDKLIARKKDWDPKKYGGFDSPTVAYSVLVVAKVEKGKSKKLKSVKELLGITIMERSSFEKNPIDFLEAKGYKEVKKDLIIKLPKYSLFELENGRKRMLASAGELQKGNELALPSKYVNFLYLASHYEKLKGSPEDNEQKQLFVEQHKHYLDEIIEQISEFSKRVILADANLDKVLSAYNKHRDKPIREQAENIIHLFTLTNLGAPAAFKYFDTTIDRKRYTSTKEVLDATLIHQSITGLYETRIDLSQLGGDGGGGSGSSPAPGGTLNIEDEYRLHETSKEPDVSLGSTWLSDFPQAWAETGGMGLAVRQAPLIIPLKATSTPVSIKQYPMSQEARLGIKPHIQRLLDQGILVPCQSPWNTPLLPVKKPGTNDYRPVQDLREVNKRVEDIHPTVPNPYNLLSGLPPSHQWYTVLDLKDAFFCLRLHPTSQPLFAFEWRDPEMGISGQLTWTRLPQGFKNSPTLFNEALHRDLAGFRIQHPDLILLQYVDDLLLAATSELDCQQGTRALLQTLGDLGYRASAKKAQICQKQVKYLGYLLKEGQRWLTEARKETVMGQPIPKTPRQLREFLGTAGFCRLWIPGFAEMAAPLYPLTKPGTLFNWGPDQQKAFQEIKQALLTAPALGLPDLTKPFELFVDEKQGYAKGVLTQKLGPWRRPVAYLSKKLDPVAAGWPPCLRMVAAIAVLTKDAGKLTMGQPLVILAPHAVEALVKQPPDRWLSNARMTHYQALLLDTDRVQFGPVVALNPATLLPLPEEGLQHDCLDILAEAHGTRSDLMDQPLPDADHTWYTDGSSFLQEGQRKAGAAVTTETEVIWARALPAGTSAQRAELIALTQALKMAEGKKLNVYTDSRYAFATAHIHGEIYRRRGWLTSEGKEIKNKDEILALLKALFLPKRLSIIHCPGHQKGNSAEARGNRMADQAAREVATRETPETSTLLAGKRTADGSEFEKRTADGSEFESPKKKAKVE

SEQ ID NO: 2266 - protein, 2096 aa, synthetic construct
MPAAKRVKLDGGDKKYSIGLDIGTNSVGWAVITDEYKVPSKKFKVLGNTDRHSIKKNLIGALLFDSGETAEATRLKRTARRRYTRRKNRICYLQEIFSNEMAKVDDSFFHRLEESFLVEEDKKHERHPIFGNIVDEVAYHEKYPTIYHLRKKLVDSTDKADLRLIYLALAHMIKFRGHFLIEGDLNPDNSDVDKLFIQLVQTYNQLFEENPINASGVDAKAILSARLSKSRRLENLIAQLPGEKKNGLFGNLIALSLGLTPNFKSNFDLAEDAKLQLSKDTYDDDLDNLLAQIGDQYADLFLAAKNLSDAILLSDILRVNTEITKAPLSASMIKRYDEHHQDLTLLKALVRQQLPEKYKEIFFDQSKNGYAGYIDGGASQEEFYKFIKPILEKMDGTEELLVKLNREDLLRKQRTFDNGSIPHQIHLGELHAILRRQEDFYPFLKDNREKIEKILTFRIPYYVGPLARGNSRFAWMTRKSEETITPWNFEEVVDKGASAQSFIERMTNFDKNLPNEKVLPKHSLLYEYFTVYNELTKVKYVTEGMRKPAFLSGEQKKAIVDLLFKTNRKVTVKQLKEDYFKKIECFDSVEISGVEDRFNASLGTYHDLLKIIKDKDFLDNEENEDILEDIVLTLTLFEDREMIEERLKTYAHLFDDKVMKQLKRRRYTGWGRLSRKLINGIRDKQSGKTILDFLKSDGFANRNFMQLIHDDSLTFKEDIQKAQVSGQGDSLHEHIANLAGSPAIKKGILQTVKVVDELVKVMGRHKPENIVIEMARENQTTQKGQKNSRERMKRIEEGIKELGSQILKEHPVENTQLQNEKLYLYYLQNGRDMYVDQELDINRLSDYDVDHIVPQSFLKDDSIDNKVLTRSDKARGKSDNVPSEEVVKKMKNYWRQLLNAKLITQRKFDNLTKAERGGLSELDKAGFIKRQLVETRQITKHVAQILDSRMNTKYDENDKLIREVKVITLKSKLVSDFRKDFQFYKVREINNYHHAHDAYLNAVVGTALIKKYPKLESEFVYGDYKVYDVRKMIAKSEQEIGKATAKYFFYSNIMNFFKTEITLANGEIRKRPLIETNGETGEIVWDKGRDFATVRKVLSMPQVNIVKKTEVQTGGFSKESILPKRNSDKLIARKKDWDPKKYGGFDSPTVAYSVLVVAKVEKGKSKKLKSVKELLGITIMERSSFEKNPIDFLEAKGYKEVKKDLIIKLPKYSLFELENGRKRMLASAGELQKGNELALPSKYVNFLYLASHYEKLKGSPEDNEQKQLFVEQHKHYLDEIIEQISEFSKRVILADANLDKVLSAYNKHRDKPIREQAENIIHLFTLTNLGAPAAFKYFDTTIDRKRYTSTKEVLDATLIHQSITGLYETRIDLSQLGGDGGGGSGGGEAAAKGGTLNIEDEYRLHETSKEPDVSLGSTWLSDFPQAWAETGGMGLAVRQAPLIIPLKATSTPVSIKQYPMSQEARLGIKPHIQRLLDQGILVPCQSPWNTPLLPVKKPGTNDYRPVQDLREVNKRVEDIHPTVPNPYNLLSGLPPSHQWYTVLDLKDAFFCLRLHPTSQPLFAFEWRDPEMGISGQLTWTRLPQGFKNSPTLFNEALHRDLAGFRIQHPDLILLQYVDDLLLAATSELDCQQGTRALLQTLGDLGYRASAKKAQICQKQVKYLGYLLKEGQRWLTEARKETVMGQPIPKTPRQLREFLGTAGFCRLWIPGFAEMAAPLYPLTKPGTLFNWGPDQQKAFQEIKQALLTAPALGLPDLTKPFELFVDEKQGYAKGVLTQKLGPWRRPVAYLSKKLDPVAAGWPPCLRMVAAIAVLTKDAGKLTMGQPLVILAPHAVEALVKQPPDRWLSNARMTHYQALLLDTDRVQFGPVVALNPATLLPLPEEGLQHDCLDILAEAHGTRSDLMDQPLPDADHTWYTDGSSFLQEGQRKAGAAVTTETEVIWARALPAGTSAQRAELIALTQALKMAEGKKLNVYTDSRYAFATAHIHGEIYRRRGWLTSEGKEIKNKDEILALLKALFLPKRLSIIHCPGHQKGNSAEARGNRMADQAAREVATRETPETSTLLAGKRTADGSEFEKRTADGSEFESPKKKAKVE

SEQ ID NO: 2267 - protein, 2092 aa, synthetic construct
MPAAKRVKLDGGDKKYSIGLDIGTNSVGWAVITDEYKVPSKKFKVLGNTDRHSIKKNLIGALLFDSGETAEATRLKRTARRRYTRRKNRICYLQEIFSNEMAKVDDSFFHRLEESFLVEEDKKHERHPIFGNIVDEVAYHEKYPTIYHLRKKLVDSTDKADLRLIYLALAHMIKFRGHFLIEGDLNPDNSDVDKLFIQLVQTYNQLFEENPINASGVDAKAILSARLSKSRRLENLIAQLPGEKKNGLFGNLIALSLGLTPNFKSNFDLAEDAKLQLSKDTYDDDLDNLLAQIGDQYADLFLAAKNLSDAILLSDILRVNTEITKAPLSASMIKRYDEHHQDLTLLKALVRQQLPEKYKEIFFDQSKNGYAGYIDGGASQEEFYKFIKPILEKMDGTEELLVKLNREDLLRKQRTFDNGSIPHQIHLGELHAILRRQEDFYPFLKDNREKIEKILTFRIPYYVGPLARGNSRFAWMTRKSEETITPWNFEEVVDKGASAQSFIERMTNFDKNLPNEKVLPKHSLLYEYFTVYNELTKVKYVTEGMRKPAFLSGEQKKAIVDLLFKTNRKVTVKQLKEDYFKKIECFDSVEISGVEDRFNASLGTYHDLLKIIKDKDFLDNEENEDILEDIVLTLTLFEDREMIEERLKTYAHLFDDKVMKQLKRRRYTGWGRLSRKLINGIRDKQSGKTILDFLKSDGFANRNFMQLIHDDSLTFKEDIQKAQVSGQGDSLHEHIANLAGSPAIKKGILQTVKVVDELVKVMGRHKPENIVIEMARENQTTQKGQKNSRERMKRIEEGIKELGSQILKEHPVENTQLQNEKLYLYYLQNGRDMYVDQELDINRLSDYDVDHIVPQSFLKDDSIDNKVLTRSDKARGKSDNVPSEEVVKKMKNYWRQLLNAKLITQRKFDNLTKAERGGLSELDKAGFIKRQLVETRQITKHVAQILDSRMNTKYDENDKLIREVKVITLKSKLVSDFRKDFQFYKVREINNYHHAHDAYLNAVVGTALIKKYPKLESEFVYGDYKVYDVRKMIAKSEQEIGKATAKYFFYSNIMNFFKTEITLANGEIRKRPLIETNGETGEIVWDKGRDFATVRKVLSMPQVNIVKKTEVQTGGFSKESILPKRNSDKLIARKKDWDPKKYGGFDSPTVAYSVLVVAKVEKGKSKKLKSVKELLGITIMERSSFEKNPIDFLEAKGYKEVKKDLIIKLPKYSLFELENGRKRMLASAGELQKGNELALPSKYVNFLYLASHYEKLKGSPEDNEQKQLFVEQHKHYLDEIIEQISEFSKRVILADANLDKVLSAYNKHRDKPIREQAENIIHLFTLTNLGAPAAFKYFDTTIDRKRYTSTKEVLDATLIHQSITGLYETRIDLSQLGGDGGGGGGGGGGGTLNIEDEYRLHETSKEPDVSLGSTWLSDFPQAWAETGGMGLAVRQAPLIIPLKATSTPVSIKQYPMSQEARLGIKPHIQRLLDQGILVPCQSPWNTPLLPVKKPGTNDYRPVQDLREVNKRVEDIHPTVPNPYNLLSGLPPSHQWYTVLDLKDAFFCLRLHPTSQPLFAFEWRDPEMGISGQLTWTRLPQGFKNSPTLFNEALHRDLAGFRIQHPDLILLQYVDDLLLAATSELDCQQGTRALLQTLGDLGYRASAKKAQICQKQVKYLGYLLKEGQRWLTEARKETVMGQPIPKTPRQLREFLGTAGFCRLWIPGFAEMAAPLYPLTKPGTLFNWGPDQQKAFQEIKQALLTAPALGLPDLTKPFELFVDEKQGYAKGVLTQKLGPWRRPVAYLSKKLDPVAAGWPPCLRMVAAIAVLTKDAGKLTMGQPLVILAPHAVEALVKQPPDRWLSNARMTHYQALLLDTDRVQFGPVVALNPATLLPLPEEGLQHDCLDILAEAHGTRSDLMDQPLPDADHTWYTDGSSFLQEGQRKAGAAVTTETEVIWARALPAGTSAQRAELIALTQALKMAEGKKLNVYTDSRYAFATAHIHGEIYRRRGWLTSEGKEIKNKDEILALLKALFLPKRLSIIHCPGHQKGNSAEARGNRMADQAAREVATRETPETSTLLAGKRTADGSEFEKRTADGSEFESPKKKAKVE

SEQ ID NO: 2268 - protein, 2089 aa, synthetic construct
MPAAKRVKLDGGDKKYSIGLDIGTNSVGWAVITDEYKVPSKKFKVLGNTDRHSIKKNLIGALLFDSGETAEATRLKRTARRRYTRRKNRICYLQEIFSNEMAKVDDSFFHRLEESFLVEEDKKHERHPIFGNIVDEVAYHEKYPTIYHLRKKLVDSTDKADLRLIYLALAHMIKFRGHFLIEGDLNPDNSDVDKLFIQLVQTYNQLFEENPINASGVDAKAILSARLSKSRRLENLIAQLPGEKKNGLFGNLIALSLGLTPNFKSNFDLAEDAKLQLSKDTYDDDLDNLLAQIGDQYADLFLAAKNLSDAILLSDILRVNTEITKAPLSASMIKRYDEHHQDLTLLKALVRQQLPEKYKEIFFDQSKNGYAGYIDGGASQEEFYKFIKPILEKMDGTEELLVKLNREDLLRKQRTFDNGSIPHQIHLGELHAILRRQEDFYPFLKDNREKIEKILTFRIPYYVGPLARGNSRFAWMTRKSEETITPWNFEEVVDKGASAQSFIERMTNFDKNLPNEKVLPKHSLLYEYFTVYNELTKVKYVTEGMRKPAFLSGEQKKAIVDLLFKTNRKVTVKQLKEDYFKKIECFDSVEISGVEDRFNASLGTYHDLLKIIKDKDFLDNEENEDILEDIVLTLTLFEDREMIEERLKTYAHLFDDKVMKQLKRRRYTGWGRLSRKLINGIRDKQSGKTILDFLKSDGFANRNFMQLIHDDSLTFKEDIQKAQVSGQGDSLHEHIANLAGSPAIKKGILQTVKVVDELVKVMGRHKPENIVIEMARENQTTQKGQKNSRERMKRIEEGIKELGSQILKEHPVENTQLQNEKLYLYYLQNGRDMYVDQELDINRLSDYDVDHIVPQSFLKDDSIDNKVLTRSDKARGKSDNVPSEEVVKKMKNYWRQLLNAKLITQRKFDNLTKAERGGLSELDKAGFIKRQLVETRQITKHVAQILDSRMNTKYDENDKLIREVKVITLKSKLVSDFRKDFQFYKVREINNYHHAHDAYLNAVVGTALIKKYPKLESEFVYGDYKVYDVRKMIAKSEQEIGKATAKYFFYSNIMNFFKTEITLANGEIRKRPLIETNGETGEIVWDKGRDFATVRKVLSMPQVNIVKKTEVQTGGFSKESILPKRNSDKLIARKKDWDPKKYGGFDSPTVAYSVLVVAKVEKGKSKKLKSVKELLGITIMERSSFEKNPIDFLEAKGYKEVKKDLIIKLPKYSLFELENGRKRMLASAGELQKGNELALPSKYVNFLYLASHYEKLKGSPEDNEQKQLFVEQHKHYLDEIIEQISEFSKRVILADANLDKVLSAYNKHRDKPIREQAENIIHLFTLTNLGAPAAFKYFDTTIDRKRYTSTKEVLDATLIHQSITGLYETRIDLSQLGGDGGGGGGGGTLNIEDEYRLHETSKEPDVSLGSTWLSDFPQAWAETGGMGLAVRQAPLIIPLKATSTPVSIKQYPMSQEARLGIKPHIQRLLDQGILVPCQSPWNTPLLPVKKPGTNDYRPVQDLREVNKRVEDIHPTVPNPYNLLSGLPPSHQWYTVLDLKDAFFCLRLHPTSQPLFAFEWRDPEMGISGQLTWTRLPQGFKNSPTLFNEALHRDLAGFRIQHPDLILLQYVDDLLLAATSELDCQQGTRALLQTLGDLGYRASAKKAQICQKQVKYLGYLLKEGQRWLTEARKETVMGQPIPKTPRQLREFLGTAGFCRLWIPGFAEMAAPLYPLTKPGTLFNWGPDQQKAFQEIKQALLTAPALGLPDLTKPFELFVDEKQGYAKGVLTQKLGPWRRPVAYLSKKLDPVAAGWPPCLRMVAAIAVLTKDAGKLTMGQPLVILAPHAVEALVKQPPDRWLSNARMTHYQALLLDTDRVQFGPVVALNPATLLPLPEEGLQHDCLDILAEAHGTRSDLMDQPLPDADHTWYTDGSSFLQEGQRKAGAAVTTETEVIWARALPAGTSAQRAELIALTQALKMAEGKKLNVYTDSRYAFATAHIHGEIYRRRGWLTSEGKEIKNKDEILALLKALFLPKRLSIIHCPGHQKGNSAEARGNRMADQAAREVATRETPETSTLLAGKRTADGSEFEKRTADGSEFESPKKKAKVE

SEQ ID NO: 2269 - protein, 2096 aa, synthetic construct
MPAAKRVKLDGGDKKYSIGLDIGTNSVGWAVITDEYKVPSKKFKVLGNTDRHSIKKNLIGALLFDSGETAEATRLKRTARRRYTRRKNRICYLQEIFSNEMAKVDDSFFHRLEESFLVEEDKKHERHPIFGNIVDEVAYHEKYPTIYHLRKKLVDSTDKADLRLIYLALAHMIKFRGHFLIEGDLNPDNSDVDKLFIQLVQTYNQLFEENPINASGVDAKAILSARLSKSRRLENLIAQLPGEKKNGLFGNLIALSLGLTPNFKSNFDLAEDAKLQLSKDTYDDDLDNLLAQIGDQYADLFLAAKNLSDAILLSDILRVNTEITKAPLSASMIKRYDEHHQDLTLLKALVRQQLPEKYKEIFFDQSKNGYAGYIDGGASQEEFYKFIKPILEKMDGTEELLVKLNREDLLRKQRTFDNGSIPHQIHLGELHAILRRQEDFYPFLKDNREKIEKILTFRIPYYVGPLARGNSRFAWMTRKSEETITPWNFEEVVDKGASAQSFIERMTNFDKNLPNEKVLPKHSLLYEYFTVYNELTKVKYVTEGMRKPAFLSGEQKKAIVDLLFKTNRKVTVKQLKEDYFKKIECFDSVEISGVEDRFNASLGTYHDLLKIIKDKDFLDNEENEDILEDIVLTLTLFEDREMIEERLKTYAHLFDDKVMKQLKRRRYTGWGRLSRKLINGIRDKQSGKTILDFLKSDGFANRNFMQLIHDDSLTFKEDIQKAQVSGQGDSLHEHIANLAGSPAIKKGILQTVKVVDELVKVMGRHKPENIVIEMARENQTTQKGQKNSRERMKRIEEGIKELGSQILKEHPVENTQLQNEKLYLYYLQNGRDMYVDQELDINRLSDYDVDHIVPQSFLKDDSIDNKVLTRSDKARGKSDNVPSEEVVKKMKNYWRQLLNAKLITQRKFDNLTKAERGGLSELDKAGFIKRQLVETRQITKHVAQILDSRMNTKYDENDKLIREVKVITLKSKLVSDFRKDFQFYKVREINNYHHAHDAYLNAVVGTALIKKYPKLESEFVYGDYKVYDVRKMIAKSEQEIGKATAKYFFYSNIMNFFKTEITLANGEIRKRPLIETNGETGEIVWDKGRDFATVRKVLSMPQVNIVKKTEVQTGGFSKESILPKRNSDKLIARKKDWDPKKYGGFDSPTVAYSVLVVAKVEKGKSKKLKSVKELLGITIMERSSFEKNPIDFLEAKGYKEVKKDLIIKLPKYSLFELENGRKRMLASAGELQKGNELALPSKYVNFLYLASHYEKLKGSPEDNEQKQLFVEQHKHYLDEIIEQISEFSKRVILADANLDKVLSAYNKHRDKPIREQAENIIHLFTLTNLGAPAAFKYFDTTIDRKRYTSTKEVLDATLIHQSITGLYETRIDLSQLGGDGGPAPEAAAKGGGGGTLNIEDEYRLHETSKEPDVSLGSTWLSDFPQAWAETGGMGLAVRQAPLIIPLKATSTPVSIKQYPMSQEARLGIKPHIQRLLDQGILVPCQSPWNTPLLPVKKPGTNDYRPVQDLREVNKRVEDIHPTVPNPYNLLSGLPPSHQWYTVLDLKDAFFCLRLHPTSQPLFAFEWRDPEMGISGQLTWTRLPQGFKNSPTLFNEALHRDLAGFRIQHPDLILLQYVDDLLLAATSELDCQQGTRALLQTLGDLGYRASAKKAQICQKQVKYLGYLLKEGQRWLTEARKETVMGQPIPKTPRQLREFLGTAGFCRLWIPGFAEMAAPLYPLTKPGTLFNWGPDQQKAFQEIKQALLTAPALGLPDLTKPFELFVDEKQGYAKGVLTQKLGPWRRPVAYLSKKLDPVAAGWPPCLRMVAAIAVLTKDAGKLTMGQPLVILAPHAVEALVKQPPDRWLSNARMTHYQALLLDTDRVQFGPVVALNPATLLPLPEEGLQHDCLDILAEAHGTRSDLMDQPLPDADHTWYTDGSSFLQEGQRKAGAAVTTETEVIWARALPAGTSAQRAELIALTQALKMAEGKKLNVYTDSRYAFATAHIHGEIYRRRGWLTSEGKEIKNKDEILALLKALFLPKRLSIIHCPGHQKGNSAEARGNRMADQAAREVATRETPETSTLLAGKRTADGSEFEKRTADGSEFESPKKKAKVE

SEQ ID NO: 2270 - protein, 2091 aa, synthetic construct
MPAAKRVKLDGGDKKYSIGLDIGTNSVGWAVITDEYKVPSKKFKVLGNTDRHSIKKNLIGALLFDSGETAEATRLKRTARRRYTRRKNRICYLQEIFSNEMAKVDDSFFHRLEESFLVEEDKKHERHPIFGNIVDEVAYHEKYPTIYHLRKKLVDSTDKADLRLIYLALAHMIKFRGHFLIEGDLNPDNSDVDKLFIQLVQTYNQLFEENPINASGVDAKAILSARLSKSRRLENLIAQLPGEKKNGLFGNLIALSLGLTPNFKSNFDLAEDAKLQLSKDTYDDDLDNLLAQIGDQYADLFLAAKNLSDAILLSDILRVNTEITKAPLSASMIKRYDEHHQDLTLLKALVRQQLPEKYKEIFFDQSKNGYAGYIDGGASQEEFYKFIKPILEKMDGTEELLVKLNREDLLRKQRTFDNGSIPHQIHLGELHAILRRQEDFYPFLKDNREKIEKILTFRIPYYVGPLARGNSRFAWMTRKSEETITPWNFEEVVDKGASAQSFIERMTNFDKNLPNEKVLPKHSLLYEYFTVYNELTKVKYVTEGMRKPAFLSGEQKKAIVDLLFKTNRKVTVKQLKEDYFKKIECFDSVEISGVEDRFNASLGTYHDLLKIIKDKDFLDNEENEDILEDIVLTLTLFEDREMIEERLKTYAHLFDDKVMKQLKRRRYTGWGRLSRKLINGIRDKQSGKTILDFLKSDGFANRNFMQLIHDDSLTFKEDIQKAQVSGQGDSLHEHIANLAGSPAIKKGILQTVKVVDELVKVMGRHKPENIVIEMARENQTTQKGQKNSRERMKRIEEGIKELGSQILKEHPVENTQLQNEKLYLYYLQNGRDMYVDQELDINRLSDYDVDHIVPQSFLKDDSIDNKVLTRSDKARGKSDNVPSEEVVKKMKNYWRQLLNAKLITQRKFDNLTKAERGGLSELDKAGFIKRQLVETRQITKHVAQILDSRMNTKYDENDKLIREVKVITLKSKLVSDFRKDFQFYKVREINNYHHAHDAYLNAVVGTALIKKYPKLESEFVYGDYKVYDVRKMIAKSEQEIGKATAKYFFYSNIMNFFKTEITLANGEIRKRPLIETNGETGEIVWDKGRDFATVRKVLSMPQVNIVKKTEVQTGGFSKESILPKRNSDKLIARKKDWDPKKYGGFDSPTVAYSVLVVAKVEKGKSKKLKSVKELLGITIMERSSFEKNPIDFLEAKGYKEVKKDLIIKLPKYSLFELENGRKRMLASAGELQKGNELALPSKYVNFLYLASHYEKLKGSPEDNEQKQLFVEQHKHYLDEIIEQISEFSKRVILADANLDKVLSAYNKHRDKPIREQAENIIHLFTLTNLGAPAAFKYFDTTIDRKRYTSTKEVLDATLIHQSITGLYETRIDLSQLGGDGGGGSGSSGGTLNIEDEYRLHETSKEPDVSLGSTWLSDFPQAWAETGGMGLAVRQAPLIIPLKATSTPVSIKQYPMSQEARLGIKPHIQRLLDQGILVPCQSPWNTPLLPVKKPGTNDYRPVQDLREVNKRVEDIHPTVPNPYNLLSGLPPSHQWYTVLDLKDAFFCLRLHPTSQPLFAFEWRDPEMGISGQLTWTRLPQGFKNSPTLFNEALHRDLAGFRIQHPDLILLQYVDDLLLAATSELDCQQGTRALLQTLGDLGYRASAKKAQICQKQVKYLGYLLKEGQRWLTEARKETVMGQPIPKTPRQLREFLGTAGFCRLWIPGFAEMAAPLYPLTKPGTLFNWGPDQQKAFQEIKQALLTAPALGLPDLTKPFELFVDEKQGYAKGVLTQKLGPWRRPVAYLSKKLDPVAAGWPPCLRMVAAIAVLTKDAGKLTMGQPLVILAPHAVEALVKQPPDRWLSNARMTHYQALLLDTDRVQFGPVVALNPATLLPLPEEGLQHDCLDILAEAHGTRSDLMDQPLPDADHTWYTDGSSFLQEGQRKAGAAVTTETEVIWARALPAGTSAQRAELIALTQALKMAEGKKLNVYTDSRYAFATAHIHGEIYRRRGWLTSEGKEIKNKDEILALLKALFLPKRLSIIHCPGHQKGNSAEARGNRMADQAAREVATRETPETSTLLAGKRTADGSEFEKRTADGSEFESPKKKAKVE

SEQ ID NO: 2271 - protein, 2091 aa, synthetic construct
MPAAKRVKLDGGDKKYSIGLDIGTNSVGWAVITDEYKVPSKKFKVLGNTDRHSIKKNLIGALLFDSGETAEATRLKRTARRRYTRRKNRICYLQEIFSNEMAKVDDSFFHRLEESFLVEEDKKHERHPIFGNIVDEVAYHEKYPTIYHLRKKLVDSTDKADLRLIYLALAHMIKFRGHFLIEGDLNPDNSDVDKLFIQLVQTYNQLFEENPINASGVDAKAILSARLSKSRRLENLIAQLPGEKKNGLFGNLIALSLGLTPNFKSNFDLAEDAKLQLSKDTYDDDLDNLLAQIGDQYADLFLAAKNLSDAILLSDILRVNTEITKAPLSASMIKRYDEHHQDLTLLKALVRQQLPEKYKEIFFDQSKNGYAGYIDGGASQEEFYKFIKPILEKMDGTEELLVKLNREDLLRKQRTFDNGSIPHQIHLGELHAILRRQEDFYPFLKDNREKIEKILTFRIPYYVGPLARGNSRFAWMTRKSEETITPWNFEEVVDKGASAQSFIERMTNFDKNLPNEKVLPKHSLLYEYFTVYNELTKVKYVTEGMRKPAFLSGEQKKAIVDLLFKTNRKVTVKQLKEDYFKKIECFDSVEISGVEDRFNASLGTYHDLLKIIKDKDFLDNEENEDILEDIVLTLTLFEDREMIEERLKTYAHLFDDKVMKQLKRRRYTGWGRLSRKLINGIRDKQSGKTILDFLKSDGFANRNFMQLIHDDSLTFKEDIQKAQVSGQGDSLHEHIANLAGSPAIKKGILQTVKVVDELVKVMGRHKPENIVIEMARENQTTQKGQKNSRERMKRIEEGIKELGSQILKEHPVENTQLQNEKLYLYYLQNGRDMYVDQELDINRLSDYDVDHIVPQSFLKDDSIDNKVLTRSDKARGKSDNVPSEEVVKKMKNYWRQLLNAKLITQRKFDNLTKAERGGLSELDKAGFIKRQLVETRQITKHVAQILDSRMNTKYDENDKLIREVKVITLKSKLVSDFRKDFQFYKVREINNYHHAHDAYLNAVVGTALIKKYPKLESEFVYGDYKVYDVRKMIAKSEQEIGKATAKYFFYSNIMNFFKTEITLANGEIRKRPLIETNGETGEIVWDKGRDFATVRKVLSMPQVNIVKKTEVQTGGFSKESILPKRNSDKLIARKKDWDPKKYGGFDSPTVAYSVLVVAKVEKGKSKKLKSVKELLGITIMERSSFEKNPIDFLEAKGYKEVKKDLIIKLPKYSLFELENGRKRMLASAGELQKGNELALPSKYVNFLYLASHYEKLKGSPEDNEQKQLFVEQHKHYLDEIIEQISEFSKRVILADANLDKVLSAYNKHRDKPIREQAENIIHLFTLTNLGAPAAFKYFDTTIDRKRYTSTKEVLDATLIHQSITGLYETRIDLSQLGGDGGPAPGSSGGTLNIEDEYRLHETSKEPDVSLGSTWLSDFPQAWAETGGMGLAVRQAPLIIPLKATSTPVSIKQYPMSQEARLGIKPHIQRLLDQGILVPCQSPWNTPLLPVKKPGTNDYRPVQDLREVNKRVEDIHPTVPNPYNLLSGLPPSHQWYTVLDLKDAFFCLRLHPTSQPLFAFEWRDPEMGISGQLTWTRLPQGFKNSPTLFNEALHRDLAGFRIQHPDLILLQYVDDLLLAATSELDCQQGTRALLQTLGDLGYRASAKKAQICQKQVKYLGYLLKEGQRWLTEARKETVMGQPIPKTPRQLREFLGTAGFCRLWIPGFAEMAAPLYPLTKPGTLFNWGPDQQKAFQEIKQALLTAPALGLPDLTKPFELFVDEKQGYAKGVLTQKLGPWRRPVAYLSKKLDPVAAGWPPCLRMVAAIAVLTKDAGKLTMGQPLVILAPHAVEALVKQPPDRWLSNARMTHYQALLLDTDRVQFGPVVALNPATLLPLPEEGLQHDCLDILAEAHGTRSDLMDQPLPDADHTWYTDGSSFLQEGQRKAGAAVTTETEVIWARALPAGTSAQRAELIALTQALKMAEGKKLNVYTDSRYAFATAHIHGEIYRRRGWLTSEGKEIKNKDEILALLKALFLPKRLSIIHCPGHQKGNSAEARGNRMADQAAREVATRETPETSTLLAGKRTADGSEFEKRTADGSEFESPKKKAKVE

SEQ ID NO: 2272 - protein, 2094 aa, synthetic construct
MPAAKRVKLDGGDKKYSIGLDIGTNSVGWAVITDEYKVPSKKFKVLGNTDRHSIKKNLIGALLFDSGETAEATRLKRTARRRYTRRKNRICYLQEIFSNEMAKVDDSFFHRLEESFLVEEDKKHERHPIFGNIVDEVAYHEKYPTIYHLRKKLVDSTDKADLRLIYLALAHMIKFRGHFLIEGDLNPDNSDVDKLFIQLVQTYNQLFEENPINASGVDAKAILSARLSKSRRLENLIAQLPGEKKNGLFGNLIALSLGLTPNFKSNFDLAEDAKLQLSKDTYDDDLDNLLAQIGDQYADLFLAAKNLSDAILLSDILRVNTEITKAPLSASMIKRYDEHHQDLTLLKALVRQQLPEKYKEIFFDQSKNGYAGYIDGGASQEEFYKFIKPILEKMDGTEELLVKLNREDLLRKQRTFDNGSIPHQIHLGELHAILRRQEDFYPFLKDNREKIEKILTFRIPYYVGPLARGNSRFAWMTRKSEETITPWNFEEVVDKGASAQSFIERMTNFDKNLPNEKVLPKHSLLYEYFTVYNELTKVKYVTEGMRKPAFLSGEQKKAIVDLLFKTNRKVTVKQLKEDYFKKIECFDSVEISGVEDRFNASLGTYHDLLKIIKDKDFLDNEENEDILEDIVLTLTLFEDREMIEERLKTYAHLFDDKVMKQLKRRRYTGWGRLSRKLINGIRDKQSGKTILDFLKSDGFANRNFMQLIHDDSLTFKEDIQKAQVSGQGDSLHEHIANLAGSPAIKKGILQTVKVVDELVKVMGRHKPENIVIEMARENQTTQKGQKNSRERMKRIEEGIKELGSQILKEHPVENTQLQNEKLYLYYLQNGRDMYVDQELDINRLSDYDVDHIVPQSFLKDDSIDNKVLTRSDKARGKSDNVPSEEVVKKMKNYWRQLLNAKLITQRKFDNLTKAERGGLSELDKAGFIKRQLVETRQITKHVAQILDSRMNTKYDENDKLIREVKVITLKSKLVSDFRKDFQFYKVREINNYHHAHDAYLNAVVGTALIKKYPKLESEFVYGDYKVYDVRKMIAKSEQEIGKATAKYFFYSNIMNFFKTEITLANGEIRKRPLIETNGETGEIVWDKGRDFATVRKVLSMPQVNIVKKTEVQTGGFSKESILPKRNSDKLIARKKDWDPKKYGGFDSPTVAYSVLVVAKVEKGKSKKLKSVKELLGITIMERSSFEKNPIDFLEAKGYKEVKKDLIIKLPKYSLFELENGRKRMLASAGELQKGNELALPSKYVNFLYLASHYEKLKGSPEDNEQKQLFVEQHKHYLDEIIEQISEFSKRVILADANLDKVLSAYNKHRDKPIREQAENIIHLFTLTNLGAPAAFKYFDTTIDRKRYTSTKEVLDATLIHQSITGLYETRIDLSQLGGDGGGGSPAPGGGGGTLNIEDEYRLHETSKEPDVSLGSTWLSDFPQAWAETGGMGLAVRQAPLIIPLKATSTPVSIKQYPMSQEARLGIKPHIQRLLDQGILVPCQSPWNTPLLPVKKPGTNDYRPVQDLREVNKRVEDIHPTVPNPYNLLSGLPPSHQWYTVLDLKDAFFCLRLHPTSQPLFAFEWRDPEMGISGQLTWTRLPQGFKNSPTLFNEALHRDLAGFRIQHPDLILLQYVDDLLLAATSELDCQQGTRALLQTLGDLGYRASAKKAQICQKQVKYLGYLLKEGQRWLTEARKETVMGQPIPKTPRQLREFLGTAGFCRLWIPGFAEMAAPLYPLTKPGTLFNWGPDQQKAFQEIKQALLTAPALGLPDLTKPFELFVDEKQGYAKGVLTQKLGPWRRPVAYLSKKLDPVAAGWPPCLRMVAAIAVLTKDAGKLTMGQPLVILAPHAVEALVKQPPDRWLSNARMTHYQALLLDTDRVQFGPVVALNPATLLPLPEEGLQHDCLDILAEAHGTRSDLMDQPLPDADHTWYTDGSSFLQEGQRKAGAAVTTETEVIWARALPAGTSAQRAELIALTQALKMAEGKKLNVYTDSRYAFATAHIHGEIYRRRGWLTSEGKEIKNKDEILALLKALFLPKRLSIIHCPGHQKGNSAEARGNRMADQAAREVATRETPETSTLLAGKRTADGSEFEKRTADGSEFESPKKKAKVE

SEQ ID NO: 2273 - protein, 2096 aa, synthetic construct
MPAAKRVKLDGGDKKYSIGLDIGTNSVGWAVITDEYKVPSKKFKVLGNTDRHSIKKNLIGALLFDSGETAEATRLKRTARRRYTRRKNRICYLQEIFSNEMAKVDDSFFHRLEESFLVEEDKKHERHPIFGNIVDEVAYHEKYPTIYHLRKKLVDSTDKADLRLIYLALAHMIKFRGHFLIEGDLNPDNSDVDKLFIQLVQTYNQLFEENPINASGVDAKAILSARLSKSRRLENLIAQLPGEKKNGLFGNLIALSLGLTPNFKSNFDLAEDAKLQLSKDTYDDDLDNLLAQIGDQYADLFLAAKNLSDAILLSDILRVNTEITKAPLSASMIKRYDEHHQDLTLLKALVRQQLPEKYKEIFFDQSKNGYAGYIDGGASQEEFYKFIKPILEKMDGTEELLVKLNREDLLRKQRTFDNGSIPHQIHLGELHAILRRQEDFYPFLKDNREKIEKILTFRIPYYVGPLARGNSRFAWMTRKSEETITPWNFEEVVDKGASAQSFIERMTNFDKNLPNEKVLPKHSLLYEYFTVYNELTKVKYVTEGMRKPAFLSGEQKKAIVDLLFKTNRKVTVKQLKEDYFKKIECFDSVEISGVEDRFNASLGTYHDLLKIIKDKDFLDNEENEDILEDIVLTLTLFEDREMIEERLKTYAHLFDDKVMKQLKRRRYTGWGRLSRKLINGIRDKQSGKTILDFLKSDGFANRNFMQLIHDDSLTFKEDIQKAQVSGQGDSLHEHIANLAGSPAIKKGILQTVKVVDELVKVMGRHKPENIVIEMARENQTTQKGQKNSRERMKRIEEGIKELGSQILKEHPVENTQLQNEKLYLYYLQNGRDMYVDQELDINRLSDYDVDHIVPQSFLKDDSIDNKVLTRSDKARGKSDNVPSEEVVKKMKNYWRQLLNAKLITQRKFDNLTKAERGGLSELDKAGFIKRQLVETRQITKHVAQILDSRMNTKYDENDKLIREVKVITLKSKLVSDFRKDFQFYKVREINNYHHAHDAYLNAVVGTALIKKYPKLESEFVYGDYKVYDVRKMIAKSEQEIGKATAKYFFYSNIMNFFKTEITLANGEIRKRPLIETNGETGEIVWDKGRDFATVRKVLSMPQVNIVKKTEVQTGGFSKESILPKRNSDKLIARKKDWDPKKYGGFDSPTVAYSVLVVAKVEKGKSKKLKSVKELLGITIMERSSFEKNPIDFLEAKGYKEVKKDLIIKLPKYSLFELENGRKRMLASAGELQKGNELALPSKYVNFLYLASHYEKLKGSPEDNEQKQLFVEQHKHYLDEIIEQISEFSKRVILADANLDKVLSAYNKHRDKPIREQAENIIHLFTLTNLGAPAAFKYFDTTIDRKRYTSTKEVLDATLIHQSITGLYETRIDLSQLGGDGGGSSGGSEAAAKGGTLNIEDEYRLHETSKEPDVSLGSTWLSDFPQAWAETGGMGLAVRQAPLIIPLKATSTPVSIKQYPMSQEARLGIKPHIQRLLDQGILVPCQSPWNTPLLPVKKPGTNDYRPVQDLREVNKRVEDIHPTVPNPYNLLSGLPPSHQWYTVLDLKDAFFCLRLHPTSQPLFAFEWRDPEMGISGQLTWTRLPQGFKNSPTLFNEALHRDLAGFRIQHPDLILLQYVDDLLLAATSELDCQQGTRALLQTLGDLGYRASAKKAQICQKQVKYLGYLLKEGQRWLTEARKETVMGQPIPKTPRQLREFLGTAGFCRLWIPGFAEMAAPLYPLTKPGTLFNWGPDQQKAFQEIKQALLTAPALGLPDLTKPFELFVDEKQGYAKGVLTQKLGPWRRPVAYLSKKLDPVAAGWPPCLRMVAAIAVLTKDAGKLTMGQPLVILAPHAVEALVKQPPDRWLSNARMTHYQALLLDTDRVQFGPVVALNPATLLPLPEEGLQHDCLDILAEAHGTRSDLMDQPLPDADHTWYTDGSSFLQEGQRKAGAAVTTETEVIWARALPAGTSAQRAELIALTQALKMAEGKKLNVYTDSRYAFATAHIHGEIYRRRGWLTSEGKEIKNKDEILALLKALFLPKRLSIIHCPGHQKGNSAEARGNRMADQAAREVATRETPETSTLLAGKRTADGSEFEKRTADGSEFESPKKKAKVE

SEQ ID NO: 2274 - protein, 2094 aa, synthetic construct
MPAAKRVKLDGGDKKYSIGLDIGTNSVGWAVITDEYKVPSKKFKVLGNTDRHSIKKNLIGALLFDSGETAEATRLKRTARRRYTRRKNRICYLQEIFSNEMAKVDDSFFHRLEESFLVEEDKKHERHPIFGNIVDEVAYHEKYPTIYHLRKKLVDSTDKADLRLIYLALAHMIKFRGHFLIEGDLNPDNSDVDKLFIQLVQTYNQLFEENPINASGVDAKAILSARLSKSRRLENLIAQLPGEKKNGLFGNLIALSLGLTPNFKSNFDLAEDAKLQLSKDTYDDDLDNLLAQIGDQYADLFLAAKNLSDAILLSDILRVNTEITKAPLSASMIKRYDEHHQDLTLLKALVRQQLPEKYKEIFFDQSKNGYAGYIDGGASQEEFYKFIKPILEKMDGTEELLVKLNREDLLRKQRTFDNGSIPHQIHLGELHAILRRQEDFYPFLKDNREKIEKILTFRIPYYVGPLARGNSRFAWMTRKSEETITPWNFEEVVDKGASAQSFIERMTNFDKNLPNEKVLPKHSLLYEYFTVYNELTKVKYVTEGMRKPAFLSGEQKKAIVDLLFKTNRKVTVKQLKEDYFKKIECFDSVEISGVEDRFNASLGTYHDLLKIIKDKDFLDNEENEDILEDIVLTLTLFEDREMIEERLKTYAHLFDDKVMKQLKRRRYTGWGRLSRKLINGIRDKQSGKTILDFLKSDGFANRNFMQLIHDDSLTFKEDIQKAQVSGQGDSLHEHIANLAGSPAIKKGILQTVKVVDELVKVMGRHKPENIVIEMARENQTTQKGQKNSRERMKRIEEGIKELGSQILKEHPVENTQLQNEKLYLYYLQNGRDMYVDQELDINRLSDYDVDHIVPQSFLKDDSIDNKVLTRSDKARGKSDNVPSEEVVKKMKNYWRQLLNAKLITQRKFDNLTKAERGGLSELDKAGFIKRQLVETRQITKHVAQILDSRMNTKYDENDKLIREVKVITLKSKLVSDFRKDFQFYKVREINNYHHAHDAYLNAVVGTALIKKYPKLESEFVYGDYKVYDVRKMIAKSEQEIGKATAKYFFYSNIMNFFKTEITLANGEIRKRPLIETNGETGEIVWDKGRDFATVRKVLSMPQVNIVKKTEVQTGGFSKESILPKRNSDKLIARKKDWDPKKYGGFDSPTVAYSVLVVAKVEKGKSKKLKSVKELLGITIMERSSFEKNPIDFLEAKGYKEVKKDLIIKLPKYSLFELENGRKRMLASAGELQKGNELALPSKYVNFLYLASHYEKLKGSPEDNEQKQLFVEQHKHYLDEIIEQISEFSKRVILADANLDKVLSAYNKHRDKPIREQAENIIHLFTLTNLGAPAAFKYFDTTIDRKRYTSTKEVLDATLIHQSITGLYETRIDLSQLGGDGGGGSGGSGGSGGTLNIEDEYRLHETSKEPDVSLGSTWLSDFPQAWAETGGMGLAVRQAPLIIPLKATSTPVSIKQYPMSQEARLGIKPHIQRLLDQGILVPCQSPWNTPLLPVKKPGTNDYRPVQDLREVNKRVEDIHPTVPNPYNLLSGLPPSHQWYTVLDLKDAFFCLRLHPTSQPLFAFEWRDPEMGISGQLTWTRLPQGFKNSPTLFNEALHRDLAGFRIQHPDLILLQYVDDLLLAATSELDCQQGTRALLQTLGDLGYRASAKKAQICQKQVKYLGYLLKEGQRWLTEARKETVMGQPIPKTPRQLREFLGTAGFCRLWIPGFAEMAAPLYPLTKPGTLFNWGPDQQKAFQEIKQALLTAPALGLPDLTKPFELFVDEKQGYAKGVLTQKLGPWRRPVAYLSKKLDPVAAGWPPCLRMVAAIAVLTKDAGKLTMGQPLVILAPHAVEALVKQPPDRWLSNARMTHYQALLLDTDRVQFGPVVALNPATLLPLPEEGLQHDCLDILAEAHGTRSDLMDQPLPDADHTWYTDGSSFLQEGQRKAGAAVTTETEVIWARALPAGTSAQRAELIALTQALKMAEGKKLNVYTDSRYAFATAHIHGEIYRRRGWLTSEGKEIKNKDEILALLKALFLPKRLSIIHCPGHQKGNSAEARGNRMADQAAREVATRETPETSTLLAGKRTADGSEFEKRTADGSEFESPKKKAKVE

SEQ ID NO: 2275 - protein, 2096 aa, synthetic construct
MPAAKRVKLDGGDKKYSIGLDIGTNSVGWAVITDEYKVPSKKFKVLGNTDRHSIKKNLIGALLFDSGETAEATRLKRTARRRYTRRKNRICYLQEIFSNEMAKVDDSFFHRLEESFLVEEDKKHERHPIFGNIVDEVAYHEKYPTIYHLRKKLVDSTDKADLRLIYLALAHMIKFRGHFLIEGDLNPDNSDVDKLFIQLVQTYNQLFEENPINASGVDAKAILSARLSKSRRLENLIAQLPGEKKNGLFGNLIALSLGLTPNFKSNFDLAEDAKLQLSKDTYDDDLDNLLAQIGDQYADLFLAAKNLSDAILLSDILRVNTEITKAPLSASMIKRYDEHHQDLTLLKALVRQQLPEKYKEIFFDQSKNGYAGYIDGGASQEEFYKFIKPILEKMDGTEELLVKLNREDLLRKQRTFDNGSIPHQIHLGELHAILRRQEDFYPFLKDNREKIEKILTFRIPYYVGPLARGNSRFAWMTRKSEETITPWNFEEVVDKGASAQSFIERMTNFDKNLPNEKVLPKHSLLYEYFTVYNELTKVKYVTEGMRKPAFLSGEQKKAIVDLLFKTNRKVTVKQLKEDYFKKIECFDSVEISGVEDRFNASLGTYHDLLKIIKDKDFLDNEENEDILEDIVLTLTLFEDREMIEERLKTYAHLFDDKVMKQLKRRRYTGWGRLSRKLINGIRDKQSGKTILDFLKSDGFANRNFMQLIHDDSLTFKEDIQKAQVSGQGDSLHEHIANLAGSPAIKKGILQTVKVVDELVKVMGRHKPENIVIEMARENQTTQKGQKNSRERMKRIEEGIKELGSQILKEHPVENTQLQNEKLYLYYLQNGRDMYVDQELDINRLSDYDVDHIVPQSFLKDDSIDNKVLTRSDKARGKSDNVPSEEVVKKMKNYWRQLLNAKLITQRKFDNLTKAERGGLSELDKAGFIKRQLVETRQITKHVAQILDSRMNTKYDENDKLIREVKVITLKSKLVSDFRKDFQFYKVREINNYHHAHDAYLNAVVGTALIKKYPKLESEFVYGDYKVYDVRKMIAKSEQEIGKATAKYFFYSNIMNFFKTEITLANGEIRKRPLIETNGETGEIVWDKGRDFATVRKVLSMPQVNIVKKTEVQTGGFSKESILPKRNSDKLIARKKDWDPKKYGGFDSPTVAYSVLVVAKVEKGKSKKLKSVKELLGITIMERSSFEKNPIDFLEAKGYKEVKKDLIIKLPKYSLFELENGRKRMLASAGELQKGNELALPSKYVNFLYLASHYEKLKGSPEDNEQKQLFVEQHKHYLDEIIEQISEFSKRVILADANLDKVLSAYNKHRDKPIREQAENIIHLFTLTNLGAPAAFKYFDTTIDRKRYTSTKEVLDATLIHQSITGLYETRIDLSQLGGDGGGGGEAAAKGGSGGTLNIEDEYRLHETSKEPDVSLGSTWLSDFPQAWAETGGMGLAVRQAPLIIPLKATSTPVSIKQYPMSQEARLGIKPHIQRLLDQGILVPCQSPWNTPLLPVKKPGTNDYRPVQDLREVNKRVEDIHPTVPNPYNLLSGLPPSHQWYTVLDLKDAFFCLRLHPTSQPLFAFEWRDPEMGISGQLTWTRLPQGFKNSPTLFNEALHRDLAGFRIQHPDLILLQYVDDLLLAATSELDCQQGTRALLQTLGDLGYRASAKKAQICQKQVKYLGYLLKEGQRWLTEARKETVMGQPIPKTPRQLREFLGTAGFCRLWIPGFAEMAAPLYPLTKPGTLFNWGPDQQKAFQEIKQALLTAPALGLPDLTKPFELFVDEKQGYAKGVLTQKLGPWRRPVAYLSKKLDPVAAGWPPCLRMVAAIAVLTKDAGKLTMGQPLVILAPHAVEALVKQPPDRWLSNARMTHYQALLLDTDRVQFGPVVALNPATLLPLPEEGLQHDCLDILAEAHGTRSDLMDQPLPDADHTWYTDGSSFLQEGQRKAGAAVTTETEVIWARALPAGTSAQRAELIALTQALKMAEGKKLNVYTDSRYAFATAHIHGEIYRRRGWLTSEGKEIKNKDEILALLKALFLPKRLSIIHCPGHQKGNSAEARGNRMADQAAREVATRETPETSTLLAGKRTADGSEFEKRTADGSEFESPKKKAKVE

SEQ ID NO: 2276 - protein, 2095 aa, synthetic construct
MPAAKRVKLDGGDKKYSIGLDIGTNSVGWAVITDEYKVPSKKFKVLGNTDRHSIKKNLIGALLFDSGETAEATRLKRTARRRYTRRKNRICYLQEIFSNEMAKVDDSFFHRLEESFLVEEDKKHERHPIFGNIVDEVAYHEKYPTIYHLRKKLVDSTDKADLRLIYLALAHMIKFRGHFLIEGDLNPDNSDVDKLFIQLVQTYNQLFEENPINASGVDAKAILSARLSKSRRLENLIAQLPGEKKNGLFGNLIALSLGLTPNFKSNFDLAEDAKLQLSKDTYDDDLDNLLAQIGDQYADLFLAAKNLSDAILLSDILRVNTEITKAPLSASMIKRYDEHHQDLTLLKALVRQQLPEKYKEIFFDQSKNGYAGYIDGGASQEEFYKFIKPILEKMDGTEELLVKLNREDLLRKQRTFDNGSIPHQIHLGELHAILRRQEDFYPFLKDNREKIEKILTFRIPYYVGPLARGNSRFAWMTRKSEETITPWNFEEVVDKGASAQSFIERMTNFDKNLPNEKVLPKHSLLYEYFTVYNELTKVKYVTEGMRKPAFLSGEQKKAIVDLLFKTNRKVTVKQLKEDYFKKIECFDSVEISGVEDRFNASLGTYHDLLKIIKDKDFLDNEENEDILEDIVLTLTLFEDREMIEERLKTYAHLFDDKVMKQLKRRRYTGWGRLSRKLINGIRDKQSGKTILDFLKSDGFANRNFMQLIHDDSLTFKEDIQKAQVSGQGDSLHEHIANLAGSPAIKKGILQTVKVVDELVKVMGRHKPENIVIEMARENQTTQKGQKNSRERMKRIEEGIKELGSQILKEHPVENTQLQNEKLYLYYLQNGRDMYVDQELDINRLSDYDVDHIVPQSFLKDDSIDNKVLTRSDKARGKSDNVPSEEVVKKMKNYWRQLLNAKLITQRKFDNLTKAERGGLSELDKAGFIKRQLVETRQITKHVAQILDSRMNTKYDENDKLIREVKVITLKSKLVSDFRKDFQFYKVREINNYHHAHDAYLNAVVGTALIKKYPKLESEFVYGDYKVYDVRKMIAKSEQEIGKATAKYFFYSNIMNFFKTEITLANGEIRKRPLIETNGETGEIVWDKGRDFATVRKVLSMPQVNIVKKTEVQTGGFSKESILPKRNSDKLIARKKDWDPKKYGGFDSPTVAYSVLVVAKVEKGKSKKLKSVKELLGITIMERSSFEKNPIDFLEAKGYKEVKKDLIIKLPKYSLFELENGRKRMLASAGELQKGNELALPSKYVNFLYLASHYEKLKGSPEDNEQKQLFVEQHKHYLDEIIEQISEFSKRVILADANLDKVLSAYNKHRDKPIREQAENIIHLFTLTNLGAPAAFKYFDTTIDRKRYTSTKEVLDATLIHQSITGLYETRIDLSQLGGDGGGGGGSGGGGSGGTLNIEDEYRLHETSKEPDVSLGSTWLSDFPQAWAETGGMGLAVRQAPLIIPLKATSTPVSIKQYPMSQEARLGIKPHIQRLLDQGILVPCQSPWNTPLLPVKKPGTNDYRPVQDLREVNKRVEDIHPTVPNPYNLLSGLPPSHQWYTVLDLKDAFFCLRLHPTSQPLFAFEWRDPEMGISGQLTWTRLPQGFKNSPTLFNEALHRDLAGFRIQHPDLILLQYVDDLLLAATSELDCQQGTRALLQTLGDLGYRASAKKAQICQKQVKYLGYLLKEGQRWLTEARKETVMGQPIPKTPRQLREFLGTAGFCRLWIPGFAEMAAPLYPLTKPGTLFNWGPDQQKAFQEIKQALLTAPALGLPDLTKPFELFVDEKQGYAKGVLTQKLGPWRRPVAYLSKKLDPVAAGWPPCLRMVAAIAVLTKDAGKLTMGQPLVILAPHAVEALVKQPPDRWLSNARMTHYQALLLDTDRVQFGPVVALNPATLLPLPEEGLQHDCLDILAEAHGTRSDLMDQPLPDADHTWYTDGSSFLQEGQRKAGAAVTTETEVIWARALPAGTSAQRAELIALTQALKMAEGKKLNVYTDSRYAFATAHIHGEIYRRRGWLTSEGKEIKNKDEILALLKALFLPKRLSIIHCPGHQKGNSAEARGNRMADQAAREVATRETPETSTLLAGKRTADGSEFEKRTADGSEFESPKKKAKVE

SEQ ID NO: 2277 - protein, 2096 aa, synthetic construct
MPAAKRVKLDGGDKKYSIGLDIGTNSVGWAVITDEYKVPSKKFKVLGNTDRHSIKKNLIGALLFDSGETAEATRLKRTARRRYTRRKNRICYLQEIFSNEMAKVDDSFFHRLEESFLVEEDKKHERHPIFGNIVDEVAYHEKYPTIYHLRKKLVDSTDKADLRLIYLALAHMIKFRGHFLIEGDLNPDNSDVDKLFIQLVQTYNQLFEENPINASGVDAKAILSARLSKSRRLENLIAQLPGEKKNGLFGNLIALSLGLTPNFKSNFDLAEDAKLQLSKDTYDDDLDNLLAQIGDQYADLFLAAKNLSDAILLSDILRVNTEITKAPLSASMIKRYDEHHQDLTLLKALVRQQLPEKYKEIFFDQSKNGYAGYIDGGASQEEFYKFIKPILEKMDGTEELLVKLNREDLLRKQRTFDNGSIPHQIHLGELHAILRRQEDFYPFLKDNREKIEKILTFRIPYYVGPLARGNSRFAWMTRKSEETITPWNFEEVVDKGASAQSFIERMTNFDKNLPNEKVLPKHSLLYEYFTVYNELTKVKYVTEGMRKPAFLSGEQKKAIVDLLFKTNRKVTVKQLKEDYFKKIECFDSVEISGVEDRFNASLGTYHDLLKIIKDKDFLDNEENEDILEDIVLTLTLFEDREMIEERLKTYAHLFDDKVMKQLKRRRYTGWGRLSRKLINGIRDKQSGKTILDFLKSDGFANRNFMQLIHDDSLTFKEDIQKAQVSGQGDSLHEHIANLAGSPAIKKGILQTVKVVDELVKVMGRHKPENIVIEMARENQTTQKGQKNSRERMKRIEEGIKELGSQILKEHPVENTQLQNEKLYLYYLQNGRDMYVDQELDINRLSDYDVDHIVPQSFLKDDSIDNKVLTRSDKARGKSDNVPSEEVVKKMKNYWRQLLNAKLITQRKFDNLTKAERGGLSELDKAGFIKRQLVETRQITKHVAQILDSRMNTKYDENDKLIREVKVITLKSKLVSDFRKDFQFYKVREINNYHHAHDAYLNAVVGTALIKKYPKLESEFVYGDYKVYDVRKMIAKSEQEIGKATAKYFFYSNIMNFFKTEITLANGEIRKRPLIETNGETGEIVWDKGRDFATVRKVLSMPQVNIVKKTEVQTGGFSKESILPKRNSDKLIARKKDWDPKKYGGFDSPTVAYSVLVVAKVEKGKSKKLKSVKELLGITIMERSSFEKNPIDFLEAKGYKEVKKDLIIKLPKYSLFELENGRKRMLASAGELQKGNELALPSKYVNFLYLASHYEKLKGSPEDNEQKQLFVEQHKHYLDEIIEQISEFSKRVILADANLDKVLSAYNKHRDKPIREQAENIIHLFTLTNLGAPAAFKYFDTTIDRKRYTSTKEVLDATLIHQSITGLYETRIDLSQLGGDGGEAAAKPAPGGSGGTLNIEDEYRLHETSKEPDVSLGSTWLSDFPQAWAETGGMGLAVRQAPLIIPLKATSTPVSIKQYPMSQEARLGIKPHIQRLLDQGILVPCQSPWNTPLLPVKKPGTNDYRPVQDLREVNKRVEDIHPTVPNPYNLLSGLPPSHQWYTVLDLKDAFFCLRLHPTSQPLFAFEWRDPEMGISGQLTWTRLPQGFKNSPTLFNEALHRDLAGFRIQHPDLILLQYVDDLLLAATSELDCQQGTRALLQTLGDLGYRASAKKAQICQKQVKYLGYLLKEGQRWLTEARKETVMGQPIPKTPRQLREFLGTAGFCRLWIPGFAEMAAPLYPLTKPGTLFNWGPDQQKAFQEIKQALLTAPALGLPDLTKPFELFVDEKQGYAKGVLTQKLGPWRRPVAYLSKKLDPVAAGWPPCLRMVAAIAVLTKDAGKLTMGQPLVILAPHAVEALVKQPPDRWLSNARMTHYQALLLDTDRVQFGPVVALNPATLLPLPEEGLQHDCLDILAEAHGTRSDLMDQPLPDADHTWYTDGSSFLQEGQRKAGAAVTTETEVIWARALPAGTSAQRAELIALTQALKMAEGKKLNVYTDSRYAFATAHIHGEIYRRRGWLTSEGKEIKNKDEILALLKALFLPKRLSIIHCPGHQKGNSAEARGNRMADQAAREVATRETPETSTLLAGKRTADGSEFEKRTADGSEFESPKKKAKVE

SEQ ID NO: 2278 - protein, 2096 aa, synthetic construct
MPAAKRVKLDGGDKKYSIGLDIGTNSVGWAVITDEYKVPSKKFKVLGNTDRHSIKKNLIGALLFDSGETAEATRLKRTARRRYTRRKNRICYLQEIFSNEMAKVDDSFFHRLEESFLVEEDKKHERHPIFGNIVDEVAYHEKYPTIYHLRKKLVDSTDKADLRLIYLALAHMIKFRGHFLIEGDLNPDNSDVDKLFIQLVQTYNQLFEENPINASGVDAKAILSARLSKSRRLENLIAQLPGEKKNGLFGNLIALSLGLTPNFKSNFDLAEDAKLQLSKDTYDDDLDNLLAQIGDQYADLFLAAKNLSDAILLSDILRVNTEITKAPLSASMIKRYDEHHQDLTLLKALVRQQLPEKYKEIFFDQSKNGYAGYIDGGASQEEFYKFIKPILEKMDGTEELLVKLNREDLLRKQRTFDNGSIPHQIHLGELHAILRRQEDFYPFLKDNREKIEKILTFRIPYYVGPLARGNSRFAWMTRKSEETITPWNFEEVVDKGASAQSFIERMTNFDKNLPNEKVLPKHSLLYEYFTVYNELTKVKYVTEGMRKPAFLSGEQKKAIVDLLFKTNRKVTVKQLKEDYFKKIECFDSVEISGVEDRFNASLGTYHDLLKIIKDKDFLDNEENEDILEDIVLTLTLFEDREMIEERLKTYAHLFDDKVMKQLKRRRYTGWGRLSRKLINGIRDKQSGKTILDFLKSDGFANRNFMQLIHDDSLTFKEDIQKAQVSGQGDSLHEHIANLAGSPAIKKGILQTVKVVDELVKVMGRHKPENIVIEMARENQTTQKGQKNSRERMKRIEEGIKELGSQILKEHPVENTQLQNEKLYLYYLQNGRDMYVDQELDINRLSDYDVDHIVPQSFLKDDSIDNKVLTRSDKARGKSDNVPSEEVVKKMKNYWRQLLNAKLITQRKFDNLTKAERGGLSELDKAGFIKRQLVETRQITKHVAQILDSRMNTKYDENDKLIREVKVITLKSKLVSDFRKDFQFYKVREINNYHHAHDAYLNAVVGTALIKKYPKLESEFVYGDYKVYDVRKMIAKSEQEIGKATAKYFFYSNIMNFFKTEITLANGEIRKRPLIETNGETGEIVWDKGRDFATVRKVLSMPQVNIVKKTEVQTGGFSKESILPKRNSDKLIARKKDWDPKKYGGFDSPTVAYSVLVVAKVEKGKSKKLKSVKELLGITIMERSSFEKNPIDFLEAKGYKEVKKDLIIKLPKYSLFELENGRKRMLASAGELQKGNELALPSKYVNFLYLASHYEKLKGSPEDNEQKQLFVEQHKHYLDEIIEQISEFSKRVILADANLDKVLSAYNKHRDKPIREQAENIIHLFTLTNLGAPAAFKYFDTTIDRKRYTSTKEVLDATLIHQSITGLYETRIDLSQLGGDGGEAAAKGGGPAPGGTLNIEDEYRLHETSKEPDVSLGSTWLSDFPQAWAETGGMGLAVRQAPLIIPLKATSTPVSIKQYPMSQEARLGIKPHIQRLLDQGILVPCQSPWNTPLLPVKKPGTNDYRPVQDLREVNKRVEDIHPTVPNPYNLLSGLPPSHQWYTVLDLKDAFFCLRLHPTSQPLFAFEWRDPEMGISGQLTWTRLPQGFKNSPTLFNEALHRDLAGFRIQHPDLILLQYVDDLLLAATSELDCQQGTRALLQTLGDLGYRASAKKAQICQKQVKYLGYLLKEGQRWLTEARKETVMGQPIPKTPRQLREFLGTAGFCRLWIPGFAEMAAPLYPLTKPGTLFNWGPDQQKAFQEIKQALLTAPALGLPDLTKPFELFVDEKQGYAKGVLTQKLGPWRRPVAYLSKKLDPVAAGWPPCLRMVAAIAVLTKDAGKLTMGQPLVILAPHAVEALVKQPPDRWLSNARMTHYQALLLDTDRVQFGPVVALNPATLLPLPEEGLQHDCLDILAEAHGTRSDLMDQPLPDADHTWYTDGSSFLQEGQRKAGAAVTTETEVIWARALPAGTSAQRAELIALTQALKMAEGKKLNVYTDSRYAFATAHIHGEIYRRRGWLTSEGKEIKNKDEILALLKALFLPKRLSIIHCPGHQKGNSAEARGNRMADQAAREVATRETPETSTLLAGKRTADGSEFEKRTADGSEFESPKKKAKVE

SEQ ID NO: 2279 - protein, 2096 aa, synthetic construct
MPAAKRVKLDGGDKKYSIGLDIGTNSVGWAVITDEYKVPSKKFKVLGNTDRHSIKKNLIGALLFDSGETAEATRLKRTARRRYTRRKNRICYLQEIFSNEMAKVDDSFFHRLEESFLVEEDKKHERHPIFGNIVDEVAYHEKYPTIYHLRKKLVDSTDKADLRLIYLALAHMIKFRGHFLIEGDLNPDNSDVDKLFIQLVQTYNQLFEENPINASGVDAKAILSARLSKSRRLENLIAQLPGEKKNGLFGNLIALSLGLTPNFKSNFDLAEDAKLQLSKDTYDDDLDNLLAQIGDQYADLFLAAKNLSDAILLSDILRVNTEITKAPLSASMIKRYDEHHQDLTLLKALVRQQLPEKYKEIFFDQSKNGYAGYIDGGASQEEFYKFIKPILEKMDGTEELLVKLNREDLLRKQRTFDNGSIPHQIHLGELHAILRRQEDFYPFLKDNREKIEKILTFRIPYYVGPLARGNSRFAWMTRKSEETITPWNFEEVVDKGASAQSFIERMTNFDKNLPNEKVLPKHSLLYEYFTVYNELTKVKYVTEGMRKPAFLSGEQKKAIVDLLFKTNRKVTVKQLKEDYFKKIECFDSVEISGVEDRFNASLGTYHDLLKIIKDKDFLDNEENEDILEDIVLTLTLFEDREMIEERLKTYAHLFDDKVMKQLKRRRYTGWGRLSRKLINGIRDKQSGKTILDFLKSDGFANRNFMQLIHDDSLTFKEDIQKAQVSGQGDSLHEHIANLAGSPAIKKGILQTVKVVDELVKVMGRHKPENIVIEMARENQTTQKGQKNSRERMKRIEEGIKELGSQILKEHPVENTQLQNEKLYLYYLQNGRDMYVDQELDINRLSDYDVDHIVPQSFLKDDSIDNKVLTRSDKARGKSDNVPSEEVVKKMKNYWRQLLNAKLITQRKFDNLTKAERGGLSELDKAGFIKRQLVETRQITKHVAQILDSRMNTKYDENDKLIREVKVITLKSKLVSDFRKDFQFYKVREINNYHHAHDAYLNAVVGTALIKKYPKLESEFVYGDYKVYDVRKMIAKSEQEIGKATAKYFFYSNIMNFFKTEITLANGEIRKRPLIETNGETGEIVWDKGRDFATVRKVLSMPQVNIVKKTEVQTGGFSKESILPKRNSDKLIARKKDWDPKKYGGFDSPTVAYSVLVVAKVEKGKSKKLKSVKELLGITIMERSSFEKNPIDFLEAKGYKEVKKDLIIKLPKYSLFELENGRKRMLASAGELQKGNELALPSKYVNFLYLASHYEKLKGSPEDNEQKQLFVEQHKHYLDEIIEQISEFSKRVILADANLDKVLSAYNKHRDKPIREQAENIIHLFTLTNLGAPAAFKYFDTTIDRKRYTSTKEVLDATLIHQSITGLYETRIDLSQLGGDGGGGGEAAAKPAPGGTLNIEDEYRLHETSKEPDVSLGSTWLSDFPQAWAETGGMGLAVRQAPLIIPLKATSTPVSIKQYPMSQEARLGIKPHIQRLLDQGILVPCQSPWNTPLLPVKKPGTNDYRPVQDLREVNKRVEDIHPTVPNPYNLLSGLPPSHQWYTVLDLKDAFFCLRLHPTSQPLFAFEWRDPEMGISGQLTWTRLPQGFKNSPTLFNEALHRDLAGFRIQHPDLILLQYVDDLLLAATSELDCQQGTRALLQTLGDLGYRASAKKAQICQKQVKYLGYLLKEGQRWLTEARKETVMGQPIPKTPRQLREFLGTAGFCRLWIPGFAEMAAPLYPLTKPGTLFNWGPDQQKAFQEIKQALLTAPALGLPDLTKPFELFVDEKQGYAKGVLTQKLGPWRRPVAYLSKKLDPVAAGWPPCLRMVAAIAVLTKDAGKLTMGQPLVILAPHAVEALVKQPPDRWLSNARMTHYQALLLDTDRVQFGPVVALNPATLLPLPEEGLQHDCLDILAEAHGTRSDLMDQPLPDADHTWYTDGSSFLQEGQRKAGAAVTTETEVIWARALPAGTSAQRAELIALTQALKMAEGKKLNVYTDSRYAFATAHIHGEIYRRRGWLTSEGKEIKNKDEILALLKALFLPKRLSIIHCPGHQKGNSAEARGNRMADQAAREVATRETPETSTLLAGKRTADGSEFEKRTADGSEFESPKKKAKVE

SEQ ID NO: 2280 - protein, 2100 aa, synthetic construct
MPAAKRVKLDGGDKKYSIGLDIGTNSVGWAVITDEYKVPSKKFKVLGNTDRHSIKKNLIGALLFDSGETAEATRLKRTARRRYTRRKNRICYLQEIFSNEMAKVDDSFFHRLEESFLVEEDKKHERHPIFGNIVDEVAYHEKYPTIYHLRKKLVDSTDKADLRLIYLALAHMIKFRGHFLIEGDLNPDNSDVDKLFIQLVQTYNQLFEENPINASGVDAKAILSARLSKSRRLENLIAQLPGEKKNGLFGNLIALSLGLTPNFKSNFDLAEDAKLQLSKDTYDDDLDNLLAQIGDQYADLFLAAKNLSDAILLSDILRVNTEITKAPLSASMIKRYDEHHQDLTLLKALVRQQLPEKYKEIFFDQSKNGYAGYIDGGASQEEFYKFIKPILEKMDGTEELLVKLNREDLLRKQRTFDNGSIPHQIHLGELHAILRRQEDFYPFLKDNREKIEKILTFRIPYYVGPLARGNSRFAWMTRKSEETITPWNFEEVVDKGASAQSFIERMTNFDKNLPNEKVLPKHSLLYEYFTVYNELTKVKYVTEGMRKPAFLSGEQKKAIVDLLFKTNRKVTVKQLKEDYFKKIECFDSVEISGVEDRFNASLGTYHDLLKIIKDKDFLDNEENEDILEDIVLTLTLFEDREMIEERLKTYAHLFDDKVMKQLKRRRYTGWGRLSRKLINGIRDKQSGKTILDFLKSDGFANRNFMQLIHDDSLTFKEDIQKAQVSGQGDSLHEHIANLAGSPAIKKGILQTVKVVDELVKVMGRHKPENIVIEMARENQTTQKGQKNSRERMKRIEEGIKELGSQILKEHPVENTQLQNEKLYLYYLQNGRDMYVDQELDINRLSDYDVDHIVPQSFLKDDSIDNKVLTRSDKARGKSDNVPSEEVVKKMKNYWRQLLNAKLITQRKFDNLTKAERGGLSELDKAGFIKRQLVETRQITKHVAQILDSRMNTKYDENDKLIREVKVITLKSKLVSDFRKDFQFYKVREINNYHHAHDAYLNAVVGTALIKKYPKLESEFVYGDYKVYDVRKMIAKSEQEIGKATAKYFFYSNIMNFFKTEITLANGEIRKRPLIETNGETGEIVWDKGRDFATVRKVLSMPQVNIVKKTEVQTGGFSKESILPKRNSDKLIARKKDWDPKKYGGFDSPTVAYSVLVVAKVEKGKSKKLKSVKELLGITIMERSSFEKNPIDFLEAKGYKEVKKDLIIKLPKYSLFELENGRKRMLASAGELQKGNELALPSKYVNFLYLASHYEKLKGSPEDNEQKQLFVEQHKHYLDEIIEQISEFSKRVILADANLDKVLSAYNKHRDKPIREQAENIIHLFTLTNLGAPAAFKYFDTTIDRKRYTSTKEVLDATLIHQSITGLYETRIDLSQLGGDGGGSSGSSGSSGSSGSSGGTLNIEDEYRLHETSKEPDVSLGSTWLSDFPQAWAETGGMGLAVRQAPLIIPLKATSTPVSIKQYPMSQEARLGIKPHIQRLLDQGILVPCQSPWNTPLLPVKKPGTNDYRPVQDLREVNKRVEDIHPTVPNPYNLLSGLPPSHQWYTVLDLKDAFFCLRLHPTSQPLFAFEWRDPEMGISGQLTWTRLPQGFKNSPTLFNEALHRDLAGFRIQHPDLILLQYVDDLLLAATSELDCQQGTRALLQTLGDLGYRASAKKAQICQKQVKYLGYLLKEGQRWLTEARKETVMGQPIPKTPRQLREFLGTAGFCRLWIPGFAEMAAPLYPLTKPGTLFNWGPDQQKAFQEIKQALLTAPALGLPDLTKPFELFVDEKQGYAKGVLTQKLGPWRRPVAYLSKKLDPVAAGWPPCLRMVAAIAVLTKDAGKLTMGQPLVILAPHAVEALVKQPPDRWLSNARMTHYQALLLDTDRVQFGPVVALNPATLLPLPEEGLQHDCLDILAEAHGTRSDLMDQPLPDADHTWYTDGSSFLQEGQRKAGAAVTTETEVIWARALPAGTSAQRAELIALTQALKMAEGKKLNVYTDSRYAFATAHIHGEIYRRRGWLTSEGKEIKNKDEILALLKALFLPKRLSIIHCPGHQKGNSAEARGNRMADQAAREVATRETPETSTLLAGKRTADGSEFEKRTADGSEFESPKKKAKVE

SEQ ID NO: 2281 - protein, 2093 aa, synthetic construct
MPAAKRVKLDGGDKKYSIGLDIGTNSVGWAVITDEYKVPSKKFKVLGNTDRHSIKKNLIGALLFDSGETAEATRLKRTARRRYTRRKNRICYLQEIFSNEMAKVDDSFFHRLEESFLVEEDKKHERHPIFGNIVDEVAYHEKYPTIYHLRKKLVDSTDKADLRLIYLALAHMIKFRGHFLIEGDLNPDNSDVDKLFIQLVQTYNQLFEENPINASGVDAKAILSARLSKSRRLENLIAQLPGEKKNGLFGNLIALSLGLTPNFKSNFDLAEDAKLQLSKDTYDDDLDNLLAQIGDQYADLFLAAKNLSDAILLSDILRVNTEITKAPLSASMIKRYDEHHQDLTLLKALVRQQLPEKYKEIFFDQSKNGYAGYIDGGASQEEFYKFIKPILEKMDGTEELLVKLNREDLLRKQRTFDNGSIPHQIHLGELHAILRRQEDFYPFLKDNREKIEKILTFRIPYYVGPLARGNSRFAWMTRKSEETITPWNFEEVVDKGASAQSFIERMTNFDKNLPNEKVLPKHSLLYEYFTVYNELTKVKYVTEGMRKPAFLSGEQKKAIVDLLFKTNRKVTVKQLKEDYFKKIECFDSVEISGVEDRFNASLGTYHDLLKIIKDKDFLDNEENEDILEDIVLTLTLFEDREMIEERLKTYAHLFDDKVMKQLKRRRYTGWGRLSRKLINGIRDKQSGKTILDFLKSDGFANRNFMQLIHDDSLTFKEDIQKAQVSGQGDSLHEHIANLAGSPAIKKGILQTVKVVDELVKVMGRHKPENIVIEMARENQTTQKGQKNSRERMKRIEEGIKELGSQILKEHPVENTQLQNEKLYLYYLQNGRDMYVDQELDINRLSDYDVDHIVPQSFLKDDSIDNKVLTRSDKARGKSDNVPSEEVVKKMKNYWRQLLNAKLITQRKFDNLTKAERGGLSELDKAGFIKRQLVETRQITKHVAQILDSRMNTKYDENDKLIREVKVITLKSKLVSDFRKDFQFYKVREINNYHHAHDAYLNAVVGTALIKKYPKLESEFVYGDYKVYDVRKMIAKSEQEIGKATAKYFFYSNIMNFFKTEITLANGEIRKRPLIETNGETGEIVWDKGRDFATVRKVLSMPQVNIVKKTEVQTGGFSKESILPKRNSDKLIARKKDWDPKKYGGFDSPTVAYSVLVVAKVEKGKSKKLKSVKELLGITIMERSSFEKNPIDFLEAKGYKEVKKDLIIKLPKYSLFELENGRKRMLASAGELQKGNELALPSKYVNFLYLASHYEKLKGSPEDNEQKQLFVEQHKHYLDEIIEQISEFSKRVILADANLDKVLSAYNKHRDKPIREQAENIIHLFTLTNLGAPAAFKYFDTTIDRKRYTSTKEVLDATLIHQSITGLYETRIDLSQLGGDGGEAAAKGGGGGTLNIEDEYRLHETSKEPDVSLGSTWLSDFPQAWAETGGMGLAVRQAPLIIPLKATSTPVSIKQYPMSQEARLGIKPHIQRLLDQGILVPCQSPWNTPLLPVKKPGTNDYRPVQDLREVNKRVEDIHPTVPNPYNLLSGLPPSHQWYTVLDLKDAFFCLRLHPTSQPLFAFEWRDPEMGISGQLTWTRLPQGFKNSPTLFNEALHRDLAGFRIQHPDLILLQYVDDLLLAATSELDCQQGTRALLQTLGDLGYRASAKKAQICQKQVKYLGYLLKEGQRWLTEARKETVMGQPIPKTPRQLREFLGTAGFCRLWIPGFAEMAAPLYPLTKPGTLFNWGPDQQKAFQEIKQALLTAPALGLPDLTKPFELFVDEKQGYAKGVLTQKLGPWRRPVAYLSKKLDPVAAGWPPCLRMVAAIAVLTKDAGKLTMGQPLVILAPHAVEALVKQPPDRWLSNARMTHYQALLLDTDRVQFGPVVALNPATLLPLPEEGLQHDCLDILAEAHGTRSDLMDQPLPDADHTWYTDGSSFLQEGQRKAGAAVTTETEVIWARALPAGTSAQRAELIALTQALKMAEGKKLNVYTDSRYAFATAHIHGEIYRRRGWLTSEGKEIKNKDEILALLKALFLPKRLSIIHCPGHQKGNSAEARGNRMADQAAREVATRETPETSTLLAGKRTADGSEFEKRTADGSEFESPKKKAKVE

SEQ ID NO: 2282 - protein, 2096 aa, synthetic construct
MPAAKRVKLDGGDKKYSIGLDIGTNSVGWAVITDEYKVPSKKFKVLGNTDRHSIKKNLIGALLFDSGETAEATRLKRTARRRYTRRKNRICYLQEIFSNEMAKVDDSFFHRLEESFLVEEDKKHERHPIFGNIVDEVAYHEKYPTIYHLRKKLVDSTDKADLRLIYLALAHMIKFRGHFLIEGDLNPDNSDVDKLFIQLVQTYNQLFEENPINASGVDAKAILSARLSKSRRLENLIAQLPGEKKNGLFGNLIALSLGLTPNFKSNFDLAEDAKLQLSKDTYDDDLDNLLAQIGDQYADLFLAAKNLSDAILLSDILRVNTEITKAPLSASMIKRYDEHHQDLTLLKALVRQQLPEKYKEIFFDQSKNGYAGYIDGGASQEEFYKFIKPILEKMDGTEELLVKLNREDLLRKQRTFDNGSIPHQIHLGELHAILRRQEDFYPFLKDNREKIEKILTFRIPYYVGPLARGNSRFAWMTRKSEETITPWNFEEVVDKGASAQSFIERMTNFDKNLPNEKVLPKHSLLYEYFTVYNELTKVKYVTEGMRKPAFLSGEQKKAIVDLLFKTNRKVTVKQLKEDYFKKIECFDSVEISGVEDRFNASLGTYHDLLKIIKDKDFLDNEENEDILEDIVLTLTLFEDREMIEERLKTYAHLFDDKVMKQLKRRRYTGWGRLSRKLINGIRDKQSGKTILDFLKSDGFANRNFMQLIHDDSLTFKEDIQKAQVSGQGDSLHEHIANLAGSPAIKKGILQTVKVVDELVKVMGRHKPENIVIEMARENQTTQKGQKNSRERMKRIEEGIKELGSQILKEHPVENTQLQNEKLYLYYLQNGRDMYVDQELDINRLSDYDVDHIVPQSFLKDDSIDNKVLTRSDKARGKSDNVPSEEVVKKMKNYWRQLLNAKLITQRKFDNLTKAERGGLSELDKAGFIKRQLVETRQITKHVAQILDSRMNTKYDENDKLIREVKVITLKSKLVSDFRKDFQFYKVREINNYHHAHDAYLNAVVGTALIKKYPKLESEFVYGDYKVYDVRKMIAKSEQEIGKATAKYFFYSNIMNFFKTEITLANGEIRKRPLIETNGETGEIVWDKGRDFATVRKVLSMPQVNIVKKTEVQTGGFSKESILPKRNSDKLIARKKDWDPKKYGGFDSPTVAYSVLVVAKVEKGKSKKLKSVKELLGITIMERSSFEKNPIDFLEAKGYKEVKKDLIIKLPKYSLFELENGRKRMLASAGELQKGNELALPSKYVNFLYLASHYEKLKGSPEDNEQKQLFVEQHKHYLDEIIEQISEFSKRVILADANLDKVLSAYNKHRDKPIREQAENIIHLFTLTNLGAPAAFKYFDTTIDRKRYTSTKEVLDATLIHQSITGLYETRIDLSQLGGDGGGSSPAPEAAAKGGTLNIEDEYRLHETSKEPDVSLGSTWLSDFPQAWAETGGMGLAVRQAPLIIPLKATSTPVSIKQYPMSQEARLGIKPHIQRLLDQGILVPCQSPWNTPLLPVKKPGTNDYRPVQDLREVNKRVEDIHPTVPNPYNLLSGLPPSHQWYTVLDLKDAFFCLRLHPTSQPLFAFEWRDPEMGISGQLTWTRLPQGFKNSPTLFNEALHRDLAGFRIQHPDLILLQYVDDLLLAATSELDCQQGTRALLQTLGDLGYRASAKKAQICQKQVKYLGYLLKEGQRWLTEARKETVMGQPIPKTPRQLREFLGTAGFCRLWIPGFAEMAAPLYPLTKPGTLFNWGPDQQKAFQEIKQALLTAPALGLPDLTKPFELFVDEKQGYAKGVLTQKLGPWRRPVAYLSKKLDPVAAGWPPCLRMVAAIAVLTKDAGKLTMGQPLVILAPHAVEALVKQPPDRWLSNARMTHYQALLLDTDRVQFGPVVALNPATLLPLPEEGLQHDCLDILAEAHGTRSDLMDQPLPDADHTWYTDGSSFLQEGQRKAGAAVTTETEVIWARALPAGTSAQRAELIALTQALKMAEGKKLNVYTDSRYAFATAHIHGEIYRRRGWLTSEGKEIKNKDEILALLKALFLPKRLSIIHCPGHQKGNSAEARGNRMADQAAREVATRETPETSTLLAGKRTADGSEFEKRTADGSEFESPKKKAKVE

SEQ ID NO: 2283 - protein, 2094 aa, synthetic construct
MPAAKRVKLDGGDKKYSIGLDIGTNSVGWAVITDEYKVPSKKFKVLGNTDRHSIKKNLIGALLFDSGETAEATRLKRTARRRYTRRKNRICYLQEIFSNEMAKVDDSFFHRLEESFLVEEDKKHERHPIFGNIVDEVAYHEKYPTIYHLRKKLVDSTDKADLRLIYLALAHMIKFRGHFLIEGDLNPDNSDVDKLFIQLVQTYNQLFEENPINASGVDAKAILSARLSKSRRLENLIAQLPGEKKNGLFGNLIALSLGLTPNFKSNFDLAEDAKLQLSKDTYDDDLDNLLAQIGDQYADLFLAAKNLSDAILLSDILRVNTEITKAPLSASMIKRYDEHHQDLTLLKALVRQQLPEKYKEIFFDQSKNGYAGYIDGGASQEEFYKFIKPILEKMDGTEELLVKLNREDLLRKQRTFDNGSIPHQIHLGELHAILRRQEDFYPFLKDNREKIEKILTFRIPYYVGPLARGNSRFAWMTRKSEETITPWNFEEVVDKGASAQSFIERMTNFDKNLPNEKVLPKHSLLYEYFTVYNELTKVKYVTEGMRKPAFLSGEQKKAIVDLLFKTNRKVTVKQLKEDYFKKIECFDSVEISGVEDRFNASLGTYHDLLKIIKDKDFLDNEENEDILEDIVLTLTLFEDREMIEERLKTYAHLFDDKVMKQLKRRRYTGWGRLSRKLINGIRDKQSGKTILDFLKSDGFANRNFMQLIHDDSLTFKEDIQKAQVSGQGDSLHEHIANLAGSPAIKKGILQTVKVVDELVKVMGRHKPENIVIEMARENQTTQKGQKNSRERMKRIEEGIKELGSQILKEHPVENTQLQNEKLYLYYLQNGRDMYVDQELDINRLSDYDVDHIVPQSFLKDDSIDNKVLTRSDKARGKSDNVPSEEVVKKMKNYWRQLLNAKLITQRKFDNLTKAERGGLSELDKAGFIKRQLVETRQITKHVAQILDSRMNTKYDENDKLIREVKVITLKSKLVSDFRKDFQFYKVREINNYHHAHDAYLNAVVGTALIKKYPKLESEFVYGDYKVYDVRKMIAKSEQEIGKATAKYFFYSNIMNFFKTEITLANGEIRKRPLIETNGETGEIVWDKGRDFATVRKVLSMPQVNIVKKTEVQTGGFSKESILPKRNSDKLIARKKDWDPKKYGGFDSPTVAYSVLVVAKVEKGKSKKLKSVKELLGITIMERSSFEKNPIDFLEAKGYKEVKKDLIIKLPKYSLFELENGRKRMLASAGELQKGNELALPSKYVNFLYLASHYEKLKGSPEDNEQKQLFVEQHKHYLDEIIEQISEFSKRVILADANLDKVLSAYNKHRDKPIREQAENIIHLFTLTNLGAPAAFKYFDTTIDRKRYTSTKEVLDATLIHQSITGLYETRIDLSQLGGDGGGSSPAPGGGGGTLNIEDEYRLHETSKEPDVSLGSTWLSDFPQAWAETGGMGLAVRQAPLIIPLKATSTPVSIKQYPMSQEARLGIKPHIQRLLDQGILVPCQSPWNTPLLPVKKPGTNDYRPVQDLREVNKRVEDIHPTVPNPYNLLSGLPPSHQWYTVLDLKDAFFCLRLHPTSQPLFAFEWRDPEMGISGQLTWTRLPQGFKNSPTLFNEALHRDLAGFRIQHPDLILLQYVDDLLLAATSELDCQQGTRALLQTLGDLGYRASAKKAQICQKQVKYLGYLLKEGQRWLTEARKETVMGQPIPKTPRQLREFLGTAGFCRLWIPGFAEMAAPLYPLTKPGTLFNWGPDQQKAFQEIKQALLTAPALGLPDLTKPFELFVDEKQGYAKGVLTQKLGPWRRPVAYLSKKLDPVAAGWPPCLRMVAAIAVLTKDAGKLTMGQPLVILAPHAVEALVKQPPDRWLSNARMTHYQALLLDTDRVQFGPVVALNPATLLPLPEEGLQHDCLDILAEAHGTRSDLMDQPLPDADHTWYTDGSSFLQEGQRKAGAAVTTETEVIWARALPAGTSAQRAELIALTQALKMAEGKKLNVYTDSRYAFATAHIHGEIYRRRGWLTSEGKEIKNKDEILALLKALFLPKRLSIIHCPGHQKGNSAEARGNRMADQAAREVATRETPETSTLLAGKRTADGSEFEKRTADGSEFESPKKKAKVE

SEQ ID NO: 2284 - protein, 2090 aa, synthetic construct
MPAAKRVKLDGGDKKYSIGLDIGTNSVGWAVITDEYKVPSKKFKVLGNTDRHSIKKNLIGALLFDSGETAEATRLKRTARRRYTRRKNRICYLQEIFSNEMAKVDDSFFHRLEESFLVEEDKKHERHPIFGNIVDEVAYHEKYPTIYHLRKKLVDSTDKADLRLIYLALAHMIKFRGHFLIEGDLNPDNSDVDKLFIQLVQTYNQLFEENPINASGVDAKAILSARLSKSRRLENLIAQLPGEKKNGLFGNLIALSLGLTPNFKSNFDLAEDAKLQLSKDTYDDDLDNLLAQIGDQYADLFLAAKNLSDAILLSDILRVNTEITKAPLSASMIKRYDEHHQDLTLLKALVRQQLPEKYKEIFFDQSKNGYAGYIDGGASQEEFYKFIKPILEKMDGTEELLVKLNREDLLRKQRTFDNGSIPHQIHLGELHAILRRQEDFYPFLKDNREKIEKILTFRIPYYVGPLARGNSRFAWMTRKSEETITPWNFEEVVDKGASAQSFIERMTNFDKNLPNEKVLPKHSLLYEYFTVYNELTKVKYVTEGMRKPAFLSGEQKKAIVDLLFKTNRKVTVKQLKEDYFKKIECFDSVEISGVEDRFNASLGTYHDLLKIIKDKDFLDNEENEDILEDIVLTLTLFEDREMIEERLKTYAHLFDDKVMKQLKRRRYTGWGRLSRKLINGIRDKQSGKTILDFLKSDGFANRNFMQLIHDDSLTFKEDIQKAQVSGQGDSLHEHIANLAGSPAIKKGILQTVKVVDELVKVMGRHKPENIVIEMARENQTTQKGQKNSRERMKRIEEGIKELGSQILKEHPVENTQLQNEKLYLYYLQNGRDMYVDQELDINRLSDYDVDHIVPQSFLKDDSIDNKVLTRSDKARGKSDNVPSEEVVKKMKNYWRQLLNAKLITQRKFDNLTKAERGGLSELDKAGFIKRQLVETRQITKHVAQILDSRMNTKYDENDKLIREVKVITLKSKLVSDFRKDFQFYKVREINNYHHAHDAYLNAVVGTALIKKYPKLESEFVYGDYKVYDVRKMIAKSEQEIGKATAKYFFYSNIMNFFKTEITLANGEIRKRPLIETNGETGEIVWDKGRDFATVRKVLSMPQVNIVKKTEVQTGGFSKESILPKRNSDKLIARKKDWDPKKYGGFDSPTVAYSVLVVAKVEKGKSKKLKSVKELLGITIMERSSFEKNPIDFLEAKGYKEVKKDLIIKLPKYSLFELENGRKRMLASAGELQKGNELALPSKYVNFLYLASHYEKLKGSPEDNEQKQLFVEQHKHYLDEIIEQISEFSKRVILADANLDKVLSAYNKHRDKPIREQAENIIHLFTLTNLGAPAAFKYFDTTIDRKRYTSTKEVLDATLIHQSITGLYETRIDLSQLGGDGGEAAAKGGTLNIEDEYRLHETSKEPDVSLGSTWLSDFPQAWAETGGMGLAVRQAPLIIPLKATSTPVSIKQYPMSQEARLGIKPHIQRLLDQGILVPCQSPWNTPLLPVKKPGTNDYRPVQDLREVNKRVEDIHPTVPNPYNLLSGLPPSHQWYTVLDLKDAFFCLRLHPTSQPLFAFEWRDPEMGISGQLTWTRLPQGFKNSPTLFNEALHRDLAGFRIQHPDLILLQYVDDLLLAATSELDCQQGTRALLQTLGDLGYRASAKKAQICQKQVKYLGYLLKEGQRWLTEARKETVMGQPIPKTPRQLREFLGTAGFCRLWIPGFAEMAAPLYPLTKPGTLFNWGPDQQKAFQEIKQALLTAPALGLPDLTKPFELFVDEKQGYAKGVLTQKLGPWRRPVAYLSKKLDPVAAGWPPCLRMVAAIAVLTKDAGKLTMGQPLVILAPHAVEALVKQPPDRWLSNARMTHYQALLLDTDRVQFGPVVALNPATLLPLPEEGLQHDCLDILAEAHGTRSDLMDQPLPDADHTWYTDGSSFLQEGQRKAGAAVTTETEVIWARALPAGTSAQRAELIALTQALKMAEGKKLNVYTDSRYAFATAHIHGEIYRRRGWLTSEGKEIKNKDEILALLKALFLPKRLSIIHCPGHQKGNSAEARGNRMADQAAREVATRETPETSTLLAGKRTADGSEFEKRTADGSEFESPKKKAKVE

SEQ ID NO: 2285 - protein, 2091 aa, synthetic construct
MPAAKRVKLDGGDKKYSIGLDIGTNSVGWAVITDEYKVPSKKFKVLGNTDRHSIKKNLIGALLFDSGETAEATRLKRTARRRYTRRKNRICYLQEIFSNEMAKVDDSFFHRLEESFLVEEDKKHERHPIFGNIVDEVAYHEKYPTIYHLRKKLVDSTDKADLRLIYLALAHMIKFRGHFLIEGDLNPDNSDVDKLFIQLVQTYNQLFEENPINASGVDAKAILSARLSKSRRLENLIAQLPGEKKNGLFGNLIALSLGLTPNFKSNFDLAEDAKLQLSKDTYDDDLDNLLAQIGDQYADLFLAAKNLSDAILLSDILRVNTEITKAPLSASMIKRYDEHHQDLTLLKALVRQQLPEKYKEIFFDQSKNGYAGYIDGGASQEEFYKFIKPILEKMDGTEELLVKLNREDLLRKQRTFDNGSIPHQIHLGELHAILRRQEDFYPFLKDNREKIEKILTFRIPYYVGPLARGNSRFAWMTRKSEETITPWNFEEVVDKGASAQSFIERMTNFDKNLPNEKVLPKHSLLYEYFTVYNELTKVKYVTEGMRKPAFLSGEQKKAIVDLLFKTNRKVTVKQLKEDYFKKIECFDSVEISGVEDRFNASLGTYHDLLKIIKDKDFLDNEENEDILEDIVLTLTLFEDREMIEERLKTYAHLFDDKVMKQLKRRRYTGWGRLSRKLINGIRDKQSGKTILDFLKSDGFANRNFMQLIHDDSLTFKEDIQKAQVSGQGDSLHEHIANLAGSPAIKKGILQTVKVVDELVKVMGRHKPENIVIEMARENQTTQKGQKNSRERMKRIEEGIKELGSQILKEHPVENTQLQNEKLYLYYLQNGRDMYVDQELDINRLSDYDVDHIVPQSFLKDDSIDNKVLTRSDKARGKSDNVPSEEVVKKMKNYWRQLLNAKLITQRKFDNLTKAERGGLSELDKAGFIKRQLVETRQITKHVAQILDSRMNTKYDENDKLIREVKVITLKSKLVSDFRKDFQFYKVREINNYHHAHDAYLNAVVGTALIKKYPKLESEFVYGDYKVYDVRKMIAKSEQEIGKATAKYFFYSNIMNFFKTEITLANGEIRKRPLIETNGETGEIVWDKGRDFATVRKVLSMPQVNIVKKTEVQTGGFSKESILPKRNSDKLIARKKDWDPKKYGGFDSPTVAYSVLVVAKVEKGKSKKLKSVKELLGITIMERSSFEKNPIDFLEAKGYKEVKKDLIIKLPKYSLFELENGRKRMLASAGELQKGNELALPSKYVNFLYLASHYEKLKGSPEDNEQKQLFVEQHKHYLDEIIEQISEFSKRVILADANLDKVLSAYNKHRDKPIREQAENIIHLFTLTNLGAPAAFKYFDTTIDRKRYTSTKEVLDATLIHQSITGLYETRIDLSQLGGDGGGSSPAPGGTLNIEDEYRLHETSKEPDVSLGSTWLSDFPQAWAETGGMGLAVRQAPLIIPLKATSTPVSIKQYPMSQEARLGIKPHIQRLLDQGILVPCQSPWNTPLLPVKKPGTNDYRPVQDLREVNKRVEDIHPTVPNPYNLLSGLPPSHQWYTVLDLKDAFFCLRLHPTSQPLFAFEWRDPEMGISGQLTWTRLPQGFKNSPTLFNEALHRDLAGFRIQHPDLILLQYVDDLLLAATSELDCQQGTRALLQTLGDLGYRASAKKAQICQKQVKYLGYLLKEGQRWLTEARKETVMGQPIPKTPRQLREFLGTAGFCRLWIPGFAEMAAPLYPLTKPGTLFNWGPDQQKAFQEIKQALLTAPALGLPDLTKPFELFVDEKQGYAKGVLTQKLGPWRRPVAYLSKKLDPVAAGWPPCLRMVAAIAVLTKDAGKLTMGQPLVILAPHAVEALVKQPPDRWLSNARMTHYQALLLDTDRVQFGPVVALNPATLLPLPEEGLQHDCLDILAEAHGTRSDLMDQPLPDADHTWYTDGSSFLQEGQRKAGAAVTTETEVIWARALPAGTSAQRAELIALTQALKMAEGKKLNVYTDSRYAFATAHIHGEIYRRRGWLTSEGKEIKNKDEILALLKALFLPKRLSIIHCPGHQKGNSAEARGNRMADQAAREVATRETPETSTLLAGKRTADGSEFEKRTADGSEFESPKKKAKVE

SEQ ID NO: 2286 - protein, 2096 aa, synthetic construct
MPAAKRVKLDGGDKKYSIGLDIGTNSVGWAVITDEYKVPSKKFKVLGNTDRHSIKKNLIGALLFDSGETAEATRLKRTARRRYTRRKNRICYLQEIFSNEMAKVDDSFFHRLEESFLVEEDKKHERHPIFGNIVDEVAYHEKYPTIYHLRKKLVDSTDKADLRLIYLALAHMIKFRGHFLIEGDLNPDNSDVDKLFIQLVQTYNQLFEENPINASGVDAKAILSARLSKSRRLENLIAQLPGEKKNGLFGNLIALSLGLTPNFKSNFDLAEDAKLQLSKDTYDDDLDNLLAQIGDQYADLFLAAKNLSDAILLSDILRVNTEITKAPLSASMIKRYDEHHQDLTLLKALVRQQLPEKYKEIFFDQSKNGYAGYIDGGASQEEFYKFIKPILEKMDGTEELLVKLNREDLLRKQRTFDNGSIPHQIHLGELHAILRRQEDFYPFLKDNREKIEKILTFRIPYYVGPLARGNSRFAWMTRKSEETITPWNFEEVVDKGASAQSFIERMTNFDKNLPNEKVLPKHSLLYEYFTVYNELTKVKYVTEGMRKPAFLSGEQKKAIVDLLFKTNRKVTVKQLKEDYFKKIECFDSVEISGVEDRFNASLGTYHDLLKIIKDKDFLDNEENEDILEDIVLTLTLFEDREMIEERLKTYAHLFDDKVMKQLKRRRYTGWGRLSRKLINGIRDKQSGKTILDFLKSDGFANRNFMQLIHDDSLTFKEDIQKAQVSGQGDSLHEHIANLAGSPAIKKGILQTVKVVDELVKVMGRHKPENIVIEMARENQTTQKGQKNSRERMKRIEEGIKELGSQILKEHPVENTQLQNEKLYLYYLQNGRDMYVDQELDINRLSDYDVDHIVPQSFLKDDSIDNKVLTRSDKARGKSDNVPSEEVVKKMKNYWRQLLNAKLITQRKFDNLTKAERGGLSELDKAGFIKRQLVETRQITKHVAQILDSRMNTKYDENDKLIREVKVITLKSKLVSDFRKDFQFYKVREINNYHHAHDAYLNAVVGTALIKKYPKLESEFVYGDYKVYDVRKMIAKSEQEIGKATAKYFFYSNIMNFFKTEITLANGEIRKRPLIETNGETGEIVWDKGRDFATVRKVLSMPQVNIVKKTEVQTGGFSKESILPKRNSDKLIARKKDWDPKKYGGFDSPTVAYSVLVVAKVEKGKSKKLKSVKELLGITIMERSSFEKNPIDFLEAKGYKEVKKDLIIKLPKYSLFELENGRKRMLASAGELQKGNELALPSKYVNFLYLASHYEKLKGSPEDNEQKQLFVEQHKHYLDEIIEQISEFSKRVILADANLDKVLSAYNKHRDKPIREQAENIIHLFTLTNLGAPAAFKYFDTTIDRKRYTSTKEVLDATLIHQSITGLYETRIDLSQLGGDGGGGSPAPEAAAKGGTLNIEDEYRLHETSKEPDVSLGSTWLSDFPQAWAETGGMGLAVRQAPLIIPLKATSTPVSIKQYPMSQEARLGIKPHIQRLLDQGILVPCQSPWNTPLLPVKKPGTNDYRPVQDLREVNKRVEDIHPTVPNPYNLLSGLPPSHQWYTVLDLKDAFFCLRLHPTSQPLFAFEWRDPEMGISGQLTWTRLPQGFKNSPTLFNEALHRDLAGFRIQHPDLILLQYVDDLLLAATSELDCQQGTRALLQTLGDLGYRASAKKAQICQKQVKYLGYLLKEGQRWLTEARKETVMGQPIPKTPRQLREFLGTAGFCRLWIPGFAEMAAPLYPLTKPGTLFNWGPDQQKAFQEIKQALLTAPALGLPDLTKPFELFVDEKQGYAKGVLTQKLGPWRRPVAYLSKKLDPVAAGWPPCLRMVAAIAVLTKDAGKLTMGQPLVILAPHAVEALVKQPPDRWLSNARMTHYQALLLDTDRVQFGPVVALNPATLLPLPEEGLQHDCLDILAEAHGTRSDLMDQPLPDADHTWYTDGSSFLQEGQRKAGAAVTTETEVIWARALPAGTSAQRAELIALTQALKMAEGKKLNVYTDSRYAFATAHIHGEIYRRRGWLTSEGKEIKNKDEILALLKALFLPKRLSIIHCPGHQKGNSAEARGNRMADQAAREVATRETPETSTLLAGKRTADGSEFEKRTADGSEFESPKKKAKVE

SEQ ID NO: 2287 - protein, 2096 aa, synthetic construct
MPAAKRVKLDGGDKKYSIGLDIGTNSVGWAVITDEYKVPSKKFKVLGNTDRHSIKKNLIGALLFDSGETAEATRLKRTARRRYTRRKNRICYLQEIFSNEMAKVDDSFFHRLEESFLVEEDKKHERHPIFGNIVDEVAYHEKYPTIYHLRKKLVDSTDKADLRLIYLALAHMIKFRGHFLIEGDLNPDNSDVDKLFIQLVQTYNQLFEENPINASGVDAKAILSARLSKSRRLENLIAQLPGEKKNGLFGNLIALSLGLTPNFKSNFDLAEDAKLQLSKDTYDDDLDNLLAQIGDQYADLFLAAKNLSDAILLSDILRVNTEITKAPLSASMIKRYDEHHQDLTLLKALVRQQLPEKYKEIFFDQSKNGYAGYIDGGASQEEFYKFIKPILEKMDGTEELLVKLNREDLLRKQRTFDNGSIPHQIHLGELHAILRRQEDFYPFLKDNREKIEKILTFRIPYYVGPLARGNSRFAWMTRKSEETITPWNFEEVVDKGASAQSFIERMTNFDKNLPNEKVLPKHSLLYEYFTVYNELTKVKYVTEGMRKPAFLSGEQKKAIVDLLFKTNRKVTVKQLKEDYFKKIECFDSVEISGVEDRFNASLGTYHDLLKIIKDKDFLDNEENEDILEDIVLTLTLFEDREMIEERLKTYAHLFDDKVMKQLKRRRYTGWGRLSRKLINGIRDKQSGKTILDFLKSDGFANRNFMQLIHDDSLTFKEDIQKAQVSGQGDSLHEHIANLAGSPAIKKGILQTVKVVDELVKVMGRHKPENIVIEMARENQTTQKGQKNSRERMKRIEEGIKELGSQILKEHPVENTQLQNEKLYLYYLQNGRDMYVDQELDINRLSDYDVDHIVPQSFLKDDSIDNKVLTRSDKARGKSDNVPSEEVVKKMKNYWRQLLNAKLITQRKFDNLTKAERGGLSELDKAGFIKRQLVETRQITKHVAQILDSRMNTKYDENDKLIREVKVITLKSKLVSDFRKDFQFYKVREINNYHHAHDAYLNAVVGTALIKKYPKLESEFVYGDYKVYDVRKMIAKSEQEIGKATAKYFFYSNIMNFFKTEITLANGEIRKRPLIETNGETGEIVWDKGRDFATVRKVLSMPQVNIVKKTEVQTGGFSKESILPKRNSDKLIARKKDWDPKKYGGFDSPTVAYSVLVVAKVEKGKSKKLKSVKELLGITIMERSSFEKNPIDFLEAKGYKEVKKDLIIKLPKYSLFELENGRKRMLASAGELQKGNELALPSKYVNFLYLASHYEKLKGSPEDNEQKQLFVEQHKHYLDEIIEQISEFSKRVILADANLDKVLSAYNKHRDKPIREQAENIIHLFTLTNLGAPAAFKYFDTTIDRKRYTSTKEVLDATLIHQSITGLYETRIDLSQLGGDGGGGSEAAAKGGGGGTLNIEDEYRLHETSKEPDVSLGSTWLSDFPQAWAETGGMGLAVRQAPLIIPLKATSTPVSIKQYPMSQEARLGIKPHIQRLLDQGILVPCQSPWNTPLLPVKKPGTNDYRPVQDLREVNKRVEDIHPTVPNPYNLLSGLPPSHQWYTVLDLKDAFFCLRLHPTSQPLFAFEWRDPEMGISGQLTWTRLPQGFKNSPTLFNEALHRDLAGFRIQHPDLILLQYVDDLLLAATSELDCQQGTRALLQTLGDLGYRASAKKAQICQKQVKYLGYLLKEGQRWLTEARKETVMGQPIPKTPRQLREFLGTAGFCRLWIPGFAEMAAPLYPLTKPGTLFNWGPDQQKAFQEIKQALLTAPALGLPDLTKPFELFVDEKQGYAKGVLTQKLGPWRRPVAYLSKKLDPVAAGWPPCLRMVAAIAVLTKDAGKLTMGQPLVILAPHAVEALVKQPPDRWLSNARMTHYQALLLDTDRVQFGPVVALNPATLLPLPEEGLQHDCLDILAEAHGTRSDLMDQPLPDADHTWYTDGSSFLQEGQRKAGAAVTTETEVIWARALPAGTSAQRAELIALTQALKMAEGKKLNVYTDSRYAFATAHIHGEIYRRRGWLTSEGKEIKNKDEILALLKALFLPKRLSIIHCPGHQKGNSAEARGNRMADQAAREVATRETPETSTLLAGKRTADGSEFEKRTADGSEFESPKKKAKVE

SEQ ID NO: 2288 - protein, 2094 aa, synthetic construct
MPAAKRVKLDGGDKKYSIGLDIGTNSVGWAVITDEYKVPSKKFKVLGNTDRHSIKKNLIGALLFDSGETAEATRLKRTARRRYTRRKNRICYLQEIFSNEMAKVDDSFFHRLEESFLVEEDKKHERHPIFGNIVDEVAYHEKYPTIYHLRKKLVDSTDKADLRLIYLALAHMIKFRGHFLIEGDLNPDNSDVDKLFIQLVQTYNQLFEENPINASGVDAKAILSARLSKSRRLENLIAQLPGEKKNGLFGNLIALSLGLTPNFKSNFDLAEDAKLQLSKDTYDDDLDNLLAQIGDQYADLFLAAKNLSDAILLSDILRVNTEITKAPLSASMIKRYDEHHQDLTLLKALVRQQLPEKYKEIFFDQSKNGYAGYIDGGASQEEFYKFIKPILEKMDGTEELLVKLNREDLLRKQRTFDNGSIPHQIHLGELHAILRRQEDFYPFLKDNREKIEKILTFRIPYYVGPLARGNSRFAWMTRKSEETITPWNFEEVVDKGASAQSFIERMTNFDKNLPNEKVLPKHSLLYEYFTVYNELTKVKYVTEGMRKPAFLSGEQKKAIVDLLFKTNRKVTVKQLKEDYFKKIECFDSVEISGVEDRFNASLGTYHDLLKIIKDKDFLDNEENEDILEDIVLTLTLFEDREMIEERLKTYAHLFDDKVMKQLKRRRYTGWGRLSRKLINGIRDKQSGKTILDFLKSDGFANRNFMQLIHDDSLTFKEDIQKAQVSGQGDSLHEHIANLAGSPAIKKGILQTVKVVDELVKVMGRHKPENIVIEMARENQTTQKGQKNSRERMKRIEEGIKELGSQILKEHPVENTQLQNEKLYLYYLQNGRDMYVDQELDINRLSDYDVDHIVPQSFLKDDSIDNKVLTRSDKARGKSDNVPSEEVVKKMKNYWRQLLNAKLITQRKFDNLTKAERGGLSELDKAGFIKRQLVETRQITKHVAQILDSRMNTKYDENDKLIREVKVITLKSKLVSDFRKDFQFYKVREINNYHHAHDAYLNAVVGTALIKKYPKLESEFVYGDYKVYDVRKMIAKSEQEIGKATAKYFFYSNIMNFFKTEITLANGEIRKRPLIETNGETGEIVWDKGRDFATVRKVLSMPQVNIVKKTEVQTGGFSKESILPKRNSDKLIARKKDWDPKKYGGFDSPTVAYSVLVVAKVEKGKSKKLKSVKELLGITIMERSSFEKNPIDFLEAKGYKEVKKDLIIKLPKYSLFELENGRKRMLASAGELQKGNELALPSKYVNFLYLASHYEKLKGSPEDNEQKQLFVEQHKHYLDEIIEQISEFSKRVILADANLDKVLSAYNKHRDKPIREQAENIIHLFTLTNLGAPAAFKYFDTTIDRKRYTSTKEVLDATLIHQSITGLYETRIDLSQLGGDGGGSSPAPGGSGGTLNIEDEYRLHETSKEPDVSLGSTWLSDFPQAWAETGGMGLAVRQAPLIIPLKATSTPVSIKQYPMSQEARLGIKPHIQRLLDQGILVPCQSPWNTPLLPVKKPGTNDYRPVQDLREVNKRVEDIHPTVPNPYNLLSGLPPSHQWYTVLDLKDAFFCLRLHPTSQPLFAFEWRDPEMGISGQLTWTRLPQGFKNSPTLFNEALHRDLAGFRIQHPDLILLQYVDDLLLAATSELDCQQGTRALLQTLGDLGYRASAKKAQICQKQVKYLGYLLKEGQRWLTEARKETVMGQPIPKTPRQLREFLGTAGFCRLWIPGFAEMAAPLYPLTKPGTLFNWGPDQQKAFQEIKQALLTAPALGLPDLTKPFELFVDEKQGYAKGVLTQKLGPWRRPVAYLSKKLDPVAAGWPPCLRMVAAIAVLTKDAGKLTMGQPLVILAPHAVEALVKQPPDRWLSNARMTHYQALLLDTDRVQFGPVVALNPATLLPLPEEGLQHDCLDILAEAHGTRSDLMDQPLPDADHTWYTDGSSFLQEGQRKAGAAVTTETEVIWARALPAGTSAQRAELIALTQALKMAEGKKLNVYTDSRYAFATAHIHGEIYRRRGWLTSEGKEIKNKDEILALLKALFLPKRLSIIHCPGHQKGNSAEARGNRMADQAAREVATRETPETSTLLAGKRTADGSEFEKRTADGSEFESPKKKAKVE

SEQ ID NO: 2289 - protein, 2096 aa, synthetic construct
MPAAKRVKLDGGDKKYSIGLDIGTNSVGWAVITDEYKVPSKKFKVLGNTDRHSIKKNLIGALLFDSGETAEATRLKRTARRRYTRRKNRICYLQEIFSNEMAKVDDSFFHRLEESFLVEEDKKHERHPIFGNIVDEVAYHEKYPTIYHLRKKLVDSTDKADLRLIYLALAHMIKFRGHFLIEGDLNPDNSDVDKLFIQLVQTYNQLFEENPINASGVDAKAILSARLSKSRRLENLIAQLPGEKKNGLFGNLIALSLGLTPNFKSNFDLAEDAKLQLSKDTYDDDLDNLLAQIGDQYADLFLAAKNLSDAILLSDILRVNTEITKAPLSASMIKRYDEHHQDLTLLKALVRQQLPEKYKEIFFDQSKNGYAGYIDGGASQEEFYKFIKPILEKMDGTEELLVKLNREDLLRKQRTFDNGSIPHQIHLGELHAILRRQEDFYPFLKDNREKIEKILTFRIPYYVGPLARGNSRFAWMTRKSEETITPWNFEEVVDKGASAQSFIERMTNFDKNLPNEKVLPKHSLLYEYFTVYNELTKVKYVTEGMRKPAFLSGEQKKAIVDLLFKTNRKVTVKQLKEDYFKKIECFDSVEISGVEDRFNASLGTYHDLLKIIKDKDFLDNEENEDILEDIVLTLTLFEDREMIEERLKTYAHLFDDKVMKQLKRRRYTGWGRLSRKLINGIRDKQSGKTILDFLKSDGFANRNFMQLIHDDSLTFKEDIQKAQVSGQGDSLHEHIANLAGSPAIKKGILQTVKVVDELVKVMGRHKPENIVIEMARENQTTQKGQKNSRERMKRIEEGIKELGSQILKEHPVENTQLQNEKLYLYYLQNGRDMYVDQELDINRLSDYDVDHIVPQSFLKDDSIDNKVLTRSDKARGKSDNVPSEEVVKKMKNYWRQLLNAKLITQRKFDNLTKAERGGLSELDKAGFIKRQLVETRQITKHVAQILDSRMNTKYDENDKLIREVKVITLKSKLVSDFRKDFQFYKVREINNYHHAHDAYLNAVVGTALIKKYPKLESEFVYGDYKVYDVRKMIAKSEQEIGKATAKYFFYSNIMNFFKTEITLANGEIRKRPLIETNGETGEIVWDKGRDFATVRKVLSMPQVNIVKKTEVQTGGFSKESILPKRNSDKLIARKKDWDPKKYGGFDSPTVAYSVLVVAKVEKGKSKKLKSVKELLGITIMERSSFEKNPIDFLEAKGYKEVKKDLIIKLPKYSLFELENGRKRMLASAGELQKGNELALPSKYVNFLYLASHYEKLKGSPEDNEQKQLFVEQHKHYLDEIIEQISEFSKRVILADANLDKVLSAYNKHRDKPIREQAENIIHLFTLTNLGAPAAFKYFDTTIDRKRYTSTKEVLDATLIHQSITGLYETRIDLSQLGGDGGGSSEAAAKGGGGGTLNIEDEYRLHETSKEPDVSLGSTWLSDFPQAWAETGGMGLAVRQAPLIIPLKATSTPVSIKQYPMSQEARLGIKPHIQRLLDQGILVPCQSPWNTPLLPVKKPGTNDYRPVQDLREVNKRVEDIHPTVPNPYNLLSGLPPSHQWYTVLDLKDAFFCLRLHPTSQPLFAFEWRDPEMGISGQLTWTRLPQGFKNSPTLFNEALHRDLAGFRIQHPDLILLQYVDDLLLAATSELDCQQGTRALLQTLGDLGYRASAKKAQICQKQVKYLGYLLKEGQRWLTEARKETVMGQPIPKTPRQLREFLGTAGFCRLWIPGFAEMAAPLYPLTKPGTLFNWGPDQQKAFQEIKQALLTAPALGLPDLTKPFELFVDEKQGYAKGVLTQKLGPWRRPVAYLSKKLDPVAAGWPPCLRMVAAIAVLTKDAGKLTMGQPLVILAPHAVEALVKQPPDRWLSNARMTHYQALLLDTDRVQFGPVVALNPATLLPLPEEGLQHDCLDILAEAHGTRSDLMDQPLPDADHTWYTDGSSFLQEGQRKAGAAVTTETEVIWARALPAGTSAQRAELIALTQALKMAEGKKLNVYTDSRYAFATAHIHGEIYRRRGWLTSEGKEIKNKDEILALLKALFLPKRLSIIHCPGHQKGNSAEARGNRMADQAAREVATRETPETSTLLAGKRTADGSEFEKRTADGSEFESPKKKAKVE

SEQ ID NO: 2290 - protein, 2094 aa, synthetic construct
MPAAKRVKLDGGDKKYSIGLDIGTNSVGWAVITDEYKVPSKKFKVLGNTDRHSIKKNLIGALLFDSGETAEATRLKRTARRRYTRRKNRICYLQEIFSNEMAKVDDSFFHRLEESFLVEEDKKHERHPIFGNIVDEVAYHEKYPTIYHLRKKLVDSTDKADLRLIYLALAHMIKFRGHFLIEGDLNPDNSDVDKLFIQLVQTYNQLFEENPINASGVDAKAILSARLSKSRRLENLIAQLPGEKKNGLFGNLIALSLGLTPNFKSNFDLAEDAKLQLSKDTYDDDLDNLLAQIGDQYADLFLAAKNLSDAILLSDILRVNTEITKAPLSASMIKRYDEHHQDLTLLKALVRQQLPEKYKEIFFDQSKNGYAGYIDGGASQEEFYKFIKPILEKMDGTEELLVKLNREDLLRKQRTFDNGSIPHQIHLGELHAILRRQEDFYPFLKDNREKIEKILTFRIPYYVGPLARGNSRFAWMTRKSEETITPWNFEEVVDKGASAQSFIERMTNFDKNLPNEKVLPKHSLLYEYFTVYNELTKVKYVTEGMRKPAFLSGEQKKAIVDLLFKTNRKVTVKQLKEDYFKKIECFDSVEISGVEDRFNASLGTYHDLLKIIKDKDFLDNEENEDILEDIVLTLTLFEDREMIEERLKTYAHLFDDKVMKQLKRRRYTGWGRLSRKLINGIRDKQSGKTILDFLKSDGFANRNFMQLIHDDSLTFKEDIQKAQVSGQGDSLHEHIANLAGSPAIKKGILQTVKVVDELVKVMGRHKPENIVIEMARENQTTQKGQKNSRERMKRIEEGIKELGSQILKEHPVENTQLQNEKLYLYYLQNGRDMYVDQELDINRLSDYDVDHIVPQSFLKDDSIDNKVLTRSDKARGKSDNVPSEEVVKKMKNYWRQLLNAKLITQRKFDNLTKAERGGLSELDKAGFIKRQLVETRQITKHVAQILDSRMNTKYDENDKLIREVKVITLKSKLVSDFRKDFQFYKVREINNYHHAHDAYLNAVVGTALIKKYPKLESEFVYGDYKVYDVRKMIAKSEQEIGKATAKYFFYSNIMNFFKTEITLANGEIRKRPLIETNGETGEIVWDKGRDFATVRKVLSMPQVNIVKKTEVQTGGFSKESILPKRNSDKLIARKKDWDPKKYGGFDSPTVAYSVLVVAKVEKGKSKKLKSVKELLGITIMERSSFEKNPIDFLEAKGYKEVKKDLIIKLPKYSLFELENGRKRMLASAGELQKGNELALPSKYVNFLYLASHYEKLKGSPEDNEQKQLFVEQHKHYLDEIIEQISEFSKRVILADANLDKVLSAYNKHRDKPIREQAENIIHLFTLTNLGAPAAFKYFDTTIDRKRYTSTKEVLDATLIHQSITGLYETRIDLSQLGGDGGGGGPAPGGSGGTLNIEDEYRLHETSKEPDVSLGSTWLSDFPQAWAETGGMGLAVRQAPLIIPLKATSTPVSIKQYPMSQEARLGIKPHIQRLLDQGILVPCQSPWNTPLLPVKKPGTNDYRPVQDLREVNKRVEDIHPTVPNPYNLLSGLPPSHQWYTVLDLKDAFFCLRLHPTSQPLFAFEWRDPEMGISGQLTWTRLPQGFKNSPTLFNEALHRDLAGFRIQHPDLILLQYVDDLLLAATSELDCQQGTRALLQTLGDLGYRASAKKAQICQKQVKYLGYLLKEGQRWLTEARKETVMGQPIPKTPRQLREFLGTAGFCRLWIPGFAEMAAPLYPLTKPGTLFNWGPDQQKAFQEIKQALLTAPALGLPDLTKPFELFVDEKQGYAKGVLTQKLGPWRRPVAYLSKKLDPVAAGWPPCLRMVAAIAVLTKDAGKLTMGQPLVILAPHAVEALVKQPPDRWLSNARMTHYQALLLDTDRVQFGPVVALNPATLLPLPEEGLQHDCLDILAEAHGTRSDLMDQPLPDADHTWYTDGSSFLQEGQRKAGAAVTTETEVIWARALPAGTSAQRAELIALTQALKMAEGKKLNVYTDSRYAFATAHIHGEIYRRRGWLTSEGKEIKNKDEILALLKALFLPKRLSIIHCPGHQKGNSAEARGNRMADQAAREVATRETPETSTLLAGKRTADGSEFEKRTADGSEFESPKKKAKVE

SEQ ID NO: 2291 - protein, 2097 aa, synthetic construct
MPAAKRVKLDGGDKKYSIGLDIGTNSVGWAVITDEYKVPSKKFKVLGNTDRHSIKKNLIGALLFDSGETAEATRLKRTARRRYTRRKNRICYLQEIFSNEMAKVDDSFFHRLEESFLVEEDKKHERHPIFGNIVDEVAYHEKYPTIYHLRKKLVDSTDKADLRLIYLALAHMIKFRGHFLIEGDLNPDNSDVDKLFIQLVQTYNQLFEENPINASGVDAKAILSARLSKSRRLENLIAQLPGEKKNGLFGNLIALSLGLTPNFKSNFDLAEDAKLQLSKDTYDDDLDNLLAQIGDQYADLFLAAKNLSDAILLSDILRVNTEITKAPLSASMIKRYDEHHQDLTLLKALVRQQLPEKYKEIFFDQSKNGYAGYIDGGASQEEFYKFIKPILEKMDGTEELLVKLNREDLLRKQRTFDNGSIPHQIHLGELHAILRRQEDFYPFLKDNREKIEKILTFRIPYYVGPLARGNSRFAWMTRKSEETITPWNFEEVVDKGASAQSFIERMTNFDKNLPNEKVLPKHSLLYEYFTVYNELTKVKYVTEGMRKPAFLSGEQKKAIVDLLFKTNRKVTVKQLKEDYFKKIECFDSVEISGVEDRFNASLGTYHDLLKIIKDKDFLDNEENEDILEDIVLTLTLFEDREMIEERLKTYAHLFDDKVMKQLKRRRYTGWGRLSRKLINGIRDKQSGKTILDFLKSDGFANRNFMQLIHDDSLTFKEDIQKAQVSGQGDSLHEHIANLAGSPAIKKGILQTVKVVDELVKVMGRHKPENIVIEMARENQTTQKGQKNSRERMKRIEEGIKELGSQILKEHPVENTQLQNEKLYLYYLQNGRDMYVDQELDINRLSDYDVDHIVPQSFLKDDSIDNKVLTRSDKARGKSDNVPSEEVVKKMKNYWRQLLNAKLITQRKFDNLTKAERGGLSELDKAGFIKRQLVETRQITKHVAQILDSRMNTKYDENDKLIREVKVITLKSKLVSDFRKDFQFYKVREINNYHHAHDAYLNAVVGTALIKKYPKLESEFVYGDYKVYDVRKMIAKSEQEIGKATAKYFFYSNIMNFFKTEITLANGEIRKRPLIETNGETGEIVWDKGRDFATVRKVLSMPQVNIVKKTEVQTGGFSKESILPKRNSDKLIARKKDWDPKKYGGFDSPTVAYSVLVVAKVEKGKSKKLKSVKELLGITIMERSSFEKNPIDFLEAKGYKEVKKDLIIKLPKYSLFELENGRKRMLASAGELQKGNELALPSKYVNFLYLASHYEKLKGSPEDNEQKQLFVEQHKHYLDEIIEQISEFSKRVILADANLDKVLSAYNKHRDKPIREQAENIIHLFTLTNLGAPAAFKYFDTTIDRKRYTSTKEVLDATLIHQSITGLYETRIDLSQLGGDGGGSSGSSGSSGSSGGTLNIEDEYRLHETSKEPDVSLGSTWLSDFPQAWAETGGMGLAVRQAPLIIPLKATSTPVSIKQYPMSQEARLGIKPHIQRLLDQGILVPCQSPWNTPLLPVKKPGTNDYRPVQDLREVNKRVEDIHPTVPNPYNLLSGLPPSHQWYTVLDLKDAFFCLRLHPTSQPLFAFEWRDPEMGISGQLTWTRLPQGFKNSPTLFNEALHRDLAGFRIQHPDLILLQYVDDLLLAATSELDCQQGTRALLQTLGDLGYRASAKKAQICQKQVKYLGYLLKEGQRWLTEARKETVMGQPIPKTPRQLREFLGTAGFCRLWIPGFAEMAAPLYPLTKPGTLFNWGPDQQKAFQEIKQALLTAPALGLPDLTKPFELFVDEKQGYAKGVLTQKLGPWRRPVAYLSKKLDPVAAGWPPCLRMVAAIAVLTKDAGKLTMGQPLVILAPHAVEALVKQPPDRWLSNARMTHYQALLLDTDRVQFGPVVALNPATLLPLPEEGLQHDCLDILAEAHGTRSDLMDQPLPDADHTWYTDGSSFLQEGQRKAGAAVTTETEVIWARALPAGTSAQRAELIALTQALKMAEGKKLNVYTDSRYAFATAHIHGEIYRRRGWLTSEGKEIKNKDEILALLKALFLPKRLSIIHCPGHQKGNSAEARGNRMADQAAREVATRETPETSTLLAGKRTADGSEFEKRTADGSEFESPKKKAKVE

SEQ ID NO: 2292 - protein, 2096 aa, synthetic construct
MPAAKRVKLDGGDKKYSIGLDIGTNSVGWAVITDEYKVPSKKFKVLGNTDRHSIKKNLIGALLFDSGETAEATRLKRTARRRYTRRKNRICYLQEIFSNEMAKVDDSFFHRLEESFLVEEDKKHERHPIFGNIVDEVAYHEKYPTIYHLRKKLVDSTDKADLRLIYLALAHMIKFRGHFLIEGDLNPDNSDVDKLFIQLVQTYNQLFEENPINASGVDAKAILSARLSKSRRLENLIAQLPGEKKNGLFGNLIALSLGLTPNFKSNFDLAEDAKLQLSKDTYDDDLDNLLAQIGDQYADLFLAAKNLSDAILLSDILRVNTEITKAPLSASMIKRYDEHHQDLTLLKALVRQQLPEKYKEIFFDQSKNGYAGYIDGGASQEEFYKFIKPILEKMDGTEELLVKLNREDLLRKQRTFDNGSIPHQIHLGELHAILRRQEDFYPFLKDNREKIEKILTFRIPYYVGPLARGNSRFAWMTRKSEETITPWNFEEVVDKGASAQSFIERMTNFDKNLPNEKVLPKHSLLYEYFTVYNELTKVKYVTEGMRKPAFLSGEQKKAIVDLLFKTNRKVTVKQLKEDYFKKIECFDSVEISGVEDRFNASLGTYHDLLKIIKDKDFLDNEENEDILEDIVLTLTLFEDREMIEERLKTYAHLFDDKVMKQLKRRRYTGWGRLSRKLINGIRDKQSGKTILDFLKSDGFANRNFMQLIHDDSLTFKEDIQKAQVSGQGDSLHEHIANLAGSPAIKKGILQTVKVVDELVKVMGRHKPENIVIEMARENQTTQKGQKNSRERMKRIEEGIKELGSQILKEHPVENTQLQNEKLYLYYLQNGRDMYVDQELDINRLSDYDVDHIVPQSFLKDDSIDNKVLTRSDKARGKSDNVPSEEVVKKMKNYWRQLLNAKLITQRKFDNLTKAERGGLSELDKAGFIKRQLVETRQITKHVAQILDSRMNTKYDENDKLIREVKVITLKSKLVSDFRKDFQFYKVREINNYHHAHDAYLNAVVGTALIKKYPKLESEFVYGDYKVYDVRKMIAKSEQEIGKATAKYFFYSNIMNFFKTEITLANGEIRKRPLIETNGETGEIVWDKGRDFATVRKVLSMPQVNIVKKTEVQTGGFSKESILPKRNSDKLIARKKDWDPKKYGGFDSPTVAYSVLVVAKVEKGKSKKLKSVKELLGITIMERSSFEKNPIDFLEAKGYKEVKKDLIIKLPKYSLFELENGRKRMLASAGELQKGNELALPSKYVNFLYLASHYEKLKGSPEDNEQKQLFVEQHKHYLDEIIEQISEFSKRVILADANLDKVLSAYNKHRDKPIREQAENIIHLFTLTNLGAPAAFKYFDTTIDRKRYTSTKEVLDATLIHQSITGLYETRIDLSQLGGDGGGSSGGGEAAAKGGTLNIEDEYRLHETSKEPDVSLGSTWLSDFPQAWAETGGMGLAVRQAPLIIPLKATSTPVSIKQYPMSQEARLGIKPHIQRLLDQGILVPCQSPWNTPLLPVKKPGTNDYRPVQDLREVNKRVEDIHPTVPNPYNLLSGLPPSHQWYTVLDLKDAFFCLRLHPTSQPLFAFEWRDPEMGISGQLTWTRLPQGFKNSPTLFNEALHRDLAGFRIQHPDLILLQYVDDLLLAATSELDCQQGTRALLQTLGDLGYRASAKKAQICQKQVKYLGYLLKEGQRWLTEARKETVMGQPIPKTPRQLREFLGTAGFCRLWIPGFAEMAAPLYPLTKPGTLFNWGPDQQKAFQEIKQALLTAPALGLPDLTKPFELFVDEKQGYAKGVLTQKLGPWRRPVAYLSKKLDPVAAGWPPCLRMVAAIAVLTKDAGKLTMGQPLVILAPHAVEALVKQPPDRWLSNARMTHYQALLLDTDRVQFGPVVALNPATLLPLPEEGLQHDCLDILAEAHGTRSDLMDQPLPDADHTWYTDGSSFLQEGQRKAGAAVTTETEVIWARALPAGTSAQRAELIALTQALKMAEGKKLNVYTDSRYAFATAHIHGEIYRRRGWLTSEGKEIKNKDEILALLKALFLPKRLSIIHCPGHQKGNSAEARGNRMADQAAREVATRETPETSTLLAGKRTADGSEFEKRTADGSEFESPKKKAKVE

SEQ ID NO: 2293 - protein, 2094 aa, synthetic construct
MPAAKRVKLDGGDKKYSIGLDIGTNSVGWAVITDEYKVPSKKFKVLGNTDRHSIKKNLIGALLFDSGETAEATRLKRTARRRYTRRKNRICYLQEIFSNEMAKVDDSFFHRLEESFLVEEDKKHERHPIFGNIVDEVAYHEKYPTIYHLRKKLVDSTDKADLRLIYLALAHMIKFRGHFLIEGDLNPDNSDVDKLFIQLVQTYNQLFEENPINASGVDAKAILSARLSKSRRLENLIAQLPGEKKNGLFGNLIALSLGLTPNFKSNFDLAEDAKLQLSKDTYDDDLDNLLAQIGDQYADLFLAAKNLSDAILLSDILRVNTEITKAPLSASMIKRYDEHHQDLTLLKALVRQQLPEKYKEIFFDQSKNGYAGYIDGGASQEEFYKFIKPILEKMDGTEELLVKLNREDLLRKQRTFDNGSIPHQIHLGELHAILRRQEDFYPFLKDNREKIEKILTFRIPYYVGPLARGNSRFAWMTRKSEETITPWNFEEVVDKGASAQSFIERMTNFDKNLPNEKVLPKHSLLYEYFTVYNELTKVKYVTEGMRKPAFLSGEQKKAIVDLLFKTNRKVTVKQLKEDYFKKIECFDSVEISGVEDRFNASLGTYHDLLKIIKDKDFLDNEENEDILEDIVLTLTLFEDREMIEERLKTYAHLFDDKVMKQLKRRRYTGWGRLSRKLINGIRDKQSGKTILDFLKSDGFANRNFMQLIHDDSLTFKEDIQKAQVSGQGDSLHEHIANLAGSPAIKKGILQTVKVVDELVKVMGRHKPENIVIEMARENQTTQKGQKNSRERMKRIEEGIKELGSQILKEHPVENTQLQNEKLYLYYLQNGRDMYVDQELDINRLSDYDVDHIVPQSFLKDDSIDNKVLTRSDKARGKSDNVPSEEVVKKMKNYWRQLLNAKLITQRKFDNLTKAERGGLSELDKAGFIKRQLVETRQITKHVAQILDSRMNTKYDENDKLIREVKVITLKSKLVSDFRKDFQFYKVREINNYHHAHDAYLNAVVGTALIKKYPKLESEFVYGDYKVYDVRKMIAKSEQEIGKATAKYFFYSNIMNFFKTEITLANGEIRKRPLIETNGETGEIVWDKGRDFATVRKVLSMPQVNIVKKTEVQTGGFSKESILPKRNSDKLIARKKDWDPKKYGGFDSPTVAYSVLVVAKVEKGKSKKLKSVKELLGITIMERSSFEKNPIDFLEAKGYKEVKKDLIIKLPKYSLFELENGRKRMLASAGELQKGNELALPSKYVNFLYLASHYEKLKGSPEDNEQKQLFVEQHKHYLDEIIEQISEFSKRVILADANLDKVLSAYNKHRDKPIREQAENIIHLFTLTNLGAPAAFKYFDTTIDRKRYTSTKEVLDATLIHQSITGLYETRIDLSQLGGDGGGGSGSSGGGGGTLNIEDEYRLHETSKEPDVSLGSTWLSDFPQAWAETGGMGLAVRQAPLIIPLKATSTPVSIKQYPMSQEARLGIKPHIQRLLDQGILVPCQSPWNTPLLPVKKPGTNDYRPVQDLREVNKRVEDIHPTVPNPYNLLSGLPPSHQWYTVLDLKDAFFCLRLHPTSQPLFAFEWRDPEMGISGQLTWTRLPQGFKNSPTLFNEALHRDLAGFRIQHPDLILLQYVDDLLLAATSELDCQQGTRALLQTLGDLGYRASAKKAQICQKQVKYLGYLLKEGQRWLTEARKETVMGQPIPKTPRQLREFLGTAGFCRLWIPGFAEMAAPLYPLTKPGTLFNWGPDQQKAFQEIKQALLTAPALGLPDLTKPFELFVDEKQGYAKGVLTQKLGPWRRPVAYLSKKLDPVAAGWPPCLRMVAAIAVLTKDAGKLTMGQPLVILAPHAVEALVKQPPDRWLSNARMTHYQALLLDTDRVQFGPVVALNPATLLPLPEEGLQHDCLDILAEAHGTRSDLMDQPLPDADHTWYTDGSSFLQEGQRKAGAAVTTETEVIWARALPAGTSAQRAELIALTQALKMAEGKKLNVYTDSRYAFATAHIHGEIYRRRGWLTSEGKEIKNKDEILALLKALFLPKRLSIIHCPGHQKGNSAEARGNRMADQAAREVATRETPETSTLLAGKRTADGSEFEKRTADGSEFESPKKKAKVE

SEQ ID NO: 2294 - protein, 2092 aa, synthetic construct
MPAAKRVKLDGGDKKYSIGLDIGTNSVGWAVITDEYKVPSKKFKVLGNTDRHSIKKNLIGALLFDSGETAEATRLKRTARRRYTRRKNRICYLQEIFSNEMAKVDDSFFHRLEESFLVEEDKKHERHPIFGNIVDEVAYHEKYPTIYHLRKKLVDSTDKADLRLIYLALAHMIKFRGHFLIEGDLNPDNSDVDKLFIQLVQTYNQLFEENPINASGVDAKAILSARLSKSRRLENLIAQLPGEKKNGLFGNLIALSLGLTPNFKSNFDLAEDAKLQLSKDTYDDDLDNLLAQIGDQYADLFLAAKNLSDAILLSDILRVNTEITKAPLSASMIKRYDEHHQDLTLLKALVRQQLPEKYKEIFFDQSKNGYAGYIDGGASQEEFYKFIKPILEKMDGTEELLVKLNREDLLRKQRTFDNGSIPHQIHLGELHAILRRQEDFYPFLKDNREKIEKILTFRIPYYVGPLARGNSRFAWMTRKSEETITPWNFEEVVDKGASAQSFIERMTNFDKNLPNEKVLPKHSLLYEYFTVYNELTKVKYVTEGMRKPAFLSGEQKKAIVDLLFKTNRKVTVKQLKEDYFKKIECFDSVEISGVEDRFNASLGTYHDLLKIIKDKDFLDNEENEDILEDIVLTLTLFEDREMIEERLKTYAHLFDDKVMKQLKRRRYTGWGRLSRKLINGIRDKQSGKTILDFLKSDGFANRNFMQLIHDDSLTFKEDIQKAQVSGQGDSLHEHIANLAGSPAIKKGILQTVKVVDELVKVMGRHKPENIVIEMARENQTTQKGQKNSRERMKRIEEGIKELGSQILKEHPVENTQLQNEKLYLYYLQNGRDMYVDQELDINRLSDYDVDHIVPQSFLKDDSIDNKVLTRSDKARGKSDNVPSEEVVKKMKNYWRQLLNAKLITQRKFDNLTKAERGGLSELDKAGFIKRQLVETRQITKHVAQILDSRMNTKYDENDKLIREVKVITLKSKLVSDFRKDFQFYKVREINNYHHAHDAYLNAVVGTALIKKYPKLESEFVYGDYKVYDVRKMIAKSEQEIGKATAKYFFYSNIMNFFKTEITLANGEIRKRPLIETNGETGEIVWDKGRDFATVRKVLSMPQVNIVKKTEVQTGGFSKESILPKRNSDKLIARKKDWDPKKYGGFDSPTVAYSVLVVAKVEKGKSKKLKSVKELLGITIMERSSFEKNPIDFLEAKGYKEVKKDLIIKLPKYSLFELENGRKRMLASAGELQKGNELALPSKYVNFLYLASHYEKLKGSPEDNEQKQLFVEQHKHYLDEIIEQISEFSKRVILADANLDKVLSAYNKHRDKPIREQAENIIHLFTLTNLGAPAAFKYFDTTIDRKRYTSTKEVLDATLIHQSITGLYETRIDLSQLGGDGGPAPAPAPGGTLNIEDEYRLHETSKEPDVSLGSTWLSDFPQAWAETGGMGLAVRQAPLIIPLKATSTPVSIKQYPMSQEARLGIKPHIQRLLDQGILVPCQSPWNTPLLPVKKPGTNDYRPVQDLREVNKRVEDIHPTVPNPYNLLSGLPPSHQWYTVLDLKDAFFCLRLHPTSQPLFAFEWRDPEMGISGQLTWTRLPQGFKNSPTLFNEALHRDLAGFRIQHPDLILLQYVDDLLLAATSELDCQQGTRALLQTLGDLGYRASAKKAQICQKQVKYLGYLLKEGQRWLTEARKETVMGQPIPKTPRQLREFLGTAGFCRLWIPGFAEMAAPLYPLTKPGTLFNWGPDQQKAFQEIKQALLTAPALGLPDLTKPFELFVDEKQGYAKGVLTQKLGPWRRPVAYLSKKLDPVAAGWPPCLRMVAAIAVLTKDAGKLTMGQPLVILAPHAVEALVKQPPDRWLSNARMTHYQALLLDTDRVQFGPVVALNPATLLPLPEEGLQHDCLDILAEAHGTRSDLMDQPLPDADHTWYTDGSSFLQEGQRKAGAAVTTETEVIWARALPAGTSAQRAELIALTQALKMAEGKKLNVYTDSRYAFATAHIHGEIYRRRGWLTSEGKEIKNKDEILALLKALFLPKRLSIIHCPGHQKGNSAEARGNRMADQAAREVATRETPETSTLLAGKRTADGSEFEKRTADGSEFESPKKKAKVE

SEQ ID NO: 2295 - protein, 2094 aa, synthetic construct
MPAAKRVKLDGGDKKYSIGLDIGTNSVGWAVITDEYKVPSKKFKVLGNTDRHSIKKNLIGALLFDSGETAEATRLKRTARRRYTRRKNRICYLQEIFSNEMAKVDDSFFHRLEESFLVEEDKKHERHPIFGNIVDEVAYHEKYPTIYHLRKKLVDSTDKADLRLIYLALAHMIKFRGHFLIEGDLNPDNSDVDKLFIQLVQTYNQLFEENPINASGVDAKAILSARLSKSRRLENLIAQLPGEKKNGLFGNLIALSLGLTPNFKSNFDLAEDAKLQLSKDTYDDDLDNLLAQIGDQYADLFLAAKNLSDAILLSDILRVNTEITKAPLSASMIKRYDEHHQDLTLLKALVRQQLPEKYKEIFFDQSKNGYAGYIDGGASQEEFYKFIKPILEKMDGTEELLVKLNREDLLRKQRTFDNGSIPHQIHLGELHAILRRQEDFYPFLKDNREKIEKILTFRIPYYVGPLARGNSRFAWMTRKSEETITPWNFEEVVDKGASAQSFIERMTNFDKNLPNEKVLPKHSLLYEYFTVYNELTKVKYVTEGMRKPAFLSGEQKKAIVDLLFKTNRKVTVKQLKEDYFKKIECFDSVEISGVEDRFNASLGTYHDLLKIIKDKDFLDNEENEDILEDIVLTLTLFEDREMIEERLKTYAHLFDDKVMKQLKRRRYTGWGRLSRKLINGIRDKQSGKTILDFLKSDGFANRNFMQLIHDDSLTFKEDIQKAQVSGQGDSLHEHIANLAGSPAIKKGILQTVKVVDELVKVMGRHKPENIVIEMARENQTTQKGQKNSRERMKRIEEGIKELGSQILKEHPVENTQLQNEKLYLYYLQNGRDMYVDQELDINRLSDYDVDHIVPQSFLKDDSIDNKVLTRSDKARGKSDNVPSEEVVKKMKNYWRQLLNAKLITQRKFDNLTKAERGGLSELDKAGFIKRQLVETRQITKHVAQILDSRMNTKYDENDKLIREVKVITLKSKLVSDFRKDFQFYKVREINNYHHAHDAYLNAVVGTALIKKYPKLESEFVYGDYKVYDVRKMIAKSEQEIGKATAKYFFYSNIMNFFKTEITLANGEIRKRPLIETNGETGEIVWDKGRDFATVRKVLSMPQVNIVKKTEVQTGGFSKESILPKRNSDKLIARKKDWDPKKYGGFDSPTVAYSVLVVAKVEKGKSKKLKSVKELLGITIMERSSFEKNPIDFLEAKGYKEVKKDLIIKLPKYSLFELENGRKRMLASAGELQKGNELALPSKYVNFLYLASHYEKLKGSPEDNEQKQLFVEQHKHYLDEIIEQISEFSKRVILADANLDKVLSAYNKHRDKPIREQAENIIHLFTLTNLGAPAAFKYFDTTIDRKRYTSTKEVLDATLIHQSITGLYETRIDLSQLGGDGGPAPAPAPAPGGTLNIEDEYRLHETSKEPDVSLGSTWLSDFPQAWAETGGMGLAVRQAPLIIPLKATSTPVSIKQYPMSQEARLGIKPHIQRLLDQGILVPCQSPWNTPLLPVKKPGTNDYRPVQDLREVNKRVEDIHPTVPNPYNLLSGLPPSHQWYTVLDLKDAFFCLRLHPTSQPLFAFEWRDPEMGISGQLTWTRLPQGFKNSPTLFNEALHRDLAGFRIQHPDLILLQYVDDLLLAATSELDCQQGTRALLQTLGDLGYRASAKKAQICQKQVKYLGYLLKEGQRWLTEARKETVMGQPIPKTPRQLREFLGTAGFCRLWIPGFAEMAAPLYPLTKPGTLFNWGPDQQKAFQEIKQALLTAPALGLPDLTKPFELFVDEKQGYAKGVLTQKLGPWRRPVAYLSKKLDPVAAGWPPCLRMVAAIAVLTKDAGKLTMGQPLVILAPHAVEALVKQPPDRWLSNARMTHYQALLLDTDRVQFGPVVALNPATLLPLPEEGLQHDCLDILAEAHGTRSDLMDQPLPDADHTWYTDGSSFLQEGQRKAGAAVTTETEVIWARALPAGTSAQRAELIALTQALKMAEGKKLNVYTDSRYAFATAHIHGEIYRRRGWLTSEGKEIKNKDEILALLKALFLPKRLSIIHCPGHQKGNSAEARGNRMADQAAREVATRETPETSTLLAGKRTADGSEFEKRTADGSEFESPKKKAKVE

SEQ ID NO: 2296 - protein, 2096 aa, synthetic construct
MPAAKRVKLDGGDKKYSIGLDIGTNSVGWAVITDEYKVPSKKFKVLGNTDRHSIKKNLIGALLFDSGETAEATRLKRTARRRYTRRKNRICYLQEIFSNEMAKVDDSFFHRLEESFLVEEDKKHERHPIFGNIVDEVAYHEKYPTIYHLRKKLVDSTDKADLRLIYLALAHMIKFRGHFLIEGDLNPDNSDVDKLFIQLVQTYNQLFEENPINASGVDAKAILSARLSKSRRLENLIAQLPGEKKNGLFGNLIALSLGLTPNFKSNFDLAEDAKLQLSKDTYDDDLDNLLAQIGDQYADLFLAAKNLSDAILLSDILRVNTEITKAPLSASMIKRYDEHHQDLTLLKALVRQQLPEKYKEIFFDQSKNGYAGYIDGGASQEEFYKFIKPILEKMDGTEELLVKLNREDLLRKQRTFDNGSIPHQIHLGELHAILRRQEDFYPFLKDNREKIEKILTFRIPYYVGPLARGNSRFAWMTRKSEETITPWNFEEVVDKGASAQSFIERMTNFDKNLPNEKVLPKHSLLYEYFTVYNELTKVKYVTEGMRKPAFLSGEQKKAIVDLLFKTNRKVTVKQLKEDYFKKIECFDSVEISGVEDRFNASLGTYHDLLKIIKDKDFLDNEENEDILEDIVLTLTLFEDREMIEERLKTYAHLFDDKVMKQLKRRRYTGWGRLSRKLINGIRDKQSGKTILDFLKSDGFANRNFMQLIHDDSLTFKEDIQKAQVSGQGDSLHEHIANLAGSPAIKKGILQTVKVVDELVKVMGRHKPENIVIEMARENQTTQKGQKNSRERMKRIEEGIKELGSQILKEHPVENTQLQNEKLYLYYLQNGRDMYVDQELDINRLSDYDVDHIVPQSFLKDDSIDNKVLTRSDKARGKSDNVPSEEVVKKMKNYWRQLLNAKLITQRKFDNLTKAERGGLSELDKAGFIKRQLVETRQITKHVAQILDSRMNTKYDENDKLIREVKVITLKSKLVSDFRKDFQFYKVREINNYHHAHDAYLNAVVGTALIKKYPKLESEFVYGDYKVYDVRKMIAKSEQEIGKATAKYFFYSNIMNFFKTEITLANGEIRKRPLIETNGETGEIVWDKGRDFATVRKVLSMPQVNIVKKTEVQTGGFSKESILPKRNSDKLIARKKDWDPKKYGGFDSPTVAYSVLVVAKVEKGKSKKLKSVKELLGITIMERSSFEKNPIDFLEAKGYKEVKKDLIIKLPKYSLFELENGRKRMLASAGELQKGNELALPSKYVNFLYLASHYEKLKGSPEDNEQKQLFVEQHKHYLDEIIEQISEFSKRVILADANLDKVLSAYNKHRDKPIREQAENIIHLFTLTNLGAPAAFKYFDTTIDRKRYTSTKEVLDATLIHQSITGLYETRIDLSQLGGDGGGGSEAAAKGSSGGTLNIEDEYRLHETSKEPDVSLGSTWLSDFPQAWAETGGMGLAVRQAPLIIPLKATSTPVSIKQYPMSQEARLGIKPHIQRLLDQGILVPCQSPWNTPLLPVKKPGTNDYRPVQDLREVNKRVEDIHPTVPNPYNLLSGLPPSHQWYTVLDLKDAFFCLRLHPTSQPLFAFEWRDPEMGISGQLTWTRLPQGFKNSPTLFNEALHRDLAGFRIQHPDLILLQYVDDLLLAATSELDCQQGTRALLQTLGDLGYRASAKKAQICQKQVKYLGYLLKEGQRWLTEARKETVMGQPIPKTPRQLREFLGTAGFCRLWIPGFAEMAAPLYPLTKPGTLFNWGPDQQKAFQEIKQALLTAPALGLPDLTKPFELFVDEKQGYAKGVLTQKLGPWRRPVAYLSKKLDPVAAGWPPCLRMVAAIAVLTKDAGKLTMGQPLVILAPHAVEALVKQPPDRWLSNARMTHYQALLLDTDRVQFGPVVALNPATLLPLPEEGLQHDCLDILAEAHGTRSDLMDQPLPDADHTWYTDGSSFLQEGQRKAGAAVTTETEVIWARALPAGTSAQRAELIALTQALKMAEGKKLNVYTDSRYAFATAHIHGEIYRRRGWLTSEGKEIKNKDEILALLKALFLPKRLSIIHCPGHQKGNSAEARGNRMADQAAREVATRETPETSTLLAGKRTADGSEFEKRTADGSEFESPKKKAKVE

SEQ ID NO: 2297 - protein, 2093 aa, synthetic construct
MPAAKRVKLDGGDKKYSIGLDIGTNSVGWAVITDEYKVPSKKFKVLGNTDRHSIKKNLIGALLFDSGETAEATRLKRTARRRYTRRKNRICYLQEIFSNEMAKVDDSFFHRLEESFLVEEDKKHERHPIFGNIVDEVAYHEKYPTIYHLRKKLVDSTDKADLRLIYLALAHMIKFRGHFLIEGDLNPDNSDVDKLFIQLVQTYNQLFEENPINASGVDAKAILSARLSKSRRLENLIAQLPGEKKNGLFGNLIALSLGLTPNFKSNFDLAEDAKLQLSKDTYDDDLDNLLAQIGDQYADLFLAAKNLSDAILLSDILRVNTEITKAPLSASMIKRYDEHHQDLTLLKALVRQQLPEKYKEIFFDQSKNGYAGYIDGGASQEEFYKFIKPILEKMDGTEELLVKLNREDLLRKQRTFDNGSIPHQIHLGELHAILRRQEDFYPFLKDNREKIEKILTFRIPYYVGPLARGNSRFAWMTRKSEETITPWNFEEVVDKGASAQSFIERMTNFDKNLPNEKVLPKHSLLYEYFTVYNELTKVKYVTEGMRKPAFLSGEQKKAIVDLLFKTNRKVTVKQLKEDYFKKIECFDSVEISGVEDRFNASLGTYHDLLKIIKDKDFLDNEENEDILEDIVLTLTLFEDREMIEERLKTYAHLFDDKVMKQLKRRRYTGWGRLSRKLINGIRDKQSGKTILDFLKSDGFANRNFMQLIHDDSLTFKEDIQKAQVSGQGDSLHEHIANLAGSPAIKKGILQTVKVVDELVKVMGRHKPENIVIEMARENQTTQKGQKNSRERMKRIEEGIKELGSQILKEHPVENTQLQNEKLYLYYLQNGRDMYVDQELDINRLSDYDVDHIVPQSFLKDDSIDNKVLTRSDKARGKSDNVPSEEVVKKMKNYWRQLLNAKLITQRKFDNLTKAERGGLSELDKAGFIKRQLVETRQITKHVAQILDSRMNTKYDENDKLIREVKVITLKSKLVSDFRKDFQFYKVREINNYHHAHDAYLNAVVGTALIKKYPKLESEFVYGDYKVYDVRKMIAKSEQEIGKATAKYFFYSNIMNFFKTEITLANGEIRKRPLIETNGETGEIVWDKGRDFATVRKVLSMPQVNIVKKTEVQTGGFSKESILPKRNSDKLIARKKDWDPKKYGGFDSPTVAYSVLVVAKVEKGKSKKLKSVKELLGITIMERSSFEKNPIDFLEAKGYKEVKKDLIIKLPKYSLFELENGRKRMLASAGELQKGNELALPSKYVNFLYLASHYEKLKGSPEDNEQKQLFVEQHKHYLDEIIEQISEFSKRVILADANLDKVLSAYNKHRDKPIREQAENIIHLFTLTNLGAPAAFKYFDTTIDRKRYTSTKEVLDATLIHQSITGLYETRIDLSQLGGDGGEAAAKGSSGGTLNIEDEYRLHETSKEPDVSLGSTWLSDFPQAWAETGGMGLAVRQAPLIIPLKATSTPVSIKQYPMSQEARLGIKPHIQRLLDQGILVPCQSPWNTPLLPVKKPGTNDYRPVQDLREVNKRVEDIHPTVPNPYNLLSGLPPSHQWYTVLDLKDAFFCLRLHPTSQPLFAFEWRDPEMGISGQLTWTRLPQGFKNSPTLFNEALHRDLAGFRIQHPDLILLQYVDDLLLAATSELDCQQGTRALLQTLGDLGYRASAKKAQICQKQVKYLGYLLKEGQRWLTEARKETVMGQPIPKTPRQLREFLGTAGFCRLWIPGFAEMAAPLYPLTKPGTLFNWGPDQQKAFQEIKQALLTAPALGLPDLTKPFELFVDEKQGYAKGVLTQKLGPWRRPVAYLSKKLDPVAAGWPPCLRMVAAIAVLTKDAGKLTMGQPLVILAPHAVEALVKQPPDRWLSNARMTHYQALLLDTDRVQFGPVVALNPATLLPLPEEGLQHDCLDILAEAHGTRSDLMDQPLPDADHTWYTDGSSFLQEGQRKAGAAVTTETEVIWARALPAGTSAQRAELIALTQALKMAEGKKLNVYTDSRYAFATAHIHGEIYRRRGWLTSEGKEIKNKDEILALLKALFLPKRLSIIHCPGHQKGNSAEARGNRMADQAAREVATRETPETSTLLAGKRTADGSEFEKRTADGSEFESPKKKAKVE

SEQ ID NO: 2298 - protein, 2091 aa, synthetic construct
MPAAKRVKLDGGDKKYSIGLDIGTNSVGWAVITDEYKVPSKKFKVLGNTDRHSIKKNLIGALLFDSGETAEATRLKRTARRRYTRRKNRICYLQEIFSNEMAKVDDSFFHRLEESFLVEEDKKHERHPIFGNIVDEVAYHEKYPTIYHLRKKLVDSTDKADLRLIYLALAHMIKFRGHFLIEGDLNPDNSDVDKLFIQLVQTYNQLFEENPINASGVDAKAILSARLSKSRRLENLIAQLPGEKKNGLFGNLIALSLGLTPNFKSNFDLAEDAKLQLSKDTYDDDLDNLLAQIGDQYADLFLAAKNLSDAILLSDILRVNTEITKAPLSASMIKRYDEHHQDLTLLKALVRQQLPEKYKEIFFDQSKNGYAGYIDGGASQEEFYKFIKPILEKMDGTEELLVKLNREDLLRKQRTFDNGSIPHQIHLGELHAILRRQEDFYPFLKDNREKIEKILTFRIPYYVGPLARGNSRFAWMTRKSEETITPWNFEEVVDKGASAQSFIERMTNFDKNLPNEKVLPKHSLLYEYFTVYNELTKVKYVTEGMRKPAFLSGEQKKAIVDLLFKTNRKVTVKQLKEDYFKKIECFDSVEISGVEDRFNASLGTYHDLLKIIKDKDFLDNEENEDILEDIVLTLTLFEDREMIEERLKTYAHLFDDKVMKQLKRRRYTGWGRLSRKLINGIRDKQSGKTILDFLKSDGFANRNFMQLIHDDSLTFKEDIQKAQVSGQGDSLHEHIANLAGSPAIKKGILQTVKVVDELVKVMGRHKPENIVIEMARENQTTQKGQKNSRERMKRIEEGIKELGSQILKEHPVENTQLQNEKLYLYYLQNGRDMYVDQELDINRLSDYDVDHIVPQSFLKDDSIDNKVLTRSDKARGKSDNVPSEEVVKKMKNYWRQLLNAKLITQRKFDNLTKAERGGLSELDKAGFIKRQLVETRQITKHVAQILDSRMNTKYDENDKLIREVKVITLKSKLVSDFRKDFQFYKVREINNYHHAHDAYLNAVVGTALIKKYPKLESEFVYGDYKVYDVRKMIAKSEQEIGKATAKYFFYSNIMNFFKTEITLANGEIRKRPLIETNGETGEIVWDKGRDFATVRKVLSMPQVNIVKKTEVQTGGFSKESILPKRNSDKLIARKKDWDPKKYGGFDSPTVAYSVLVVAKVEKGKSKKLKSVKELLGITIMERSSFEKNPIDFLEAKGYKEVKKDLIIKLPKYSLFELENGRKRMLASAGELQKGNELALPSKYVNFLYLASHYEKLKGSPEDNEQKQLFVEQHKHYLDEIIEQISEFSKRVILADANLDKVLSAYNKHRDKPIREQAENIIHLFTLTNLGAPAAFKYFDTTIDRKRYTSTKEVLDATLIHQSITGLYETRIDLSQLGGDGGPAPGGGGGTLNIEDEYRLHETSKEPDVSLGSTWLSDFPQAWAETGGMGLAVRQAPLIIPLKATSTPVSIKQYPMSQEARLGIKPHIQRLLDQGILVPCQSPWNTPLLPVKKPGTNDYRPVQDLREVNKRVEDIHPTVPNPYNLLSGLPPSHQWYTVLDLKDAFFCLRLHPTSQPLFAFEWRDPEMGISGQLTWTRLPQGFKNSPTLFNEALHRDLAGFRIQHPDLILLQYVDDLLLAATSELDCQQGTRALLQTLGDLGYRASAKKAQICQKQVKYLGYLLKEGQRWLTEARKETVMGQPIPKTPRQLREFLGTAGFCRLWIPGFAEMAAPLYPLTKPGTLFNWGPDQQKAFQEIKQALLTAPALGLPDLTKPFELFVDEKQGYAKGVLTQKLGPWRRPVAYLSKKLDPVAAGWPPCLRMVAAIAVLTKDAGKLTMGQPLVILAPHAVEALVKQPPDRWLSNARMTHYQALLLDTDRVQFGPVVALNPATLLPLPEEGLQHDCLDILAEAHGTRSDLMDQPLPDADHTWYTDGSSFLQEGQRKAGAAVTTETEVIWARALPAGTSAQRAELIALTQALKMAEGKKLNVYTDSRYAFATAHIHGEIYRRRGWLTSEGKEIKNKDEILALLKALFLPKRLSIIHCPGHQKGNSAEARGNRMADQAAREVATRETPETSTLLAGKRTADGSEFEKRTADGSEFESPKKKAKVE

SEQ ID NO: 2299 - protein, 2088 aa, synthetic construct
MPAAKRVKLDGGDKKYSIGLDIGTNSVGWAVITDEYKVPSKKFKVLGNTDRHSIKKNLIGALLFDSGETAEATRLKRTARRRYTRRKNRICYLQEIFSNEMAKVDDSFFHRLEESFLVEEDKKHERHPIFGNIVDEVAYHEKYPTIYHLRKKLVDSTDKADLRLIYLALAHMIKFRGHFLIEGDLNPDNSDVDKLFIQLVQTYNQLFEENPINASGVDAKAILSARLSKSRRLENLIAQLPGEKKNGLFGNLIALSLGLTPNFKSNFDLAEDAKLQLSKDTYDDDLDNLLAQIGDQYADLFLAAKNLSDAILLSDILRVNTEITKAPLSASMIKRYDEHHQDLTLLKALVRQQLPEKYKEIFFDQSKNGYAGYIDGGASQEEFYKFIKPILEKMDGTEELLVKLNREDLLRKQRTFDNGSIPHQIHLGELHAILRRQEDFYPFLKDNREKIEKILTFRIPYYVGPLARGNSRFAWMTRKSEETITPWNFEEVVDKGASAQSFIERMTNFDKNLPNEKVLPKHSLLYEYFTVYNELTKVKYVTEGMRKPAFLSGEQKKAIVDLLFKTNRKVTVKQLKEDYFKKIECFDSVEISGVEDRFNASLGTYHDLLKIIKDKDFLDNEENEDILEDIVLTLTLFEDREMIEERLKTYAHLFDDKVMKQLKRRRYTGWGRLSRKLINGIRDKQSGKTILDFLKSDGFANRNFMQLIHDDSLTFKEDIQKAQVSGQGDSLHEHIANLAGSPAIKKGILQTVKVVDELVKVMGRHKPENIVIEMARENQTTQKGQKNSRERMKRIEEGIKELGSQILKEHPVENTQLQNEKLYLYYLQNGRDMYVDQELDINRLSDYDVDHIVPQSFLKDDSIDNKVLTRSDKARGKSDNVPSEEVVKKMKNYWRQLLNAKLITQRKFDNLTKAERGGLSELDKAGFIKRQLVETRQITKHVAQILDSRMNTKYDENDKLIREVKVITLKSKLVSDFRKDFQFYKVREINNYHHAHDAYLNAVVGTALIKKYPKLESEFVYGDYKVYDVRKMIAKSEQEIGKATAKYFFYSNIMNFFKTEITLANGEIRKRPLIETNGETGEIVWDKGRDFATVRKVLSMPQVNIVKKTEVQTGGFSKESILPKRNSDKLIARKKDWDPKKYGGFDSPTVAYSVLVVAKVEKGKSKKLKSVKELLGITIMERSSFEKNPIDFLEAKGYKEVKKDLIIKLPKYSLFELENGRKRMLASAGELQKGNELALPSKYVNFLYLASHYEKLKGSPEDNEQKQLFVEQHKHYLDEIIEQISEFSKRVILADANLDKVLSAYNKHRDKPIREQAENIIHLFTLTNLGAPAAFKYFDTTIDRKRYTSTKEVLDATLIHQSITGLYETRIDLSQLGGDGGPAPGGTLNIEDEYRLHETSKEPDVSLGSTWLSDFPQAWAETGGMGLAVRQAPLIIPLKATSTPVSIKQYPMSQEARLGIKPHIQRLLDQGILVPCQSPWNTPLLPVKKPGTNDYRPVQDLREVNKRVEDIHPTVPNPYNLLSGLPPSHQWYTVLDLKDAFFCLRLHPTSQPLFAFEWRDPEMGISGQLTWTRLPQGFKNSPTLFNEALHRDLAGFRIQHPDLILLQYVDDLLLAATSELDCQQGTRALLQTLGDLGYRASAKKAQICQKQVKYLGYLLKEGQRWLTEARKETVMGQPIPKTPRQLREFLGKAGFCRLFIPGFAEMAAPLYPLTKPGTLFNWGPDQQKAFQEIKQALLTAPALGLPDLTKPFELFVDEKQGYAKGVLTQKLGPWRRPVAYLSKKLDPVAAGWPPCLRMVAAIAVLTKDAGKLTMGQPLVILAPHAVEALVKQPPDRWLSNARMTHYQALLLDTDRVQFGPVVALNPATLLPLPEEGLQHDCLDILAEAHGTRSDLMDQPLPDADHTWYTDGSSFLQEGQRKAGAAVTTETEVIWARALPAGTSAQRAELIALTQALKMAEGKKLNVYTDSRYAFATAHIHGEIYRRRGWLTSEGKEIKNKDEILALLKALFLPKRLSIIHCPGHQKGNSAEARGNRMADQAAREVATRETPETSTLLAGKRTADGSEFEKRTADGSEFESPKKKAKVE

SEQ ID NO: 2300 - protein, 2103 aa, synthetic construct
MPAAKRVKLDGGDKKYSIGLDIGTNSVGWAVITDEYKVPSKKFKVLGNTDRHSIKKNLIGALLFDSGETAEATRLKRTARRRYTRRKNRICYLQEIFSNEMAKVDDSFFHRLEESFLVEEDKKHERHPIFGNIVDEVAYHEKYPTIYHLRKKLVDSTDKADLRLIYLALAHMIKFRGHFLIEGDLNPDNSDVDKLFIQLVQTYNQLFEENPINASGVDAKAILSARLSKSRRLENLIAQLPGEKKNGLFGNLIALSLGLTPNFKSNFDLAEDAKLQLSKDTYDDDLDNLLAQIGDQYADLFLAAKNLSDAILLSDILRVNTEITKAPLSASMIKRYDEHHQDLTLLKALVRQQLPEKYKEIFFDQSKNGYAGYIDGGASQEEFYKFIKPILEKMDGTEELLVKLNREDLLRKQRTFDNGSIPHQIHLGELHAILRRQEDFYPFLKDNREKIEKILTFRIPYYVGPLARGNSRFAWMTRKSEETITPWNFEEVVDKGASAQSFIERMTNFDKNLPNEKVLPKHSLLYEYFTVYNELTKVKYVTEGMRKPAFLSGEQKKAIVDLLFKTNRKVTVKQLKEDYFKKIECFDSVEISGVEDRFNASLGTYHDLLKIIKDKDFLDNEENEDILEDIVLTLTLFEDREMIEERLKTYAHLFDDKVMKQLKRRRYTGWGRLSRKLINGIRDKQSGKTILDFLKSDGFANRNFMQLIHDDSLTFKEDIQKAQVSGQGDSLHEHIANLAGSPAIKKGILQTVKVVDELVKVMGRHKPENIVIEMARENQTTQKGQKNSRERMKRIEEGIKELGSQILKEHPVENTQLQNEKLYLYYLQNGRDMYVDQELDINRLSDYDVDHIVPQSFLKDDSIDNKVLTRSDKARGKSDNVPSEEVVKKMKNYWRQLLNAKLITQRKFDNLTKAERGGLSELDKAGFIKRQLVETRQITKHVAQILDSRMNTKYDENDKLIREVKVITLKSKLVSDFRKDFQFYKVREINNYHHAHDAYLNAVVGTALIKKYPKLESEFVYGDYKVYDVRKMIAKSEQEIGKATAKYFFYSNIMNFFKTEITLANGEIRKRPLIETNGETGEIVWDKGRDFATVRKVLSMPQVNIVKKTEVQTGGFSKESILPKRNSDKLIARKKDWDPKKYGGFDSPTVAYSVLVVAKVEKGKSKKLKSVKELLGITIMERSSFEKNPIDFLEAKGYKEVKKDLIIKLPKYSLFELENGRKRMLASAGELQKGNELALPSKYVNFLYLASHYEKLKGSPEDNEQKQLFVEQHKHYLDEIIEQISEFSKRVILADANLDKVLSAYNKHRDKPIREQAENIIHLFTLTNLGAPAAFKYFDTTIDRKRYTSTKEVLDATLIHQSITGLYETRIDLSQLGGDGGGGSGGSGGSGGSGGSGGSGGTLNIEDEYRLHETSKEPDVSLGSTWLSDFPQAWAETGGMGLAVRQAPLIIPLKATSTPVSIKQYPMSQEARLGIKPHIQRLLDQGILVPCQSPWNTPLLPVKKPGTNDYRPVQDLREVNKRVEDIHPTVPNPYNLLSGLPPSHQWYTVLDLKDAFFCLRLHPTSQPLFAFEWRDPEMGISGQLTWTRLPQGFKNSPTLFNEALHRDLAGFRIQHPDLILLQYVDDLLLAATSELDCQQGTRALLQTLGDLGYRASAKKAQICQKQVKYLGYLLKEGQRWLTEARKETVMGQPIPKTPRQLREFLGKAGFCRLFIPGFAEMAAPLYPLTKPGTLFNWGPDQQKAFQEIKQALLTAPALGLPDLTKPFELFVDEKQGYAKGVLTQKLGPWRRPVAYLSKKLDPVAAGWPPCLRMVAAIAVLTKDAGKLTMGQPLVILAPHAVEALVKQPPDRWLSNARMTHYQALLLDTDRVQFGPVVALNPATLLPLPEEGLQHDCLDILAEAHGTRSDLMDQPLPDADHTWYTDGSSFLQEGQRKAGAAVTTETEVIWARALPAGTSAQRAELIALTQALKMAEGKKLNVYTDSRYAFATAHIHGEIYRRRGWLTSEGKEIKNKDEILALLKALFLPKRLSIIHCPGHQKGNSAEARGNRMADQAAREVATRETPETSTLLAGKRTADGSEFEKRTADGSEFESPKKKAKVE

SEQ ID NO: 2301 - protein, 2096 aa, synthetic construct
MPAAKRVKLDGGDKKYSIGLDIGTNSVGWAVITDEYKVPSKKFKVLGNTDRHSIKKNLIGALLFDSGETAEATRLKRTARRRYTRRKNRICYLQEIFSNEMAKVDDSFFHRLEESFLVEEDKKHERHPIFGNIVDEVAYHEKYPTIYHLRKKLVDSTDKADLRLIYLALAHMIKFRGHFLIEGDLNPDNSDVDKLFIQLVQTYNQLFEENPINASGVDAKAILSARLSKSRRLENLIAQLPGEKKNGLFGNLIALSLGLTPNFKSNFDLAEDAKLQLSKDTYDDDLDNLLAQIGDQYADLFLAAKNLSDAILLSDILRVNTEITKAPLSASMIKRYDEHHQDLTLLKALVRQQLPEKYKEIFFDQSKNGYAGYIDGGASQEEFYKFIKPILEKMDGTEELLVKLNREDLLRKQRTFDNGSIPHQIHLGELHAILRRQEDFYPFLKDNREKIEKILTFRIPYYVGPLARGNSRFAWMTRKSEETITPWNFEEVVDKGASAQSFIERMTNFDKNLPNEKVLPKHSLLYEYFTVYNELTKVKYVTEGMRKPAFLSGEQKKAIVDLLFKTNRKVTVKQLKEDYFKKIECFDSVEISGVEDRFNASLGTYHDLLKIIKDKDFLDNEENEDILEDIVLTLTLFEDREMIEERLKTYAHLFDDKVMKQLKRRRYTGWGRLSRKLINGIRDKQSGKTILDFLKSDGFANRNFMQLIHDDSLTFKEDIQKAQVSGQGDSLHEHIANLAGSPAIKKGILQTVKVVDELVKVMGRHKPENIVIEMARENQTTQKGQKNSRERMKRIEEGIKELGSQILKEHPVENTQLQNEKLYLYYLQNGRDMYVDQELDINRLSDYDVDHIVPQSFLKDDSIDNKVLTRSDKARGKSDNVPSEEVVKKMKNYWRQLLNAKLITQRKFDNLTKAERGGLSELDKAGFIKRQLVETRQITKHVAQILDSRMNTKYDENDKLIREVKVITLKSKLVSDFRKDFQFYKVREINNYHHAHDAYLNAVVGTALIKKYPKLESEFVYGDYKVYDVRKMIAKSEQEIGKATAKYFFYSNIMNFFKTEITLANGEIRKRPLIETNGETGEIVWDKGRDFATVRKVLSMPQVNIVKKTEVQTGGFSKESILPKRNSDKLIARKKDWDPKKYGGFDSPTVAYSVLVVAKVEKGKSKKLKSVKELLGITIMERSSFEKNPIDFLEAKGYKEVKKDLIIKLPKYSLFELENGRKRMLASAGELQKGNELALPSKYVNFLYLASHYEKLKGSPEDNEQKQLFVEQHKHYLDEIIEQISEFSKRVILADANLDKVLSAYNKHRDKPIREQAENIIHLFTLTNLGAPAAFKYFDTTIDRKRYTSTKEVLDATLIHQSITGLYETRIDLSQLGGDGGPAPAPAPAPAPGGTLNIEDEYRLHETSKEPDVSLGSTWLSDFPQAWAETGGMGLAVRQAPLIIPLKATSTPVSIKQYPMSQEARLGIKPHIQRLLDQGILVPCQSPWNTPLLPVKKPGTNDYRPVQDLREVNKRVEDIHPTVPNPYNLLSGLPPSHQWYTVLDLKDAFFCLRLHPTSQPLFAFEWRDPEMGISGQLTWTRLPQGFKNSPTLFNEALHRDLAGFRIQHPDLILLQYVDDLLLAATSELDCQQGTRALLQTLGDLGYRASAKKAQICQKQVKYLGYLLKEGQRWLTEARKETVMGQPIPKTPRQLREFLGKAGFCRLFIPGFAEMAAPLYPLTKPGTLFNWGPDQQKAFQEIKQALLTAPALGLPDLTKPFELFVDEKQGYAKGVLTQKLGPWRRPVAYLSKKLDPVAAGWPPCLRMVAAIAVLTKDAGKLTMGQPLVILAPHAVEALVKQPPDRWLSNARMTHYQALLLDTDRVQFGPVVALNPATLLPLPEEGLQHDCLDILAEAHGTRSDLMDQPLPDADHTWYTDGSSFLQEGQRKAGAAVTTETEVIWARALPAGTSAQRAELIALTQALKMAEGKKLNVYTDSRYAFATAHIHGEIYRRRGWLTSEGKEIKNKDEILALLKALFLPKRLSIIHCPGHQKGNSAEARGNRMADQAAREVATRETPETSTLLAGKRTADGSEFEKRTADGSEFESPKKKAKVE

SEQ ID NO: 2302 - protein, 2091 aa, synthetic construct
MPAAKRVKLDGGDKKYSIGLDIGTNSVGWAVITDEYKVPSKKFKVLGNTDRHSIKKNLIGALLFDSGETAEATRLKRTARRRYTRRKNRICYLQEIFSNEMAKVDDSFFHRLEESFLVEEDKKHERHPIFGNIVDEVAYHEKYPTIYHLRKKLVDSTDKADLRLIYLALAHMIKFRGHFLIEGDLNPDNSDVDKLFIQLVQTYNQLFEENPINASGVDAKAILSARLSKSRRLENLIAQLPGEKKNGLFGNLIALSLGLTPNFKSNFDLAEDAKLQLSKDTYDDDLDNLLAQIGDQYADLFLAAKNLSDAILLSDILRVNTEITKAPLSASMIKRYDEHHQDLTLLKALVRQQLPEKYKEIFFDQSKNGYAGYIDGGASQEEFYKFIKPILEKMDGTEELLVKLNREDLLRKQRTFDNGSIPHQIHLGELHAILRRQEDFYPFLKDNREKIEKILTFRIPYYVGPLARGNSRFAWMTRKSEETITPWNFEEVVDKGASAQSFIERMTNFDKNLPNEKVLPKHSLLYEYFTVYNELTKVKYVTEGMRKPAFLSGEQKKAIVDLLFKTNRKVTVKQLKEDYFKKIECFDSVEISGVEDRFNASLGTYHDLLKIIKDKDFLDNEENEDILEDIVLTLTLFEDREMIEERLKTYAHLFDDKVMKQLKRRRYTGWGRLSRKLINGIRDKQSGKTILDFLKSDGFANRNFMQLIHDDSLTFKEDIQKAQVSGQGDSLHEHIANLAGSPAIKKGILQTVKVVDELVKVMGRHKPENIVIEMARENQTTQKGQKNSRERMKRIEEGIKELGSQILKEHPVENTQLQNEKLYLYYLQNGRDMYVDQELDINRLSDYDVDHIVPQSFLKDDSIDNKVLTRSDKARGKSDNVPSEEVVKKMKNYWRQLLNAKLITQRKFDNLTKAERGGLSELDKAGFIKRQLVETRQITKHVAQILDSRMNTKYDENDKLIREVKVITLKSKLVSDFRKDFQFYKVREINNYHHAHDAYLNAVVGTALIKKYPKLESEFVYGDYKVYDVRKMIAKSEQEIGKATAKYFFYSNIMNFFKTEITLANGEIRKRPLIETNGETGEIVWDKGRDFATVRKVLSMPQVNIVKKTEVQTGGFSKESILPKRNSDKLIARKKDWDPKKYGGFDSPTVAYSVLVVAKVEKGKSKKLKSVKELLGITIMERSSFEKNPIDFLEAKGYKEVKKDLIIKLPKYSLFELENGRKRMLASAGELQKGNELALPSKYVNFLYLASHYEKLKGSPEDNEQKQLFVEQHKHYLDEIIEQISEFSKRVILADANLDKVLSAYNKHRDKPIREQAENIIHLFTLTNLGAPAAFKYFDTTIDRKRYTSTKEVLDATLIHQSITGLYETRIDLSQLGGDGGGGGPAPGGTLNIEDEYRLHETSKEPDVSLGSTWLSDFPQAWAETGGMGLAVRQAPLIIPLKATSTPVSIKQYPMSQEARLGIKPHIQRLLDQGILVPCQSPWNTPLLPVKKPGTNDYRPVQDLREVNKRVEDIHPTVPNPYNLLSGLPPSHQWYTVLDLKDAFFCLRLHPTSQPLFAFEWRDPEMGISGQLTWTRLPQGFKNSPTLFNEALHRDLAGFRIQHPDLILLQYVDDLLLAATSELDCQQGTRALLQTLGDLGYRASAKKAQICQKQVKYLGYLLKEGQRWLTEARKETVMGQPIPKTPRQLREFLGKAGFCRLFIPGFAEMAAPLYPLTKPGTLFNWGPDQQKAFQEIKQALLTAPALGLPDLTKPFELFVDEKQGYAKGVLTQKLGPWRRPVAYLSKKLDPVAAGWPPCLRMVAAIAVLTKDAGKLTMGQPLVILAPHAVEALVKQPPDRWLSNARMTHYQALLLDTDRVQFGPVVALNPATLLPLPEEGLQHDCLDILAEAHGTRSDLMDQPLPDADHTWYTDGSSFLQEGQRKAGAAVTTETEVIWARALPAGTSAQRAELIALTQALKMAEGKKLNVYTDSRYAFATAHIHGEIYRRRGWLTSEGKEIKNKDEILALLKALFLPKRLSIIHCPGHQKGNSAEARGNRMADQAAREVATRETPETSTLLAGKRTADGSEFEKRTADGSEFESPKKKAKVE

SEQ ID NO: 2303 - protein, 2115 aa, synthetic construct
MPAAKRVKLDGGDKKYSIGLDIGTNSVGWAVITDEYKVPSKKFKVLGNTDRHSIKKNLIGALLFDSGETAEATRLKRTARRRYTRRKNRICYLQEIFSNEMAKVDDSFFHRLEESFLVEEDKKHERHPIFGNIVDEVAYHEKYPTIYHLRKKLVDSTDKADLRLIYLALAHMIKFRGHFLIEGDLNPDNSDVDKLFIQLVQTYNQLFEENPINASGVDAKAILSARLSKSRRLENLIAQLPGEKKNGLFGNLIALSLGLTPNFKSNFDLAEDAKLQLSKDTYDDDLDNLLAQIGDQYADLFLAAKNLSDAILLSDILRVNTEITKAPLSASMIKRYDEHHQDLTLLKALVRQQLPEKYKEIFFDQSKNGYAGYIDGGASQEEFYKFIKPILEKMDGTEELLVKLNREDLLRKQRTFDNGSIPHQIHLGELHAILRRQEDFYPFLKDNREKIEKILTFRIPYYVGPLARGNSRFAWMTRKSEETITPWNFEEVVDKGASAQSFIERMTNFDKNLPNEKVLPKHSLLYEYFTVYNELTKVKYVTEGMRKPAFLSGEQKKAIVDLLFKTNRKVTVKQLKEDYFKKIECFDSVEISGVEDRFNASLGTYHDLLKIIKDKDFLDNEENEDILEDIVLTLTLFEDREMIEERLKTYAHLFDDKVMKQLKRRRYTGWGRLSRKLINGIRDKQSGKTILDFLKSDGFANRNFMQLIHDDSLTFKEDIQKAQVSGQGDSLHEHIANLAGSPAIKKGILQTVKVVDELVKVMGRHKPENIVIEMARENQTTQKGQKNSRERMKRIEEGIKELGSQILKEHPVENTQLQNEKLYLYYLQNGRDMYVDQELDINRLSDYDVDHIVPQSFLKDDSIDNKVLTRSDKARGKSDNVPSEEVVKKMKNYWRQLLNAKLITQRKFDNLTKAERGGLSELDKAGFIKRQLVETRQITKHVAQILDSRMNTKYDENDKLIREVKVITLKSKLVSDFRKDFQFYKVREINNYHHAHDAYLNAVVGTALIKKYPKLESEFVYGDYKVYDVRKMIAKSEQEIGKATAKYFFYSNIMNFFKTEITLANGEIRKRPLIETNGETGEIVWDKGRDFATVRKVLSMPQVNIVKKTEVQTGGFSKESILPKRNSDKLIARKKDWDPKKYGGFDSPTVAYSVLVVAKVEKGKSKKLKSVKELLGITIMERSSFEKNPIDFLEAKGYKEVKKDLIIKLPKYSLFELENGRKRMLASAGELQKGNELALPSKYVNFLYLASHYEKLKGSPEDNEQKQLFVEQHKHYLDEIIEQISEFSKRVILADANLDKVLSAYNKHRDKPIREQAENIIHLFTLTNLGAPAAFKYFDTTIDRKRYTSTKEVLDATLIHQSITGLYETRIDLSQLGGDGGGGGGSGGGGSGGGGSGGGGSGGGGSGGGGSGGTLNIEDEYRLHETSKEPDVSLGSTWLSDFPQAWAETGGMGLAVRQAPLIIPLKATSTPVSIKQYPMSQEARLGIKPHIQRLLDQGILVPCQSPWNTPLLPVKKPGTNDYRPVQDLREVNKRVEDIHPTVPNPYNLLSGLPPSHQWYTVLDLKDAFFCLRLHPTSQPLFAFEWRDPEMGISGQLTWTRLPQGFKNSPTLFNEALHRDLAGFRIQHPDLILLQYVDDLLLAATSELDCQQGTRALLQTLGDLGYRASAKKAQICQKQVKYLGYLLKEGQRWLTEARKETVMGQPIPKTPRQLREFLGKAGFCRLFIPGFAEMAAPLYPLTKPGTLFNWGPDQQKAFQEIKQALLTAPALGLPDLTKPFELFVDEKQGYAKGVLTQKLGPWRRPVAYLSKKLDPVAAGWPPCLRMVAAIAVLTKDAGKLTMGQPLVILAPHAVEALVKQPPDRWLSNARMTHYQALLLDTDRVQFGPVVALNPATLLPLPEEGLQHDCLDILAEAHGTRSDLMDQPLPDADHTWYTDGSSFLQEGQRKAGAAVTTETEVIWARALPAGTSAQRAELIALTQALKMAEGKKLNVYTDSRYAFATAHIHGEIYRRRGWLTSEGKEIKNKDEILALLKALFLPKRLSIIHCPGHQKGNSAEARGNRMADQAAREVATRETPETSTLLAGKRTADGSEFEKRTADGSEFESPKKKAKVE

SEQ ID NO: 2304 - protein, 2103 aa, synthetic construct
MPAAKRVKLDGGDKKYSIGLDIGTNSVGWAVITDEYKVPSKKFKVLGNTDRHSIKKNLIGALLFDSGETAEATRLKRTARRRYTRRKNRICYLQEIFSNEMAKVDDSFFHRLEESFLVEEDKKHERHPIFGNIVDEVAYHEKYPTIYHLRKKLVDSTDKADLRLIYLALAHMIKFRGHFLIEGDLNPDNSDVDKLFIQLVQTYNQLFEENPINASGVDAKAILSARLSKSRRLENLIAQLPGEKKNGLFGNLIALSLGLTPNFKSNFDLAEDAKLQLSKDTYDDDLDNLLAQIGDQYADLFLAAKNLSDAILLSDILRVNTEITKAPLSASMIKRYDEHHQDLTLLKALVRQQLPEKYKEIFFDQSKNGYAGYIDGGASQEEFYKFIKPILEKMDGTEELLVKLNREDLLRKQRTFDNGSIPHQIHLGELHAILRRQEDFYPFLKDNREKIEKILTFRIPYYVGPLARGNSRFAWMTRKSEETITPWNFEEVVDKGASAQSFIERMTNFDKNLPNEKVLPKHSLLYEYFTVYNELTKVKYVTEGMRKPAFLSGEQKKAIVDLLFKTNRKVTVKQLKEDYFKKIECFDSVEISGVEDRFNASLGTYHDLLKIIKDKDFLDNEENEDILEDIVLTLTLFEDREMIEERLKTYAHLFDDKVMKQLKRRRYTGWGRLSRKLINGIRDKQSGKTILDFLKSDGFANRNFMQLIHDDSLTFKEDIQKAQVSGQGDSLHEHIANLAGSPAIKKGILQTVKVVDELVKVMGRHKPENIVIEMARENQTTQKGQKNSRERMKRIEEGIKELGSQILKEHPVENTQLQNEKLYLYYLQNGRDMYVDQELDINRLSDYDVDHIVPQSFLKDDSIDNKVLTRSDKARGKSDNVPSEEVVKKMKNYWRQLLNAKLITQRKFDNLTKAERGGLSELDKAGFIKRQLVETRQITKHVAQILDSRMNTKYDENDKLIREVKVITLKSKLVSDFRKDFQFYKVREINNYHHAHDAYLNAVVGTALIKKYPKLESEFVYGDYKVYDVRKMIAKSEQEIGKATAKYFFYSNIMNFFKTEITLANGEIRKRPLIETNGETGEIVWDKGRDFATVRKVLSMPQVNIVKKTEVQTGGFSKESILPKRNSDKLIARKKDWDPKKYGGFDSPTVAYSVLVVAKVEKGKSKKLKSVKELLGITIMERSSFEKNPIDFLEAKGYKEVKKDLIIKLPKYSLFELENGRKRMLASAGELQKGNELALPSKYVNFLYLASHYEKLKGSPEDNEQKQLFVEQHKHYLDEIIEQISEFSKRVILADANLDKVLSAYNKHRDKPIREQAENIIHLFTLTNLGAPAAFKYFDTTIDRKRYTSTKEVLDATLIHQSITGLYETRIDLSQLGGDGGGSSGSSGSSGSSGSSGSSGGTLNIEDEYRLHETSKEPDVSLGSTWLSDFPQAWAETGGMGLAVRQAPLIIPLKATSTPVSIKQYPMSQEARLGIKPHIQRLLDQGILVPCQSPWNTPLLPVKKPGTNDYRPVQDLREVNKRVEDIHPTVPNPYNLLSGLPPSHQWYTVLDLKDAFFCLRLHPTSQPLFAFEWRDPEMGISGQLTWTRLPQGFKNSPTLFNEALHRDLAGFRIQHPDLILLQYVDDLLLAATSELDCQQGTRALLQTLGDLGYRASAKKAQICQKQVKYLGYLLKEGQRWLTEARKETVMGQPIPKTPRQLREFLGKAGFCRLFIPGFAEMAAPLYPLTKPGTLFNWGPDQQKAFQEIKQALLTAPALGLPDLTKPFELFVDEKQGYAKGVLTQKLGPWRRPVAYLSKKLDPVAAGWPPCLRMVAAIAVLTKDAGKLTMGQPLVILAPHAVEALVKQPPDRWLSNARMTHYQALLLDTDRVQFGPVVALNPATLLPLPEEGLQHDCLDILAEAHGTRSDLMDQPLPDADHTWYTDGSSFLQEGQRKAGAAVTTETEVIWARALPAGTSAQRAELIALTQALKMAEGKKLNVYTDSRYAFATAHIHGEIYRRRGWLTSEGKEIKNKDEILALLKALFLPKRLSIIHCPGHQKGNSAEARGNRMADQAAREVATRETPETSTLLAGKRTADGSEFEKRTADGSEFESPKKKAKVE

SEQ ID NO: 2305 - protein, 2100 aa, synthetic construct
MPAAKRVKLDGGDKKYSIGLDIGTNSVGWAVITDEYKVPSKKFKVLGNTDRHSIKKNLIGALLFDSGETAEATRLKRTARRRYTRRKNRICYLQEIFSNEMAKVDDSFFHRLEESFLVEEDKKHERHPIFGNIVDEVAYHEKYPTIYHLRKKLVDSTDKADLRLIYLALAHMIKFRGHFLIEGDLNPDNSDVDKLFIQLVQTYNQLFEENPINASGVDAKAILSARLSKSRRLENLIAQLPGEKKNGLFGNLIALSLGLTPNFKSNFDLAEDAKLQLSKDTYDDDLDNLLAQIGDQYADLFLAAKNLSDAILLSDILRVNTEITKAPLSASMIKRYDEHHQDLTLLKALVRQQLPEKYKEIFFDQSKNGYAGYIDGGASQEEFYKFIKPILEKMDGTEELLVKLNREDLLRKQRTFDNGSIPHQIHLGELHAILRRQEDFYPFLKDNREKIEKILTFRIPYYVGPLARGNSRFAWMTRKSEETITPWNFEEVVDKGASAQSFIERMTNFDKNLPNEKVLPKHSLLYEYFTVYNELTKVKYVTEGMRKPAFLSGEQKKAIVDLLFKTNRKVTVKQLKEDYFKKIECFDSVEISGVEDRFNASLGTYHDLLKIIKDKDFLDNEENEDILEDIVLTLTLFEDREMIEERLKTYAHLFDDKVMKQLKRRRYTGWGRLSRKLINGIRDKQSGKTILDFLKSDGFANRNFMQLIHDDSLTFKEDIQKAQVSGQGDSLHEHIANLAGSPAIKKGILQTVKVVDELVKVMGRHKPENIVIEMARENQTTQKGQKNSRERMKRIEEGIKELGSQILKEHPVENTQLQNEKLYLYYLQNGRDMYVDQELDINRLSDYDVDHIVPQSFLKDDSIDNKVLTRSDKARGKSDNVPSEEVVKKMKNYWRQLLNAKLITQRKFDNLTKAERGGLSELDKAGFIKRQLVETRQITKHVAQILDSRMNTKYDENDKLIREVKVITLKSKLVSDFRKDFQFYKVREINNYHHAHDAYLNAVVGTALIKKYPKLESEFVYGDYKVYDVRKMIAKSEQEIGKATAKYFFYSNIMNFFKTEITLANGEIRKRPLIETNGETGEIVWDKGRDFATVRKVLSMPQVNIVKKTEVQTGGFSKESILPKRNSDKLIARKKDWDPKKYGGFDSPTVAYSVLVVAKVEKGKSKKLKSVKELLGITIMERSSFEKNPIDFLEAKGYKEVKKDLIIKLPKYSLFELENGRKRMLASAGELQKGNELALPSKYVNFLYLASHYEKLKGSPEDNEQKQLFVEQHKHYLDEIIEQISEFSKRVILADANLDKVLSAYNKHRDKPIREQAENIIHLFTLTNLGAPAAFKYFDTTIDRKRYTSTKEVLDATLIHQSITGLYETRIDLSQLGGDGGEAAAKGGGGSEAAAKGGTLNIEDEYRLHETSKEPDVSLGSTWLSDFPQAWAETGGMGLAVRQAPLIIPLKATSTPVSIKQYPMSQEARLGIKPHIQRLLDQGILVPCQSPWNTPLLPVKKPGTNDYRPVQDLREVNKRVEDIHPTVPNPYNLLSGLPPSHQWYTVLDLKDAFFCLRLHPTSQPLFAFEWRDPEMGISGQLTWTRLPQGFKNSPTLFNEALHRDLAGFRIQHPDLILLQYVDDLLLAATSELDCQQGTRALLQTLGDLGYRASAKKAQICQKQVKYLGYLLKEGQRWLTEARKETVMGQPIPKTPRQLREFLGKAGFCRLFIPGFAEMAAPLYPLTKPGTLFNWGPDQQKAFQEIKQALLTAPALGLPDLTKPFELFVDEKQGYAKGVLTQKLGPWRRPVAYLSKKLDPVAAGWPPCLRMVAAIAVLTKDAGKLTMGQPLVILAPHAVEALVKQPPDRWLSNARMTHYQALLLDTDRVQFGPVVALNPATLLPLPEEGLQHDCLDILAEAHGTRSDLMDQPLPDADHTWYTDGSSFLQEGQRKAGAAVTTETEVIWARALPAGTSAQRAELIALTQALKMAEGKKLNVYTDSRYAFATAHIHGEIYRRRGWLTSEGKEIKNKDEILALLKALFLPKRLSIIHCPGHQKGNSAEARGNRMADQAAREVATRETPETSTLLAGKRTADGSEFEKRTADGSEFESPKKKAKVE

SEQ ID NO: 2306 - protein, 2096 aa, synthetic construct
MPAAKRVKLDGGDKKYSIGLDIGTNSVGWAVITDEYKVPSKKFKVLGNTDRHSIKKNLIGALLFDSGETAEATRLKRTARRRYTRRKNRICYLQEIFSNEMAKVDDSFFHRLEESFLVEEDKKHERHPIFGNIVDEVAYHEKYPTIYHLRKKLVDSTDKADLRLIYLALAHMIKFRGHFLIEGDLNPDNSDVDKLFIQLVQTYNQLFEENPINASGVDAKAILSARLSKSRRLENLIAQLPGEKKNGLFGNLIALSLGLTPNFKSNFDLAEDAKLQLSKDTYDDDLDNLLAQIGDQYADLFLAAKNLSDAILLSDILRVNTEITKAPLSASMIKRYDEHHQDLTLLKALVRQQLPEKYKEIFFDQSKNGYAGYIDGGASQEEFYKFIKPILEKMDGTEELLVKLNREDLLRKQRTFDNGSIPHQIHLGELHAILRRQEDFYPFLKDNREKIEKILTFRIPYYVGPLARGNSRFAWMTRKSEETITPWNFEEVVDKGASAQSFIERMTNFDKNLPNEKVLPKHSLLYEYFTVYNELTKVKYVTEGMRKPAFLSGEQKKAIVDLLFKTNRKVTVKQLKEDYFKKIECFDSVEISGVEDRFNASLGTYHDLLKIIKDKDFLDNEENEDILEDIVLTLTLFEDREMIEERLKTYAHLFDDKVMKQLKRRRYTGWGRLSRKLINGIRDKQSGKTILDFLKSDGFANRNFMQLIHDDSLTFKEDIQKAQVSGQGDSLHEHIANLAGSPAIKKGILQTVKVVDELVKVMGRHKPENIVIEMARENQTTQKGQKNSRERMKRIEEGIKELGSQILKEHPVENTQLQNEKLYLYYLQNGRDMYVDQELDINRLSDYDVDHIVPQSFLKDDSIDNKVLTRSDKARGKSDNVPSEEVVKKMKNYWRQLLNAKLITQRKFDNLTKAERGGLSELDKAGFIKRQLVETRQITKHVAQILDSRMNTKYDENDKLIREVKVITLKSKLVSDFRKDFQFYKVREINNYHHAHDAYLNAVVGTALIKKYPKLESEFVYGDYKVYDVRKMIAKSEQEIGKATAKYFFYSNIMNFFKTEITLANGEIRKRPLIETNGETGEIVWDKGRDFATVRKVLSMPQVNIVKKTEVQTGGFSKESILPKRNSDKLIARKKDWDPKKYGGFDSPTVAYSVLVVAKVEKGKSKKLKSVKELLGITIMERSSFEKNPIDFLEAKGYKEVKKDLIIKLPKYSLFELENGRKRMLASAGELQKGNELALPSKYVNFLYLASHYEKLKGSPEDNEQKQLFVEQHKHYLDEIIEQISEFSKRVILADANLDKVLSAYNKHRDKPIREQAENIIHLFTLTNLGAPAAFKYFDTTIDRKRYTSTKEVLDATLIHQSITGLYETRIDLSQLGGDGGGGGEAAAKGGSGGTLNIEDEYRLHETSKEPDVSLGSTWLSDFPQAWAETGGMGLAVRQAPLIIPLKATSTPVSIKQYPMSQEARLGIKPHIQRLLDQGILVPCQSPWNTPLLPVKKPGTNDYRPVQDLREVNKRVEDIHPTVPNPYNLLSGLPPSHQWYTVLDLKDAFFCLRLHPTSQPLFAFEWRDPEMGISGQLTWTRLPQGFKNSPTLFNEALHRDLAGFRIQHPDLILLQYVDDLLLAATSELDCQQGTRALLQTLGDLGYRASAKKAQICQKQVKYLGYLLKEGQRWLTEARKETVMGQPIPKTPRQLREFLGKAGFCRLFIPGFAEMAAPLYPLTKPGTLFNWGPDQQKAFQEIKQALLTAPALGLPDLTKPFELFVDEKQGYAKGVLTQKLGPWRRPVAYLSKKLDPVAAGWPPCLRMVAAIAVLTKDAGKLTMGQPLVILAPHAVEALVKQPPDRWLSNARMTHYQALLLDTDRVQFGPVVALNPATLLPLPEEGLQHDCLDILAEAHGTRSDLMDQPLPDADHTWYTDGSSFLQEGQRKAGAAVTTETEVIWARALPAGTSAQRAELIALTQALKMAEGKKLNVYTDSRYAFATAHIHGEIYRRRGWLTSEGKEIKNKDEILALLKALFLPKRLSIIHCPGHQKGNSAEARGNRMADQAAREVATRETPETSTLLAGKRTADGSEFEKRTADGSEFESPKKKAKVE

SEQ ID NO: 2307 - protein, 2092 aa, synthetic construct
MPAAKRVKLDGGDKKYSIGLDIGTNSVGWAVITDEYKVPSKKFKVLGNTDRHSIKKNLIGALLFDSGETAEATRLKRTARRRYTRRKNRICYLQEIFSNEMAKVDDSFFHRLEESFLVEEDKKHERHPIFGNIVDEVAYHEKYPTIYHLRKKLVDSTDKADLRLIYLALAHMIKFRGHFLIEGDLNPDNSDVDKLFIQLVQTYNQLFEENPINASGVDAKAILSARLSKSRRLENLIAQLPGEKKNGLFGNLIALSLGLTPNFKSNFDLAEDAKLQLSKDTYDDDLDNLLAQIGDQYADLFLAAKNLSDAILLSDILRVNTEITKAPLSASMIKRYDEHHQDLTLLKALVRQQLPEKYKEIFFDQSKNGYAGYIDGGASQEEFYKFIKPILEKMDGTEELLVKLNREDLLRKQRTFDNGSIPHQIHLGELHAILRRQEDFYPFLKDNREKIEKILTFRIPYYVGPLARGNSRFAWMTRKSEETITPWNFEEVVDKGASAQSFIERMTNFDKNLPNEKVLPKHSLLYEYFTVYNELTKVKYVTEGMRKPAFLSGEQKKAIVDLLFKTNRKVTVKQLKEDYFKKIECFDSVEISGVEDRFNASLGTYHDLLKIIKDKDFLDNEENEDILEDIVLTLTLFEDREMIEERLKTYAHLFDDKVMKQLKRRRYTGWGRLSRKLINGIRDKQSGKTILDFLKSDGFANRNFMQLIHDDSLTFKEDIQKAQVSGQGDSLHEHIANLAGSPAIKKGILQTVKVVDELVKVMGRHKPENIVIEMARENQTTQKGQKNSRERMKRIEEGIKELGSQILKEHPVENTQLQNEKLYLYYLQNGRDMYVDQELDINRLSDYDVDHIVPQSFLKDDSIDNKVLTRSDKARGKSDNVPSEEVVKKMKNYWRQLLNAKLITQRKFDNLTKAERGGLSELDKAGFIKRQLVETRQITKHVAQILDSRMNTKYDENDKLIREVKVITLKSKLVSDFRKDFQFYKVREINNYHHAHDAYLNAVVGTALIKKYPKLESEFVYGDYKVYDVRKMIAKSEQEIGKATAKYFFYSNIMNFFKTEITLANGEIRKRPLIETNGETGEIVWDKGRDFATVRKVLSMPQVNIVKKTEVQTGGFSKESILPKRNSDKLIARKKDWDPKKYGGFDSPTVAYSVLVVAKVEKGKSKKLKSVKELLGITIMERSSFEKNPIDFLEAKGYKEVKKDLIIKLPKYSLFELENGRKRMLASAGELQKGNELALPSKYVNFLYLASHYEKLKGSPEDNEQKQLFVEQHKHYLDEIIEQISEFSKRVILADANLDKVLSAYNKHRDKPIREQAENIIHLFTLTNLGAPAAFKYFDTTIDRKRYTSTKEVLDATLIHQSITGLYETRIDLSQLGGDGGGGGGGGGGGTLNIEDEYRLHETSKEPDVSLGSTWLSDFPQAWAETGGMGLAVRQAPLIIPLKATSTPVSIKQYPMSQEARLGIKPHIQRLLDQGILVPCQSPWNTPLLPVKKPGTNDYRPVQDLREVNKRVEDIHPTVPNPYNLLSGLPPSHQWYTVLDLKDAFFCLRLHPTSQPLFAFEWRDPEMGISGQLTWTRLPQGFKNSPTLFNEALHRDLAGFRIQHPDLILLQYVDDLLLAATSELDCQQGTRALLQTLGDLGYRASAKKAQICQKQVKYLGYLLKEGQRWLTEARKETVMGQPIPKTPRQLREFLGKAGFCRLFIPGFAEMAAPLYPLTKPGTLFNWGPDQQKAFQEIKQALLTAPALGLPDLTKPFELFVDEKQGYAKGVLTQKLGPWRRPVAYLSKKLDPVAAGWPPCLRMVAAIAVLTKDAGKLTMGQPLVILAPHAVEALVKQPPDRWLSNARMTHYQALLLDTDRVQFGPVVALNPATLLPLPEEGLQHDCLDILAEAHGTRSDLMDQPLPDADHTWYTDGSSFLQEGQRKAGAAVTTETEVIWARALPAGTSAQRAELIALTQALKMAEGKKLNVYTDSRYAFATAHIHGEIYRRRGWLTSEGKEIKNKDEILALLKALFLPKRLSIIHCPGHQKGNSAEARGNRMADQAAREVATRETPETSTLLAGKRTADGSEFEKRTADGSEFESPKKKAKVE

SEQ ID NO: 2308 - protein, 2094 aa, synthetic construct
MPAAKRVKLDGGDKKYSIGLDIGTNSVGWAVITDEYKVPSKKFKVLGNTDRHSIKKNLIGALLFDSGETAEATRLKRTARRRYTRRKNRICYLQEIFSNEMAKVDDSFFHRLEESFLVEEDKKHERHPIFGNIVDEVAYHEKYPTIYHLRKKLVDSTDKADLRLIYLALAHMIKFRGHFLIEGDLNPDNSDVDKLFIQLVQTYNQLFEENPINASGVDAKAILSARLSKSRRLENLIAQLPGEKKNGLFGNLIALSLGLTPNFKSNFDLAEDAKLQLSKDTYDDDLDNLLAQIGDQYADLFLAAKNLSDAILLSDILRVNTEITKAPLSASMIKRYDEHHQDLTLLKALVRQQLPEKYKEIFFDQSKNGYAGYIDGGASQEEFYKFIKPILEKMDGTEELLVKLNREDLLRKQRTFDNGSIPHQIHLGELHAILRRQEDFYPFLKDNREKIEKILTFRIPYYVGPLARGNSRFAWMTRKSEETITPWNFEEVVDKGASAQSFIERMTNFDKNLPNEKVLPKHSLLYEYFTVYNELTKVKYVTEGMRKPAFLSGEQKKAIVDLLFKTNRKVTVKQLKEDYFKKIECFDSVEISGVEDRFNASLGTYHDLLKIIKDKDFLDNEENEDILEDIVLTLTLFEDREMIEERLKTYAHLFDDKVMKQLKRRRYTGWGRLSRKLINGIRDKQSGKTILDFLKSDGFANRNFMQLIHDDSLTFKEDIQKAQVSGQGDSLHEHIANLAGSPAIKKGILQTVKVVDELVKVMGRHKPENIVIEMARENQTTQKGQKNSRERMKRIEEGIKELGSQILKEHPVENTQLQNEKLYLYYLQNGRDMYVDQELDINRLSDYDVDHIVPQSFLKDDSIDNKVLTRSDKARGKSDNVPSEEVVKKMKNYWRQLLNAKLITQRKFDNLTKAERGGLSELDKAGFIKRQLVETRQITKHVAQILDSRMNTKYDENDKLIREVKVITLKSKLVSDFRKDFQFYKVREINNYHHAHDAYLNAVVGTALIKKYPKLESEFVYGDYKVYDVRKMIAKSEQEIGKATAKYFFYSNIMNFFKTEITLANGEIRKRPLIETNGETGEIVWDKGRDFATVRKVLSMPQVNIVKKTEVQTGGFSKESILPKRNSDKLIARKKDWDPKKYGGFDSPTVAYSVLVVAKVEKGKSKKLKSVKELLGITIMERSSFEKNPIDFLEAKGYKEVKKDLIIKLPKYSLFELENGRKRMLASAGELQKGNELALPSKYVNFLYLASHYEKLKGSPEDNEQKQLFVEQHKHYLDEIIEQISEFSKRVILADANLDKVLSAYNKHRDKPIREQAENIIHLFTLTNLGAPAAFKYFDTTIDRKRYTSTKEVLDATLIHQSITGLYETRIDLSQLGGDGGPAPGGGGSSGGTLNIEDEYRLHETSKEPDVSLGSTWLSDFPQAWAETGGMGLAVRQAPLIIPLKATSTPVSIKQYPMSQEARLGIKPHIQRLLDQGILVPCQSPWNTPLLPVKKPGTNDYRPVQDLREVNKRVEDIHPTVPNPYNLLSGLPPSHQWYTVLDLKDAFFCLRLHPTSQPLFAFEWRDPEMGISGQLTWTRLPQGFKNSPTLFNEALHRDLAGFRIQHPDLILLQYVDDLLLAATSELDCQQGTRALLQTLGDLGYRASAKKAQICQKQVKYLGYLLKEGQRWLTEARKETVMGQPIPKTPRQLREFLGKAGFCRLFIPGFAEMAAPLYPLTKPGTLFNWGPDQQKAFQEIKQALLTAPALGLPDLTKPFELFVDEKQGYAKGVLTQKLGPWRRPVAYLSKKLDPVAAGWPPCLRMVAAIAVLTKDAGKLTMGQPLVILAPHAVEALVKQPPDRWLSNARMTHYQALLLDTDRVQFGPVVALNPATLLPLPEEGLQHDCLDILAEAHGTRSDLMDQPLPDADHTWYTDGSSFLQEGQRKAGAAVTTETEVIWARALPAGTSAQRAELIALTQALKMAEGKKLNVYTDSRYAFATAHIHGEIYRRRGWLTSEGKEIKNKDEILALLKALFLPKRLSIIHCPGHQKGNSAEARGNRMADQAAREVATRETPETSTLLAGKRTADGSEFEKRTADGSEFESPKKKAKVE

SEQ ID NO: 2309 - protein, 2098 aa, synthetic construct
MPAAKRVKLDGGDKKYSIGLDIGTNSVGWAVITDEYKVPSKKFKVLGNTDRHSIKKNLIGALLFDSGETAEATRLKRTARRRYTRRKNRICYLQEIFSNEMAKVDDSFFHRLEESFLVEEDKKHERHPIFGNIVDEVAYHEKYPTIYHLRKKLVDSTDKADLRLIYLALAHMIKFRGHFLIEGDLNPDNSDVDKLFIQLVQTYNQLFEENPINASGVDAKAILSARLSKSRRLENLIAQLPGEKKNGLFGNLIALSLGLTPNFKSNFDLAEDAKLQLSKDTYDDDLDNLLAQIGDQYADLFLAAKNLSDAILLSDILRVNTEITKAPLSASMIKRYDEHHQDLTLLKALVRQQLPEKYKEIFFDQSKNGYAGYIDGGASQEEFYKFIKPILEKMDGTEELLVKLNREDLLRKQRTFDNGSIPHQIHLGELHAILRRQEDFYPFLKDNREKIEKILTFRIPYYVGPLARGNSRFAWMTRKSEETITPWNFEEVVDKGASAQSFIERMTNFDKNLPNEKVLPKHSLLYEYFTVYNELTKVKYVTEGMRKPAFLSGEQKKAIVDLLFKTNRKVTVKQLKEDYFKKIECFDSVEISGVEDRFNASLGTYHDLLKIIKDKDFLDNEENEDILEDIVLTLTLFEDREMIEERLKTYAHLFDDKVMKQLKRRRYTGWGRLSRKLINGIRDKQSGKTILDFLKSDGFANRNFMQLIHDDSLTFKEDIQKAQVSGQGDSLHEHIANLAGSPAIKKGILQTVKVVDELVKVMGRHKPENIVIEMARENQTTQKGQKNSRERMKRIEEGIKELGSQILKEHPVENTQLQNEKLYLYYLQNGRDMYVDQELDINRLSDYDVDHIVPQSFLKDDSIDNKVLTRSDKARGKSDNVPSEEVVKKMKNYWRQLLNAKLITQRKFDNLTKAERGGLSELDKAGFIKRQLVETRQITKHVAQILDSRMNTKYDENDKLIREVKVITLKSKLVSDFRKDFQFYKVREINNYHHAHDAYLNAVVGTALIKKYPKLESEFVYGDYKVYDVRKMIAKSEQEIGKATAKYFFYSNIMNFFKTEITLANGEIRKRPLIETNGETGEIVWDKGRDFATVRKVLSMPQVNIVKKTEVQTGGFSKESILPKRNSDKLIARKKDWDPKKYGGFDSPTVAYSVLVVAKVEKGKSKKLKSVKELLGITIMERSSFEKNPIDFLEAKGYKEVKKDLIIKLPKYSLFELENGRKRMLASAGELQKGNELALPSKYVNFLYLASHYEKLKGSPEDNEQKQLFVEQHKHYLDEIIEQISEFSKRVILADANLDKVLSAYNKHRDKPIREQAENIIHLFTLTNLGAPAAFKYFDTTIDRKRYTSTKEVLDATLIHQSITGLYETRIDLSQLGGDGGPAPAPAPAPAPAPGGTLNIEDEYRLHETSKEPDVSLGSTWLSDFPQAWAETGGMGLAVRQAPLIIPLKATSTPVSIKQYPMSQEARLGIKPHIQRLLDQGILVPCQSPWNTPLLPVKKPGTNDYRPVQDLREVNKRVEDIHPTVPNPYNLLSGLPPSHQWYTVLDLKDAFFCLRLHPTSQPLFAFEWRDPEMGISGQLTWTRLPQGFKNSPTLFNEALHRDLAGFRIQHPDLILLQYVDDLLLAATSELDCQQGTRALLQTLGDLGYRASAKKAQICQKQVKYLGYLLKEGQRWLTEARKETVMGQPIPKTPRQLREFLGKAGFCRLFIPGFAEMAAPLYPLTKPGTLFNWGPDQQKAFQEIKQALLTAPALGLPDLTKPFELFVDEKQGYAKGVLTQKLGPWRRPVAYLSKKLDPVAAGWPPCLRMVAAIAVLTKDAGKLTMGQPLVILAPHAVEALVKQPPDRWLSNARMTHYQALLLDTDRVQFGPVVALNPATLLPLPEEGLQHDCLDILAEAHGTRSDLMDQPLPDADHTWYTDGSSFLQEGQRKAGAAVTTETEVIWARALPAGTSAQRAELIALTQALKMAEGKKLNVYTDSRYAFATAHIHGEIYRRRGWLTSEGKEIKNKDEILALLKALFLPKRLSIIHCPGHQKGNSAEARGNRMADQAAREVATRETPETSTLLAGKRTADGSEFEKRTADGSEFESPKKKAKVE

SEQ ID NO: 2310 - protein, 2100 aa, synthetic construct
MPAAKRVKLDGGDKKYSIGLDIGTNSVGWAVITDEYKVPSKKFKVLGNTDRHSIKKNLIGALLFDSGETAEATRLKRTARRRYTRRKNRICYLQEIFSNEMAKVDDSFFHRLEESFLVEEDKKHERHPIFGNIVDEVAYHEKYPTIYHLRKKLVDSTDKADLRLIYLALAHMIKFRGHFLIEGDLNPDNSDVDKLFIQLVQTYNQLFEENPINASGVDAKAILSARLSKSRRLENLIAQLPGEKKNGLFGNLIALSLGLTPNFKSNFDLAEDAKLQLSKDTYDDDLDNLLAQIGDQYADLFLAAKNLSDAILLSDILRVNTEITKAPLSASMIKRYDEHHQDLTLLKALVRQQLPEKYKEIFFDQSKNGYAGYIDGGASQEEFYKFIKPILEKMDGTEELLVKLNREDLLRKQRTFDNGSIPHQIHLGELHAILRRQEDFYPFLKDNREKIEKILTFRIPYYVGPLARGNSRFAWMTRKSEETITPWNFEEVVDKGASAQSFIERMTNFDKNLPNEKVLPKHSLLYEYFTVYNELTKVKYVTEGMRKPAFLSGEQKKAIVDLLFKTNRKVTVKQLKEDYFKKIECFDSVEISGVEDRFNASLGTYHDLLKIIKDKDFLDNEENEDILEDIVLTLTLFEDREMIEERLKTYAHLFDDKVMKQLKRRRYTGWGRLSRKLINGIRDKQSGKTILDFLKSDGFANRNFMQLIHDDSLTFKEDIQKAQVSGQGDSLHEHIANLAGSPAIKKGILQTVKVVDELVKVMGRHKPENIVIEMARENQTTQKGQKNSRERMKRIEEGIKELGSQILKEHPVENTQLQNEKLYLYYLQNGRDMYVDQELDINRLSDYDVDHIVPQSFLKDDSIDNKVLTRSDKARGKSDNVPSEEVVKKMKNYWRQLLNAKLITQRKFDNLTKAERGGLSELDKAGFIKRQLVETRQITKHVAQILDSRMNTKYDENDKLIREVKVITLKSKLVSDFRKDFQFYKVREINNYHHAHDAYLNAVVGTALIKKYPKLESEFVYGDYKVYDVRKMIAKSEQEIGKATAKYFFYSNIMNFFKTEITLANGEIRKRPLIETNGETGEIVWDKGRDFATVRKVLSMPQVNIVKKTEVQTGGFSKESILPKRNSDKLIARKKDWDPKKYGGFDSPTVAYSVLVVAKVEKGKSKKLKSVKELLGITIMERSSFEKNPIDFLEAKGYKEVKKDLIIKLPKYSLFELENGRKRMLASAGELQKGNELALPSKYVNFLYLASHYEKLKGSPEDNEQKQLFVEQHKHYLDEIIEQISEFSKRVILADANLDKVLSAYNKHRDKPIREQAENIIHLFTLTNLGAPAAFKYFDTTIDRKRYTSTKEVLDATLIHQSITGLYETRIDLSQLGGDGGGGSGGSGGSGGSGGSGGTLNIEDEYRLHETSKEPDVSLGSTWLSDFPQAWAETGGMGLAVRQAPLIIPLKATSTPVSIKQYPMSQEARLGIKPHIQRLLDQGILVPCQSPWNTPLLPVKKPGTNDYRPVQDLREVNKRVEDIHPTVPNPYNLLSGLPPSHQWYTVLDLKDAFFCLRLHPTSQPLFAFEWRDPEMGISGQLTWTRLPQGFKNSPTLFNEALHRDLAGFRIQHPDLILLQYVDDLLLAATSELDCQQGTRALLQTLGDLGYRASAKKAQICQKQVKYLGYLLKEGQRWLTEARKETVMGQPIPKTPRQLREFLGKAGFCRLFIPGFAEMAAPLYPLTKPGTLFNWGPDQQKAFQEIKQALLTAPALGLPDLTKPFELFVDEKQGYAKGVLTQKLGPWRRPVAYLSKKLDPVAAGWPPCLRMVAAIAVLTKDAGKLTMGQPLVILAPHAVEALVKQPPDRWLSNARMTHYQALLLDTDRVQFGPVVALNPATLLPLPEEGLQHDCLDILAEAHGTRSDLMDQPLPDADHTWYTDGSSFLQEGQRKAGAAVTTETEVIWARALPAGTSAQRAELIALTQALKMAEGKKLNVYTDSRYAFATAHIHGEIYRRRGWLTSEGKEIKNKDEILALLKALFLPKRLSIIHCPGHQKGNSAEARGNRMADQAAREVATRETPETSTLLAGKRTADGSEFEKRTADGSEFESPKKKAKVE

SEQ ID NO: 2311 - protein, 2105 aa, synthetic construct
MPAAKRVKLDGGDKKYSIGLDIGTNSVGWAVITDEYKVPSKKFKVLGNTDRHSIKKNLIGALLFDSGETAEATRLKRTARRRYTRRKNRICYLQEIFSNEMAKVDDSFFHRLEESFLVEEDKKHERHPIFGNIVDEVAYHEKYPTIYHLRKKLVDSTDKADLRLIYLALAHMIKFRGHFLIEGDLNPDNSDVDKLFIQLVQTYNQLFEENPINASGVDAKAILSARLSKSRRLENLIAQLPGEKKNGLFGNLIALSLGLTPNFKSNFDLAEDAKLQLSKDTYDDDLDNLLAQIGDQYADLFLAAKNLSDAILLSDILRVNTEITKAPLSASMIKRYDEHHQDLTLLKALVRQQLPEKYKEIFFDQSKNGYAGYIDGGASQEEFYKFIKPILEKMDGTEELLVKLNREDLLRKQRTFDNGSIPHQIHLGELHAILRRQEDFYPFLKDNREKIEKILTFRIPYYVGPLARGNSRFAWMTRKSEETITPWNFEEVVDKGASAQSFIERMTNFDKNLPNEKVLPKHSLLYEYFTVYNELTKVKYVTEGMRKPAFLSGEQKKAIVDLLFKTNRKVTVKQLKEDYFKKIECFDSVEISGVEDRFNASLGTYHDLLKIIKDKDFLDNEENEDILEDIVLTLTLFEDREMIEERLKTYAHLFDDKVMKQLKRRRYTGWGRLSRKLINGIRDKQSGKTILDFLKSDGFANRNFMQLIHDDSLTFKEDIQKAQVSGQGDSLHEHIANLAGSPAIKKGILQTVKVVDELVKVMGRHKPENIVIEMARENQTTQKGQKNSRERMKRIEEGIKELGSQILKEHPVENTQLQNEKLYLYYLQNGRDMYVDQELDINRLSDYDVDHIVPQSFLKDDSIDNKVLTRSDKARGKSDNVPSEEVVKKMKNYWRQLLNAKLITQRKFDNLTKAERGGLSELDKAGFIKRQLVETRQITKHVAQILDSRMNTKYDENDKLIREVKVITLKSKLVSDFRKDFQFYKVREINNYHHAHDAYLNAVVGTALIKKYPKLESEFVYGDYKVYDVRKMIAKSEQEIGKATAKYFFYSNIMNFFKTEITLANGEIRKRPLIETNGETGEIVWDKGRDFATVRKVLSMPQVNIVKKTEVQTGGFSKESILPKRNSDKLIARKKDWDPKKYGGFDSPTVAYSVLVVAKVEKGKSKKLKSVKELLGITIMERSSFEKNPIDFLEAKGYKEVKKDLIIKLPKYSLFELENGRKRMLASAGELQKGNELALPSKYVNFLYLASHYEKLKGSPEDNEQKQLFVEQHKHYLDEIIEQISEFSKRVILADANLDKVLSAYNKHRDKPIREQAENIIHLFTLTNLGAPAAFKYFDTTIDRKRYTSTKEVLDATLIHQSITGLYETRIDLSQLGGDGGGGGGSGGGGSGGGGSGGGGSGGTLNIEDEYRLHETSKEPDVSLGSTWLSDFPQAWAETGGMGLAVRQAPLIIPLKATSTPVSIKQYPMSQEARLGIKPHIQRLLDQGILVPCQSPWNTPLLPVKKPGTNDYRPVQDLREVNKRVEDIHPTVPNPYNLLSGLPPSHQWYTVLDLKDAFFCLRLHPTSQPLFAFEWRDPEMGISGQLTWTRLPQGFKNSPTLFNEALHRDLAGFRIQHPDLILLQYVDDLLLAATSELDCQQGTRALLQTLGDLGYRASAKKAQICQKQVKYLGYLLKEGQRWLTEARKETVMGQPIPKTPRQLREFLGKAGFCRLFIPGFAEMAAPLYPLTKPGTLFNWGPDQQKAFQEIKQALLTAPALGLPDLTKPFELFVDEKQGYAKGVLTQKLGPWRRPVAYLSKKLDPVAAGWPPCLRMVAAIAVLTKDAGKLTMGQPLVILAPHAVEALVKQPPDRWLSNARMTHYQALLLDTDRVQFGPVVALNPATLLPLPEEGLQHDCLDILAEAHGTRSDLMDQPLPDADHTWYTDGSSFLQEGQRKAGAAVTTETEVIWARALPAGTSAQRAELIALTQALKMAEGKKLNVYTDSRYAFATAHIHGEIYRRRGWLTSEGKEIKNKDEILALLKALFLPKRLSIIHCPGHQKGNSAEARGNRMADQAAREVATRETPETSTLLAGKRTADGSEFEKRTADGSEFESPKKKAKVE

SEQ ID NO: 2312 - protein, 2094 aa, synthetic construct
MPAAKRVKLDGGDKKYSIGLDIGTNSVGWAVITDEYKVPSKKFKVLGNTDRHSIKKNLIGALLFDSGETAEATRLKRTARRRYTRRKNRICYLQEIFSNEMAKVDDSFFHRLEESFLVEEDKKHERHPIFGNIVDEVAYHEKYPTIYHLRKKLVDSTDKADLRLIYLALAHMIKFRGHFLIEGDLNPDNSDVDKLFIQLVQTYNQLFEENPINASGVDAKAILSARLSKSRRLENLIAQLPGEKKNGLFGNLIALSLGLTPNFKSNFDLAEDAKLQLSKDTYDDDLDNLLAQIGDQYADLFLAAKNLSDAILLSDILRVNTEITKAPLSASMIKRYDEHHQDLTLLKALVRQQLPEKYKEIFFDQSKNGYAGYIDGGASQEEFYKFIKPILEKMDGTEELLVKLNREDLLRKQRTFDNGSIPHQIHLGELHAILRRQEDFYPFLKDNREKIEKILTFRIPYYVGPLARGNSRFAWMTRKSEETITPWNFEEVVDKGASAQSFIERMTNFDKNLPNEKVLPKHSLLYEYFTVYNELTKVKYVTEGMRKPAFLSGEQKKAIVDLLFKTNRKVTVKQLKEDYFKKIECFDSVEISGVEDRFNASLGTYHDLLKIIKDKDFLDNEENEDILEDIVLTLTLFEDREMIEERLKTYAHLFDDKVMKQLKRRRYTGWGRLSRKLINGIRDKQSGKTILDFLKSDGFANRNFMQLIHDDSLTFKEDIQKAQVSGQGDSLHEHIANLAGSPAIKKGILQTVKVVDELVKVMGRHKPENIVIEMARENQTTQKGQKNSRERMKRIEEGIKELGSQILKEHPVENTQLQNEKLYLYYLQNGRDMYVDQELDINRLSDYDVDHIVPQSFLKDDSIDNKVLTRSDKARGKSDNVPSEEVVKKMKNYWRQLLNAKLITQRKFDNLTKAERGGLSELDKAGFIKRQLVETRQITKHVAQILDSRMNTKYDENDKLIREVKVITLKSKLVSDFRKDFQFYKVREINNYHHAHDAYLNAVVGTALIKKYPKLESEFVYGDYKVYDVRKMIAKSEQEIGKATAKYFFYSNIMNFFKTEITLANGEIRKRPLIETNGETGEIVWDKGRDFATVRKVLSMPQVNIVKKTEVQTGGFSKESILPKRNSDKLIARKKDWDPKKYGGFDSPTVAYSVLVVAKVEKGKSKKLKSVKELLGITIMERSSFEKNPIDFLEAKGYKEVKKDLIIKLPKYSLFELENGRKRMLASAGELQKGNELALPSKYVNFLYLASHYEKLKGSPEDNEQKQLFVEQHKHYLDEIIEQISEFSKRVILADANLDKVLSAYNKHRDKPIREQAENIIHLFTLTNLGAPAAFKYFDTTIDRKRYTSTKEVLDATLIHQSITGLYETRIDLSQLGGDGGGGGGGSGSSGGTLNIEDEYRLHETSKEPDVSLGSTWLSDFPQAWAETGGMGLAVRQAPLIIPLKATSTPVSIKQYPMSQEARLGIKPHIQRLLDQGILVPCQSPWNTPLLPVKKPGTNDYRPVQDLREVNKRVEDIHPTVPNPYNLLSGLPPSHQWYTVLDLKDAFFCLRLHPTSQPLFAFEWRDPEMGISGQLTWTRLPQGFKNSPTLFNEALHRDLAGFRIQHPDLILLQYVDDLLLAATSELDCQQGTRALLQTLGDLGYRASAKKAQICQKQVKYLGYLLKEGQRWLTEARKETVMGQPIPKTPRQLREFLGKAGFCRLFIPGFAEMAAPLYPLTKPGTLFNWGPDQQKAFQEIKQALLTAPALGLPDLTKPFELFVDEKQGYAKGVLTQKLGPWRRPVAYLSKKLDPVAAGWPPCLRMVAAIAVLTKDAGKLTMGQPLVILAPHAVEALVKQPPDRWLSNARMTHYQALLLDTDRVQFGPVVALNPATLLPLPEEGLQHDCLDILAEAHGTRSDLMDQPLPDADHTWYTDGSSFLQEGQRKAGAAVTTETEVIWARALPAGTSAQRAELIALTQALKMAEGKKLNVYTDSRYAFATAHIHGEIYRRRGWLTSEGKEIKNKDEILALLKALFLPKRLSIIHCPGHQKGNSAEARGNRMADQAAREVATRETPETSTLLAGKRTADGSEFEKRTADGSEFESPKKKAKVE

SEQ ID NO: 2313 - protein, 2097 aa, synthetic construct
MPAAKRVKLDGGDKKYSIGLDIGTNSVGWAVITDEYKVPSKKFKVLGNTDRHSIKKNLIGALLFDSGETAEATRLKRTARRRYTRRKNRICYLQEIFSNEMAKVDDSFFHRLEESFLVEEDKKHERHPIFGNIVDEVAYHEKYPTIYHLRKKLVDSTDKADLRLIYLALAHMIKFRGHFLIEGDLNPDNSDVDKLFIQLVQTYNQLFEENPINASGVDAKAILSARLSKSRRLENLIAQLPGEKKNGLFGNLIALSLGLTPNFKSNFDLAEDAKLQLSKDTYDDDLDNLLAQIGDQYADLFLAAKNLSDAILLSDILRVNTEITKAPLSASMIKRYDEHHQDLTLLKALVRQQLPEKYKEIFFDQSKNGYAGYIDGGASQEEFYKFIKPILEKMDGTEELLVKLNREDLLRKQRTFDNGSIPHQIHLGELHAILRRQEDFYPFLKDNREKIEKILTFRIPYYVGPLARGNSRFAWMTRKSEETITPWNFEEVVDKGASAQSFIERMTNFDKNLPNEKVLPKHSLLYEYFTVYNELTKVKYVTEGMRKPAFLSGEQKKAIVDLLFKTNRKVTVKQLKEDYFKKIECFDSVEISGVEDRFNASLGTYHDLLKIIKDKDFLDNEENEDILEDIVLTLTLFEDREMIEERLKTYAHLFDDKVMKQLKRRRYTGWGRLSRKLINGIRDKQSGKTILDFLKSDGFANRNFMQLIHDDSLTFKEDIQKAQVSGQGDSLHEHIANLAGSPAIKKGILQTVKVVDELVKVMGRHKPENIVIEMARENQTTQKGQKNSRERMKRIEEGIKELGSQILKEHPVENTQLQNEKLYLYYLQNGRDMYVDQELDINRLSDYDVDHIVPQSFLKDDSIDNKVLTRSDKARGKSDNVPSEEVVKKMKNYWRQLLNAKLITQRKFDNLTKAERGGLSELDKAGFIKRQLVETRQITKHVAQILDSRMNTKYDENDKLIREVKVITLKSKLVSDFRKDFQFYKVREINNYHHAHDAYLNAVVGTALIKKYPKLESEFVYGDYKVYDVRKMIAKSEQEIGKATAKYFFYSNIMNFFKTEITLANGEIRKRPLIETNGETGEIVWDKGRDFATVRKVLSMPQVNIVKKTEVQTGGFSKESILPKRNSDKLIARKKDWDPKKYGGFDSPTVAYSVLVVAKVEKGKSKKLKSVKELLGITIMERSSFEKNPIDFLEAKGYKEVKKDLIIKLPKYSLFELENGRKRMLASAGELQKGNELALPSKYVNFLYLASHYEKLKGSPEDNEQKQLFVEQHKHYLDEIIEQISEFSKRVILADANLDKVLSAYNKHRDKPIREQAENIIHLFTLTNLGAPAAFKYFDTTIDRKRYTSTKEVLDATLIHQSITGLYETRIDLSQLGGDGGGSAGSAAGSGEFGGTLNIEDEYRLHETSKEPDVSLGSTWLSDFPQAWAETGGMGLAVRQAPLIIPLKATSTPVSIKQYPMSQEARLGIKPHIQRLLDQGILVPCQSPWNTPLLPVKKPGTNDYRPVQDLREVNKRVEDIHPTVPNPYNLLSGLPPSHQWYTVLDLKDAFFCLRLHPTSQPLFAFEWRDPEMGISGQLTWTRLPQGFKNSPTLFNEALHRDLAGFRIQHPDLILLQYVDDLLLAATSELDCQQGTRALLQTLGDLGYRASAKKAQICQKQVKYLGYLLKEGQRWLTEARKETVMGQPIPKTPRQLREFLGKAGFCRLFIPGFAEMAAPLYPLTKPGTLFNWGPDQQKAFQEIKQALLTAPALGLPDLTKPFELFVDEKQGYAKGVLTQKLGPWRRPVAYLSKKLDPVAAGWPPCLRMVAAIAVLTKDAGKLTMGQPLVILAPHAVEALVKQPPDRWLSNARMTHYQALLLDTDRVQFGPVVALNPATLLPLPEEGLQHDCLDILAEAHGTRSDLMDQPLPDADHTWYTDGSSFLQEGQRKAGAAVTTETEVIWARALPAGTSAQRAELIALTQALKMAEGKKLNVYTDSRYAFATAHIHGEIYRRRGWLTSEGKEIKNKDEILALLKALFLPKRLSIIHCPGHQKGNSAEARGNRMADQAAREVATRETPETSTLLAGKRTADGSEFEKRTADGSEFESPKKKAKVE

SEQ ID NO: 2314 - protein, 2096 aa, synthetic construct
MPAAKRVKLDGGDKKYSIGLDIGTNSVGWAVITDEYKVPSKKFKVLGNTDRHSIKKNLIGALLFDSGETAEATRLKRTARRRYTRRKNRICYLQEIFSNEMAKVDDSFFHRLEESFLVEEDKKHERHPIFGNIVDEVAYHEKYPTIYHLRKKLVDSTDKADLRLIYLALAHMIKFRGHFLIEGDLNPDNSDVDKLFIQLVQTYNQLFEENPINASGVDAKAILSARLSKSRRLENLIAQLPGEKKNGLFGNLIALSLGLTPNFKSNFDLAEDAKLQLSKDTYDDDLDNLLAQIGDQYADLFLAAKNLSDAILLSDILRVNTEITKAPLSASMIKRYDEHHQDLTLLKALVRQQLPEKYKEIFFDQSKNGYAGYIDGGASQEEFYKFIKPILEKMDGTEELLVKLNREDLLRKQRTFDNGSIPHQIHLGELHAILRRQEDFYPFLKDNREKIEKILTFRIPYYVGPLARGNSRFAWMTRKSEETITPWNFEEVVDKGASAQSFIERMTNFDKNLPNEKVLPKHSLLYEYFTVYNELTKVKYVTEGMRKPAFLSGEQKKAIVDLLFKTNRKVTVKQLKEDYFKKIECFDSVEISGVEDRFNASLGTYHDLLKIIKDKDFLDNEENEDILEDIVLTLTLFEDREMIEERLKTYAHLFDDKVMKQLKRRRYTGWGRLSRKLINGIRDKQSGKTILDFLKSDGFANRNFMQLIHDDSLTFKEDIQKAQVSGQGDSLHEHIANLAGSPAIKKGILQTVKVVDELVKVMGRHKPENIVIEMARENQTTQKGQKNSRERMKRIEEGIKELGSQILKEHPVENTQLQNEKLYLYYLQNGRDMYVDQELDINRLSDYDVDHIVPQSFLKDDSIDNKVLTRSDKARGKSDNVPSEEVVKKMKNYWRQLLNAKLITQRKFDNLTKAERGGLSELDKAGFIKRQLVETRQITKHVAQILDSRMNTKYDENDKLIREVKVITLKSKLVSDFRKDFQFYKVREINNYHHAHDAYLNAVVGTALIKKYPKLESEFVYGDYKVYDVRKMIAKSEQEIGKATAKYFFYSNIMNFFKTEITLANGEIRKRPLIETNGETGEIVWDKGRDFATVRKVLSMPQVNIVKKTEVQTGGFSKESILPKRNSDKLIARKKDWDPKKYGGFDSPTVAYSVLVVAKVEKGKSKKLKSVKELLGITIMERSSFEKNPIDFLEAKGYKEVKKDLIIKLPKYSLFELENGRKRMLASAGELQKGNELALPSKYVNFLYLASHYEKLKGSPEDNEQKQLFVEQHKHYLDEIIEQISEFSKRVILADANLDKVLSAYNKHRDKPIREQAENIIHLFTLTNLGAPAAFKYFDTTIDRKRYTSTKEVLDATLIHQSITGLYETRIDLSQLGGDGGPAPEAAAKGGSGGTLNIEDEYRLHETSKEPDVSLGSTWLSDFPQAWAETGGMGLAVRQAPLIIPLKATSTPVSIKQYPMSQEARLGIKPHIQRLLDQGILVPCQSPWNTPLLPVKKPGTNDYRPVQDLREVNKRVEDIHPTVPNPYNLLSGLPPSHQWYTVLDLKDAFFCLRLHPTSQPLFAFEWRDPEMGISGQLTWTRLPQGFKNSPTLFNEALHRDLAGFRIQHPDLILLQYVDDLLLAATSELDCQQGTRALLQTLGDLGYRASAKKAQICQKQVKYLGYLLKEGQRWLTEARKETVMGQPIPKTPRQLREFLGKAGFCRLFIPGFAEMAAPLYPLTKPGTLFNWGPDQQKAFQEIKQALLTAPALGLPDLTKPFELFVDEKQGYAKGVLTQKLGPWRRPVAYLSKKLDPVAAGWPPCLRMVAAIAVLTKDAGKLTMGQPLVILAPHAVEALVKQPPDRWLSNARMTHYQALLLDTDRVQFGPVVALNPATLLPLPEEGLQHDCLDILAEAHGTRSDLMDQPLPDADHTWYTDGSSFLQEGQRKAGAAVTTETEVIWARALPAGTSAQRAELIALTQALKMAEGKKLNVYTDSRYAFATAHIHGEIYRRRGWLTSEGKEIKNKDEILALLKALFLPKRLSIIHCPGHQKGNSAEARGNRMADQAAREVATRETPETSTLLAGKRTADGSEFEKRTADGSEFESPKKKAKVE

SEQ ID NO: 2315 - protein, 2096 aa, synthetic construct
MPAAKRVKLDGGDKKYSIGLDIGTNSVGWAVITDEYKVPSKKFKVLGNTDRHSIKKNLIGALLFDSGETAEATRLKRTARRRYTRRKNRICYLQEIFSNEMAKVDDSFFHRLEESFLVEEDKKHERHPIFGNIVDEVAYHEKYPTIYHLRKKLVDSTDKADLRLIYLALAHMIKFRGHFLIEGDLNPDNSDVDKLFIQLVQTYNQLFEENPINASGVDAKAILSARLSKSRRLENLIAQLPGEKKNGLFGNLIALSLGLTPNFKSNFDLAEDAKLQLSKDTYDDDLDNLLAQIGDQYADLFLAAKNLSDAILLSDILRVNTEITKAPLSASMIKRYDEHHQDLTLLKALVRQQLPEKYKEIFFDQSKNGYAGYIDGGASQEEFYKFIKPILEKMDGTEELLVKLNREDLLRKQRTFDNGSIPHQIHLGELHAILRRQEDFYPFLKDNREKIEKILTFRIPYYVGPLARGNSRFAWMTRKSEETITPWNFEEVVDKGASAQSFIERMTNFDKNLPNEKVLPKHSLLYEYFTVYNELTKVKYVTEGMRKPAFLSGEQKKAIVDLLFKTNRKVTVKQLKEDYFKKIECFDSVEISGVEDRFNASLGTYHDLLKIIKDKDFLDNEENEDILEDIVLTLTLFEDREMIEERLKTYAHLFDDKVMKQLKRRRYTGWGRLSRKLINGIRDKQSGKTILDFLKSDGFANRNFMQLIHDDSLTFKEDIQKAQVSGQGDSLHEHIANLAGSPAIKKGILQTVKVVDELVKVMGRHKPENIVIEMARENQTTQKGQKNSRERMKRIEEGIKELGSQILKEHPVENTQLQNEKLYLYYLQNGRDMYVDQELDINRLSDYDVDHIVPQSFLKDDSIDNKVLTRSDKARGKSDNVPSEEVVKKMKNYWRQLLNAKLITQRKFDNLTKAERGGLSELDKAGFIKRQLVETRQITKHVAQILDSRMNTKYDENDKLIREVKVITLKSKLVSDFRKDFQFYKVREINNYHHAHDAYLNAVVGTALIKKYPKLESEFVYGDYKVYDVRKMIAKSEQEIGKATAKYFFYSNIMNFFKTEITLANGEIRKRPLIETNGETGEIVWDKGRDFATVRKVLSMPQVNIVKKTEVQTGGFSKESILPKRNSDKLIARKKDWDPKKYGGFDSPTVAYSVLVVAKVEKGKSKKLKSVKELLGITIMERSSFEKNPIDFLEAKGYKEVKKDLIIKLPKYSLFELENGRKRMLASAGELQKGNELALPSKYVNFLYLASHYEKLKGSPEDNEQKQLFVEQHKHYLDEIIEQISEFSKRVILADANLDKVLSAYNKHRDKPIREQAENIIHLFTLTNLGAPAAFKYFDTTIDRKRYTSTKEVLDATLIHQSITGLYETRIDLSQLGGDGGEAAAKPAPGGSGGTLNIEDEYRLHETSKEPDVSLGSTWLSDFPQAWAETGGMGLAVRQAPLIIPLKATSTPVSIKQYPMSQEARLGIKPHIQRLLDQGILVPCQSPWNTPLLPVKKPGTNDYRPVQDLREVNKRVEDIHPTVPNPYNLLSGLPPSHQWYTVLDLKDAFFCLRLHPTSQPLFAFEWRDPEMGISGQLTWTRLPQGFKNSPTLFNEALHRDLAGFRIQHPDLILLQYVDDLLLAATSELDCQQGTRALLQTLGDLGYRASAKKAQICQKQVKYLGYLLKEGQRWLTEARKETVMGQPIPKTPRQLREFLGKAGFCRLFIPGFAEMAAPLYPLTKPGTLFNWGPDQQKAFQEIKQALLTAPALGLPDLTKPFELFVDEKQGYAKGVLTQKLGPWRRPVAYLSKKLDPVAAGWPPCLRMVAAIAVLTKDAGKLTMGQPLVILAPHAVEALVKQPPDRWLSNARMTHYQALLLDTDRVQFGPVVALNPATLLPLPEEGLQHDCLDILAEAHGTRSDLMDQPLPDADHTWYTDGSSFLQEGQRKAGAAVTTETEVIWARALPAGTSAQRAELIALTQALKMAEGKKLNVYTDSRYAFATAHIHGEIYRRRGWLTSEGKEIKNKDEILALLKALFLPKRLSIIHCPGHQKGNSAEARGNRMADQAAREVATRETPETSTLLAGKRTADGSEFEKRTADGSEFESPKKKAKVE

SEQ ID NO: 2316 - protein, 2096 aa, synthetic construct
MPAAKRVKLDGGDKKYSIGLDIGTNSVGWAVITDEYKVPSKKFKVLGNTDRHSIKKNLIGALLFDSGETAEATRLKRTARRRYTRRKNRICYLQEIFSNEMAKVDDSFFHRLEESFLVEEDKKHERHPIFGNIVDEVAYHEKYPTIYHLRKKLVDSTDKADLRLIYLALAHMIKFRGHFLIEGDLNPDNSDVDKLFIQLVQTYNQLFEENPINASGVDAKAILSARLSKSRRLENLIAQLPGEKKNGLFGNLIALSLGLTPNFKSNFDLAEDAKLQLSKDTYDDDLDNLLAQIGDQYADLFLAAKNLSDAILLSDILRVNTEITKAPLSASMIKRYDEHHQDLTLLKALVRQQLPEKYKEIFFDQSKNGYAGYIDGGASQEEFYKFIKPILEKMDGTEELLVKLNREDLLRKQRTFDNGSIPHQIHLGELHAILRRQEDFYPFLKDNREKIEKILTFRIPYYVGPLARGNSRFAWMTRKSEETITPWNFEEVVDKGASAQSFIERMTNFDKNLPNEKVLPKHSLLYEYFTVYNELTKVKYVTEGMRKPAFLSGEQKKAIVDLLFKTNRKVTVKQLKEDYFKKIECFDSVEISGVEDRFNASLGTYHDLLKIIKDKDFLDNEENEDILEDIVLTLTLFEDREMIEERLKTYAHLFDDKVMKQLKRRRYTGWGRLSRKLINGIRDKQSGKTILDFLKSDGFANRNFMQLIHDDSLTFKEDIQKAQVSGQGDSLHEHIANLAGSPAIKKGILQTVKVVDELVKVMGRHKPENIVIEMARENQTTQKGQKNSRERMKRIEEGIKELGSQILKEHPVENTQLQNEKLYLYYLQNGRDMYVDQELDINRLSDYDVDHIVPQSFLKDDSIDNKVLTRSDKARGKSDNVPSEEVVKKMKNYWRQLLNAKLITQRKFDNLTKAERGGLSELDKAGFIKRQLVETRQITKHVAQILDSRMNTKYDENDKLIREVKVITLKSKLVSDFRKDFQFYKVREINNYHHAHDAYLNAVVGTALIKKYPKLESEFVYGDYKVYDVRKMIAKSEQEIGKATAKYFFYSNIMNFFKTEITLANGEIRKRPLIETNGETGEIVWDKGRDFATVRKVLSMPQVNIVKKTEVQTGGFSKESILPKRNSDKLIARKKDWDPKKYGGFDSPTVAYSVLVVAKVEKGKSKKLKSVKELLGITIMERSSFEKNPIDFLEAKGYKEVKKDLIIKLPKYSLFELENGRKRMLASAGELQKGNELALPSKYVNFLYLASHYEKLKGSPEDNEQKQLFVEQHKHYLDEIIEQISEFSKRVILADANLDKVLSAYNKHRDKPIREQAENIIHLFTLTNLGAPAAFKYFDTTIDRKRYTSTKEVLDATLIHQSITGLYETRIDLSQLGGDGGGGGEAAAKGSSGGTLNIEDEYRLHETSKEPDVSLGSTWLSDFPQAWAETGGMGLAVRQAPLIIPLKATSTPVSIKQYPMSQEARLGIKPHIQRLLDQGILVPCQSPWNTPLLPVKKPGTNDYRPVQDLREVNKRVEDIHPTVPNPYNLLSGLPPSHQWYTVLDLKDAFFCLRLHPTSQPLFAFEWRDPEMGISGQLTWTRLPQGFKNSPTLFNEALHRDLAGFRIQHPDLILLQYVDDLLLAATSELDCQQGTRALLQTLGDLGYRASAKKAQICQKQVKYLGYLLKEGQRWLTEARKETVMGQPIPKTPRQLREFLGKAGFCRLFIPGFAEMAAPLYPLTKPGTLFNWGPDQQKAFQEIKQALLTAPALGLPDLTKPFELFVDEKQGYAKGVLTQKLGPWRRPVAYLSKKLDPVAAGWPPCLRMVAAIAVLTKDAGKLTMGQPLVILAPHAVEALVKQPPDRWLSNARMTHYQALLLDTDRVQFGPVVALNPATLLPLPEEGLQHDCLDILAEAHGTRSDLMDQPLPDADHTWYTDGSSFLQEGQRKAGAAVTTETEVIWARALPAGTSAQRAELIALTQALKMAEGKKLNVYTDSRYAFATAHIHGEIYRRRGWLTSEGKEIKNKDEILALLKALFLPKRLSIIHCPGHQKGNSAEARGNRMADQAAREVATRETPETSTLLAGKRTADGSEFEKRTADGSEFESPKKKAKVE

SEQ ID NO: 2317 - protein, 2094 aa, synthetic construct
MPAAKRVKLDGGDKKYSIGLDIGTNSVGWAVITDEYKVPSKKFKVLGNTDRHSIKKNLIGALLFDSGETAEATRLKRTARRRYTRRKNRICYLQEIFSNEMAKVDDSFFHRLEESFLVEEDKKHERHPIFGNIVDEVAYHEKYPTIYHLRKKLVDSTDKADLRLIYLALAHMIKFRGHFLIEGDLNPDNSDVDKLFIQLVQTYNQLFEENPINASGVDAKAILSARLSKSRRLENLIAQLPGEKKNGLFGNLIALSLGLTPNFKSNFDLAEDAKLQLSKDTYDDDLDNLLAQIGDQYADLFLAAKNLSDAILLSDILRVNTEITKAPLSASMIKRYDEHHQDLTLLKALVRQQLPEKYKEIFFDQSKNGYAGYIDGGASQEEFYKFIKPILEKMDGTEELLVKLNREDLLRKQRTFDNGSIPHQIHLGELHAILRRQEDFYPFLKDNREKIEKILTFRIPYYVGPLARGNSRFAWMTRKSEETITPWNFEEVVDKGASAQSFIERMTNFDKNLPNEKVLPKHSLLYEYFTVYNELTKVKYVTEGMRKPAFLSGEQKKAIVDLLFKTNRKVTVKQLKEDYFKKIECFDSVEISGVEDRFNASLGTYHDLLKIIKDKDFLDNEENEDILEDIVLTLTLFEDREMIEERLKTYAHLFDDKVMKQLKRRRYTGWGRLSRKLINGIRDKQSGKTILDFLKSDGFANRNFMQLIHDDSLTFKEDIQKAQVSGQGDSLHEHIANLAGSPAIKKGILQTVKVVDELVKVMGRHKPENIVIEMARENQTTQKGQKNSRERMKRIEEGIKELGSQILKEHPVENTQLQNEKLYLYYLQNGRDMYVDQELDINRLSDYDVDHIVPQSFLKDDSIDNKVLTRSDKARGKSDNVPSEEVVKKMKNYWRQLLNAKLITQRKFDNLTKAERGGLSELDKAGFIKRQLVETRQITKHVAQILDSRMNTKYDENDKLIREVKVITLKSKLVSDFRKDFQFYKVREINNYHHAHDAYLNAVVGTALIKKYPKLESEFVYGDYKVYDVRKMIAKSEQEIGKATAKYFFYSNIMNFFKTEITLANGEIRKRPLIETNGETGEIVWDKGRDFATVRKVLSMPQVNIVKKTEVQTGGFSKESILPKRNSDKLIARKKDWDPKKYGGFDSPTVAYSVLVVAKVEKGKSKKLKSVKELLGITIMERSSFEKNPIDFLEAKGYKEVKKDLIIKLPKYSLFELENGRKRMLASAGELQKGNELALPSKYVNFLYLASHYEKLKGSPEDNEQKQLFVEQHKHYLDEIIEQISEFSKRVILADANLDKVLSAYNKHRDKPIREQAENIIHLFTLTNLGAPAAFKYFDTTIDRKRYTSTKEVLDATLIHQSITGLYETRIDLSQLGGDGGGGSGGGPAPGGTLNIEDEYRLHETSKEPDVSLGSTWLSDFPQAWAETGGMGLAVRQAPLIIPLKATSTPVSIKQYPMSQEARLGIKPHIQRLLDQGILVPCQSPWNTPLLPVKKPGTNDYRPVQDLREVNKRVEDIHPTVPNPYNLLSGLPPSHQWYTVLDLKDAFFCLRLHPTSQPLFAFEWRDPEMGISGQLTWTRLPQGFKNSPTLFNEALHRDLAGFRIQHPDLILLQYVDDLLLAATSELDCQQGTRALLQTLGDLGYRASAKKAQICQKQVKYLGYLLKEGQRWLTEARKETVMGQPIPKTPRQLREFLGKAGFCRLFIPGFAEMAAPLYPLTKPGTLFNWGPDQQKAFQEIKQALLTAPALGLPDLTKPFELFVDEKQGYAKGVLTQKLGPWRRPVAYLSKKLDPVAAGWPPCLRMVAAIAVLTKDAGKLTMGQPLVILAPHAVEALVKQPPDRWLSNARMTHYQALLLDTDRVQFGPVVALNPATLLPLPEEGLQHDCLDILAEAHGTRSDLMDQPLPDADHTWYTDGSSFLQEGQRKAGAAVTTETEVIWARALPAGTSAQRAELIALTQALKMAEGKKLNVYTDSRYAFATAHIHGEIYRRRGWLTSEGKEIKNKDEILALLKALFLPKRLSIIHCPGHQKGNSAEARGNRMADQAAREVATRETPETSTLLAGKRTADGSEFEKRTADGSEFESPKKKAKVE

SEQ ID NO: 2318 - protein, 2094 aa, synthetic construct
MPAAKRVKLDGGDKKYSIGLDIGTNSVGWAVITDEYKVPSKKFKVLGNTDRHSIKKNLIGALLFDSGETAEATRLKRTARRRYTRRKNRICYLQEIFSNEMAKVDDSFFHRLEESFLVEEDKKHERHPIFGNIVDEVAYHEKYPTIYHLRKKLVDSTDKADLRLIYLALAHMIKFRGHFLIEGDLNPDNSDVDKLFIQLVQTYNQLFEENPINASGVDAKAILSARLSKSRRLENLIAQLPGEKKNGLFGNLIALSLGLTPNFKSNFDLAEDAKLQLSKDTYDDDLDNLLAQIGDQYADLFLAAKNLSDAILLSDILRVNTEITKAPLSASMIKRYDEHHQDLTLLKALVRQQLPEKYKEIFFDQSKNGYAGYIDGGASQEEFYKFIKPILEKMDGTEELLVKLNREDLLRKQRTFDNGSIPHQIHLGELHAILRRQEDFYPFLKDNREKIEKILTFRIPYYVGPLARGNSRFAWMTRKSEETITPWNFEEVVDKGASAQSFIERMTNFDKNLPNEKVLPKHSLLYEYFTVYNELTKVKYVTEGMRKPAFLSGEQKKAIVDLLFKTNRKVTVKQLKEDYFKKIECFDSVEISGVEDRFNASLGTYHDLLKIIKDKDFLDNEENEDILEDIVLTLTLFEDREMIEERLKTYAHLFDDKVMKQLKRRRYTGWGRLSRKLINGIRDKQSGKTILDFLKSDGFANRNFMQLIHDDSLTFKEDIQKAQVSGQGDSLHEHIANLAGSPAIKKGILQTVKVVDELVKVMGRHKPENIVIEMARENQTTQKGQKNSRERMKRIEEGIKELGSQILKEHPVENTQLQNEKLYLYYLQNGRDMYVDQELDINRLSDYDVDHIVPQSFLKDDSIDNKVLTRSDKARGKSDNVPSEEVVKKMKNYWRQLLNAKLITQRKFDNLTKAERGGLSELDKAGFIKRQLVETRQITKHVAQILDSRMNTKYDENDKLIREVKVITLKSKLVSDFRKDFQFYKVREINNYHHAHDAYLNAVVGTALIKKYPKLESEFVYGDYKVYDVRKMIAKSEQEIGKATAKYFFYSNIMNFFKTEITLANGEIRKRPLIETNGETGEIVWDKGRDFATVRKVLSMPQVNIVKKTEVQTGGFSKESILPKRNSDKLIARKKDWDPKKYGGFDSPTVAYSVLVVAKVEKGKSKKLKSVKELLGITIMERSSFEKNPIDFLEAKGYKEVKKDLIIKLPKYSLFELENGRKRMLASAGELQKGNELALPSKYVNFLYLASHYEKLKGSPEDNEQKQLFVEQHKHYLDEIIEQISEFSKRVILADANLDKVLSAYNKHRDKPIREQAENIIHLFTLTNLGAPAAFKYFDTTIDRKRYTSTKEVLDATLIHQSITGLYETRIDLSQLGGDGGPAPAPAPAPGGTLNIEDEYRLHETSKEPDVSLGSTWLSDFPQAWAETGGMGLAVRQAPLIIPLKATSTPVSIKQYPMSQEARLGIKPHIQRLLDQGILVPCQSPWNTPLLPVKKPGTNDYRPVQDLREVNKRVEDIHPTVPNPYNLLSGLPPSHQWYTVLDLKDAFFCLRLHPTSQPLFAFEWRDPEMGISGQLTWTRLPQGFKNSPTLFNEALHRDLAGFRIQHPDLILLQYVDDLLLAATSELDCQQGTRALLQTLGDLGYRASAKKAQICQKQVKYLGYLLKEGQRWLTEARKETVMGQPIPKTPRQLREFLGKAGFCRLFIPGFAEMAAPLYPLTKPGTLFNWGPDQQKAFQEIKQALLTAPALGLPDLTKPFELFVDEKQGYAKGVLTQKLGPWRRPVAYLSKKLDPVAAGWPPCLRMVAAIAVLTKDAGKLTMGQPLVILAPHAVEALVKQPPDRWLSNARMTHYQALLLDTDRVQFGPVVALNPATLLPLPEEGLQHDCLDILAEAHGTRSDLMDQPLPDADHTWYTDGSSFLQEGQRKAGAAVTTETEVIWARALPAGTSAQRAELIALTQALKMAEGKKLNVYTDSRYAFATAHIHGEIYRRRGWLTSEGKEIKNKDEILALLKALFLPKRLSIIHCPGHQKGNSAEARGNRMADQAAREVATRETPETSTLLAGKRTADGSEFEKRTADGSEFESPKKKAKVE

SEQ ID NO: 2319 - protein, 2097 aa, synthetic construct
MPAAKRVKLDGGDKKYSIGLDIGTNSVGWAVITDEYKVPSKKFKVLGNTDRHSIKKNLIGALLFDSGETAEATRLKRTARRRYTRRKNRICYLQEIFSNEMAKVDDSFFHRLEESFLVEEDKKHERHPIFGNIVDEVAYHEKYPTIYHLRKKLVDSTDKADLRLIYLALAHMIKFRGHFLIEGDLNPDNSDVDKLFIQLVQTYNQLFEENPINASGVDAKAILSARLSKSRRLENLIAQLPGEKKNGLFGNLIALSLGLTPNFKSNFDLAEDAKLQLSKDTYDDDLDNLLAQIGDQYADLFLAAKNLSDAILLSDILRVNTEITKAPLSASMIKRYDEHHQDLTLLKALVRQQLPEKYKEIFFDQSKNGYAGYIDGGASQEEFYKFIKPILEKMDGTEELLVKLNREDLLRKQRTFDNGSIPHQIHLGELHAILRRQEDFYPFLKDNREKIEKILTFRIPYYVGPLARGNSRFAWMTRKSEETITPWNFEEVVDKGASAQSFIERMTNFDKNLPNEKVLPKHSLLYEYFTVYNELTKVKYVTEGMRKPAFLSGEQKKAIVDLLFKTNRKVTVKQLKEDYFKKIECFDSVEISGVEDRFNASLGTYHDLLKIIKDKDFLDNEENEDILEDIVLTLTLFEDREMIEERLKTYAHLFDDKVMKQLKRRRYTGWGRLSRKLINGIRDKQSGKTILDFLKSDGFANRNFMQLIHDDSLTFKEDIQKAQVSGQGDSLHEHIANLAGSPAIKKGILQTVKVVDELVKVMGRHKPENIVIEMARENQTTQKGQKNSRERMKRIEEGIKELGSQILKEHPVENTQLQNEKLYLYYLQNGRDMYVDQELDINRLSDYDVDHIVPQSFLKDDSIDNKVLTRSDKARGKSDNVPSEEVVKKMKNYWRQLLNAKLITQRKFDNLTKAERGGLSELDKAGFIKRQLVETRQITKHVAQILDSRMNTKYDENDKLIREVKVITLKSKLVSDFRKDFQFYKVREINNYHHAHDAYLNAVVGTALIKKYPKLESEFVYGDYKVYDVRKMIAKSEQEIGKATAKYFFYSNIMNFFKTEITLANGEIRKRPLIETNGETGEIVWDKGRDFATVRKVLSMPQVNIVKKTEVQTGGFSKESILPKRNSDKLIARKKDWDPKKYGGFDSPTVAYSVLVVAKVEKGKSKKLKSVKELLGITIMERSSFEKNPIDFLEAKGYKEVKKDLIIKLPKYSLFELENGRKRMLASAGELQKGNELALPSKYVNFLYLASHYEKLKGSPEDNEQKQLFVEQHKHYLDEIIEQISEFSKRVILADANLDKVLSAYNKHRDKPIREQAENIIHLFTLTNLGAPAAFKYFDTTIDRKRYTSTKEVLDATLIHQSITGLYETRIDLSQLGGDGGGGSGGSGGSGGSGGTLNIEDEYRLHETSKEPDVSLGSTWLSDFPQAWAETGGMGLAVRQAPLIIPLKATSTPVSIKQYPMSQEARLGIKPHIQRLLDQGILVPCQSPWNTPLLPVKKPGTNDYRPVQDLREVNKRVEDIHPTVPNPYNLLSGLPPSHQWYTVLDLKDAFFCLRLHPTSQPLFAFEWRDPEMGISGQLTWTRLPQGFKNSPTLFNEALHRDLAGFRIQHPDLILLQYVDDLLLAATSELDCQQGTRALLQTLGDLGYRASAKKAQICQKQVKYLGYLLKEGQRWLTEARKETVMGQPIPKTPRQLREFLGKAGFCRLFIPGFAEMAAPLYPLTKPGTLFNWGPDQQKAFQEIKQALLTAPALGLPDLTKPFELFVDEKQGYAKGVLTQKLGPWRRPVAYLSKKLDPVAAGWPPCLRMVAAIAVLTKDAGKLTMGQPLVILAPHAVEALVKQPPDRWLSNARMTHYQALLLDTDRVQFGPVVALNPATLLPLPEEGLQHDCLDILAEAHGTRSDLMDQPLPDADHTWYTDGSSFLQEGQRKAGAAVTTETEVIWARALPAGTSAQRAELIALTQALKMAEGKKLNVYTDSRYAFATAHIHGEIYRRRGWLTSEGKEIKNKDEILALLKALFLPKRLSIIHCPGHQKGNSAEARGNRMADQAAREVATRETPETSTLLAGKRTADGSEFEKRTADGSEFESPKKKAKVE

SEQ ID NO: 2320 - protein, 2094 aa, synthetic construct
MPAAKRVKLDGGDKKYSIGLDIGTNSVGWAVITDEYKVPSKKFKVLGNTDRHSIKKNLIGALLFDSGETAEATRLKRTARRRYTRRKNRICYLQEIFSNEMAKVDDSFFHRLEESFLVEEDKKHERHPIFGNIVDEVAYHEKYPTIYHLRKKLVDSTDKADLRLIYLALAHMIKFRGHFLIEGDLNPDNSDVDKLFIQLVQTYNQLFEENPINASGVDAKAILSARLSKSRRLENLIAQLPGEKKNGLFGNLIALSLGLTPNFKSNFDLAEDAKLQLSKDTYDDDLDNLLAQIGDQYADLFLAAKNLSDAILLSDILRVNTEITKAPLSASMIKRYDEHHQDLTLLKALVRQQLPEKYKEIFFDQSKNGYAGYIDGGASQEEFYKFIKPILEKMDGTEELLVKLNREDLLRKQRTFDNGSIPHQIHLGELHAILRRQEDFYPFLKDNREKIEKILTFRIPYYVGPLARGNSRFAWMTRKSEETITPWNFEEVVDKGASAQSFIERMTNFDKNLPNEKVLPKHSLLYEYFTVYNELTKVKYVTEGMRKPAFLSGEQKKAIVDLLFKTNRKVTVKQLKEDYFKKIECFDSVEISGVEDRFNASLGTYHDLLKIIKDKDFLDNEENEDILEDIVLTLTLFEDREMIEERLKTYAHLFDDKVMKQLKRRRYTGWGRLSRKLINGIRDKQSGKTILDFLKSDGFANRNFMQLIHDDSLTFKEDIQKAQVSGQGDSLHEHIANLAGSPAIKKGILQTVKVVDELVKVMGRHKPENIVIEMARENQTTQKGQKNSRERMKRIEEGIKELGSQILKEHPVENTQLQNEKLYLYYLQNGRDMYVDQELDINRLSDYDVDHIVPQSFLKDDSIDNKVLTRSDKARGKSDNVPSEEVVKKMKNYWRQLLNAKLITQRKFDNLTKAERGGLSELDKAGFIKRQLVETRQITKHVAQILDSRMNTKYDENDKLIREVKVITLKSKLVSDFRKDFQFYKVREINNYHHAHDAYLNAVVGTALIKKYPKLESEFVYGDYKVYDVRKMIAKSEQEIGKATAKYFFYSNIMNFFKTEITLANGEIRKRPLIETNGETGEIVWDKGRDFATVRKVLSMPQVNIVKKTEVQTGGFSKESILPKRNSDKLIARKKDWDPKKYGGFDSPTVAYSVLVVAKVEKGKSKKLKSVKELLGITIMERSSFEKNPIDFLEAKGYKEVKKDLIIKLPKYSLFELENGRKRMLASAGELQKGNELALPSKYVNFLYLASHYEKLKGSPEDNEQKQLFVEQHKHYLDEIIEQISEFSKRVILADANLDKVLSAYNKHRDKPIREQAENIIHLFTLTNLGAPAAFKYFDTTIDRKRYTSTKEVLDATLIHQSITGLYETRIDLSQLGGDGGGGGPAPGGSGGTLNIEDEYRLHETSKEPDVSLGSTWLSDFPQAWAETGGMGLAVRQAPLIIPLKATSTPVSIKQYPMSQEARLGIKPHIQRLLDQGILVPCQSPWNTPLLPVKKPGTNDYRPVQDLREVNKRVEDIHPTVPNPYNLLSGLPPSHQWYTVLDLKDAFFCLRLHPTSQPLFAFEWRDPEMGISGQLTWTRLPQGFKNSPTLFNEALHRDLAGFRIQHPDLILLQYVDDLLLAATSELDCQQGTRALLQTLGDLGYRASAKKAQICQKQVKYLGYLLKEGQRWLTEARKETVMGQPIPKTPRQLREFLGKAGFCRLFIPGFAEMAAPLYPLTKPGTLFNWGPDQQKAFQEIKQALLTAPALGLPDLTKPFELFVDEKQGYAKGVLTQKLGPWRRPVAYLSKKLDPVAAGWPPCLRMVAAIAVLTKDAGKLTMGQPLVILAPHAVEALVKQPPDRWLSNARMTHYQALLLDTDRVQFGPVVALNPATLLPLPEEGLQHDCLDILAEAHGTRSDLMDQPLPDADHTWYTDGSSFLQEGQRKAGAAVTTETEVIWARALPAGTSAQRAELIALTQALKMAEGKKLNVYTDSRYAFATAHIHGEIYRRRGWLTSEGKEIKNKDEILALLKALFLPKRLSIIHCPGHQKGNSAEARGNRMADQAAREVATRETPETSTLLAGKRTADGSEFEKRTADGSEFESPKKKAKVE

SEQ ID NO: 2321 - protein, 2094 aa, synthetic construct
MPAAKRVKLDGGDKKYSIGLDIGTNSVGWAVITDEYKVPSKKFKVLGNTDRHSIKKNLIGALLFDSGETAEATRLKRTARRRYTRRKNRICYLQEIFSNEMAKVDDSFFHRLEESFLVEEDKKHERHPIFGNIVDEVAYHEKYPTIYHLRKKLVDSTDKADLRLIYLALAHMIKFRGHFLIEGDLNPDNSDVDKLFIQLVQTYNQLFEENPINASGVDAKAILSARLSKSRRLENLIAQLPGEKKNGLFGNLIALSLGLTPNFKSNFDLAEDAKLQLSKDTYDDDLDNLLAQIGDQYADLFLAAKNLSDAILLSDILRVNTEITKAPLSASMIKRYDEHHQDLTLLKALVRQQLPEKYKEIFFDQSKNGYAGYIDGGASQEEFYKFIKPILEKMDGTEELLVKLNREDLLRKQRTFDNGSIPHQIHLGELHAILRRQEDFYPFLKDNREKIEKILTFRIPYYVGPLARGNSRFAWMTRKSEETITPWNFEEVVDKGASAQSFIERMTNFDKNLPNEKVLPKHSLLYEYFTVYNELTKVKYVTEGMRKPAFLSGEQKKAIVDLLFKTNRKVTVKQLKEDYFKKIECFDSVEISGVEDRFNASLGTYHDLLKIIKDKDFLDNEENEDILEDIVLTLTLFEDREMIEERLKTYAHLFDDKVMKQLKRRRYTGWGRLSRKLINGIRDKQSGKTILDFLKSDGFANRNFMQLIHDDSLTFKEDIQKAQVSGQGDSLHEHIANLAGSPAIKKGILQTVKVVDELVKVMGRHKPENIVIEMARENQTTQKGQKNSRERMKRIEEGIKELGSQILKEHPVENTQLQNEKLYLYYLQNGRDMYVDQELDINRLSDYDVDHIVPQSFLKDDSIDNKVLTRSDKARGKSDNVPSEEVVKKMKNYWRQLLNAKLITQRKFDNLTKAERGGLSELDKAGFIKRQLVETRQITKHVAQILDSRMNTKYDENDKLIREVKVITLKSKLVSDFRKDFQFYKVREINNYHHAHDAYLNAVVGTALIKKYPKLESEFVYGDYKVYDVRKMIAKSEQEIGKATAKYFFYSNIMNFFKTEITLANGEIRKRPLIETNGETGEIVWDKGRDFATVRKVLSMPQVNIVKKTEVQTGGFSKESILPKRNSDKLIARKKDWDPKKYGGFDSPTVAYSVLVVAKVEKGKSKKLKSVKELLGITIMERSSFEKNPIDFLEAKGYKEVKKDLIIKLPKYSLFELENGRKRMLASAGELQKGNELALPSKYVNFLYLASHYEKLKGSPEDNEQKQLFVEQHKHYLDEIIEQISEFSKRVILADANLDKVLSAYNKHRDKPIREQAENIIHLFTLTNLGAPAAFKYFDTTIDRKRYTSTKEVLDATLIHQSITGLYETRIDLSQLGGDGGPAPGGSGSSGGTLNIEDEYRLHETSKEPDVSLGSTWLSDFPQAWAETGGMGLAVRQAPLIIPLKATSTPVSIKQYPMSQEARLGIKPHIQRLLDQGILVPCQSPWNTPLLPVKKPGTNDYRPVQDLREVNKRVEDIHPTVPNPYNLLSGLPPSHQWYTVLDLKDAFFCLRLHPTSQPLFAFEWRDPEMGISGQLTWTRLPQGFKNSPTLFNEALHRDLAGFRIQHPDLILLQYVDDLLLAATSELDCQQGTRALLQTLGDLGYRASAKKAQICQKQVKYLGYLLKEGQRWLTEARKETVMGQPIPKTPRQLREFLGKAGFCRLFIPGFAEMAAPLYPLTKPGTLFNWGPDQQKAFQEIKQALLTAPALGLPDLTKPFELFVDEKQGYAKGVLTQKLGPWRRPVAYLSKKLDPVAAGWPPCLRMVAAIAVLTKDAGKLTMGQPLVILAPHAVEALVKQPPDRWLSNARMTHYQALLLDTDRVQFGPVVALNPATLLPLPEEGLQHDCLDILAEAHGTRSDLMDQPLPDADHTWYTDGSSFLQEGQRKAGAAVTTETEVIWARALPAGTSAQRAELIALTQALKMAEGKKLNVYTDSRYAFATAHIHGEIYRRRGWLTSEGKEIKNKDEILALLKALFLPKRLSIIHCPGHQKGNSAEARGNRMADQAAREVATRETPETSTLLAGKRTADGSEFEKRTADGSEFESPKKKAKVE

SEQ ID NO: 2322 - protein, 2115 aa, synthetic construct
MPAAKRVKLDGGDKKYSIGLDIGTNSVGWAVITDEYKVPSKKFKVLGNTDRHSIKKNLIGALLFDSGETAEATRLKRTARRRYTRRKNRICYLQEIFSNEMAKVDDSFFHRLEESFLVEEDKKHERHPIFGNIVDEVAYHEKYPTIYHLRKKLVDSTDKADLRLIYLALAHMIKFRGHFLIEGDLNPDNSDVDKLFIQLVQTYNQLFEENPINASGVDAKAILSARLSKSRRLENLIAQLPGEKKNGLFGNLIALSLGLTPNFKSNFDLAEDAKLQLSKDTYDDDLDNLLAQIGDQYADLFLAAKNLSDAILLSDILRVNTEITKAPLSASMIKRYDEHHQDLTLLKALVRQQLPEKYKEIFFDQSKNGYAGYIDGGASQEEFYKFIKPILEKMDGTEELLVKLNREDLLRKQRTFDNGSIPHQIHLGELHAILRRQEDFYPFLKDNREKIEKILTFRIPYYVGPLARGNSRFAWMTRKSEETITPWNFEEVVDKGASAQSFIERMTNFDKNLPNEKVLPKHSLLYEYFTVYNELTKVKYVTEGMRKPAFLSGEQKKAIVDLLFKTNRKVTVKQLKEDYFKKIECFDSVEISGVEDRFNASLGTYHDLLKIIKDKDFLDNEENEDILEDIVLTLTLFEDREMIEERLKTYAHLFDDKVMKQLKRRRYTGWGRLSRKLINGIRDKQSGKTILDFLKSDGFANRNFMQLIHDDSLTFKEDIQKAQVSGQGDSLHEHIANLAGSPAIKKGILQTVKVVDELVKVMGRHKPENIVIEMARENQTTQKGQKNSRERMKRIEEGIKELGSQILKEHPVENTQLQNEKLYLYYLQNGRDMYVDQELDINRLSDYDVDHIVPQSFLKDDSIDNKVLTRSDKARGKSDNVPSEEVVKKMKNYWRQLLNAKLITQRKFDNLTKAERGGLSELDKAGFIKRQLVETRQITKHVAQILDSRMNTKYDENDKLIREVKVITLKSKLVSDFRKDFQFYKVREINNYHHAHDAYLNAVVGTALIKKYPKLESEFVYGDYKVYDVRKMIAKSEQEIGKATAKYFFYSNIMNFFKTEITLANGEIRKRPLIETNGETGEIVWDKGRDFATVRKVLSMPQVNIVKKTEVQTGGFSKESILPKRNSDKLIARKKDWDPKKYGGFDSPTVAYSVLVVAKVEKGKSKKLKSVKELLGITIMERSSFEKNPIDFLEAKGYKEVKKDLIIKLPKYSLFELENGRKRMLASAGELQKGNELALPSKYVNFLYLASHYEKLKGSPEDNEQKQLFVEQHKHYLDEIIEQISEFSKRVILADANLDKVLSAYNKHRDKPIREQAENIIHLFTLTNLGAPAAFKYFDTTIDRKRYTSTKEVLDATLIHQSITGLYETRIDLSQLGGDGGEAAAKEAAAKEAAAKEAAAKEAAAKEAAAKGGTLNIEDEYRLHETSKEPDVSLGSTWLSDFPQAWAETGGMGLAVRQAPLIIPLKATSTPVSIKQYPMSQEARLGIKPHIQRLLDQGILVPCQSPWNTPLLPVKKPGTNDYRPVQDLREVNKRVEDIHPTVPNPYNLLSGLPPSHQWYTVLDLKDAFFCLRLHPTSQPLFAFEWRDPEMGISGQLTWTRLPQGFKNSPTLFNEALHRDLAGFRIQHPDLILLQYVDDLLLAATSELDCQQGTRALLQTLGDLGYRASAKKAQICQKQVKYLGYLLKEGQRWLTEARKETVMGQPIPKTPRQLREFLGKAGFCRLFIPGFAEMAAPLYPLTKPGTLFNWGPDQQKAFQEIKQALLTAPALGLPDLTKPFELFVDEKQGYAKGVLTQKLGPWRRPVAYLSKKLDPVAAGWPPCLRMVAAIAVLTKDAGKLTMGQPLVILAPHAVEALVKQPPDRWLSNARMTHYQALLLDTDRVQFGPVVALNPATLLPLPEEGLQHDCLDILAEAHGTRSDLMDQPLPDADHTWYTDGSSFLQEGQRKAGAAVTTETEVIWARALPAGTSAQRAELIALTQALKMAEGKKLNVYTDSRYAFATAHIHGEIYRRRGWLTSEGKEIKNKDEILALLKALFLPKRLSIIHCPGHQKGNSAEARGNRMADQAAREVATRETPETSTLLAGKRTADGSEFEKRTADGSEFESPKKKAKVE

SEQ ID NO: 2323 - protein, 2088 aa, synthetic construct
MPAAKRVKLDGGDKKYSIGLDIGTNSVGWAVITDEYKVPSKKFKVLGNTDRHSIKKNLIGALLFDSGETAEATRLKRTARRRYTRRKNRICYLQEIFSNEMAKVDDSFFHRLEESFLVEEDKKHERHPIFGNIVDEVAYHEKYPTIYHLRKKLVDSTDKADLRLIYLALAHMIKFRGHFLIEGDLNPDNSDVDKLFIQLVQTYNQLFEENPINASGVDAKAILSARLSKSRRLENLIAQLPGEKKNGLFGNLIALSLGLTPNFKSNFDLAEDAKLQLSKDTYDDDLDNLLAQIGDQYADLFLAAKNLSDAILLSDILRVNTEITKAPLSASMIKRYDEHHQDLTLLKALVRQQLPEKYKEIFFDQSKNGYAGYIDGGASQEEFYKFIKPILEKMDGTEELLVKLNREDLLRKQRTFDNGSIPHQIHLGELHAILRRQEDFYPFLKDNREKIEKILTFRIPYYVGPLARGNSRFAWMTRKSEETITPWNFEEVVDKGASAQSFIERMTNFDKNLPNEKVLPKHSLLYEYFTVYNELTKVKYVTEGMRKPAFLSGEQKKAIVDLLFKTNRKVTVKQLKEDYFKKIECFDSVEISGVEDRFNASLGTYHDLLKIIKDKDFLDNEENEDILEDIVLTLTLFEDREMIEERLKTYAHLFDDKVMKQLKRRRYTGWGRLSRKLINGIRDKQSGKTILDFLKSDGFANRNFMQLIHDDSLTFKEDIQKAQVSGQGDSLHEHIANLAGSPAIKKGILQTVKVVDELVKVMGRHKPENIVIEMARENQTTQKGQKNSRERMKRIEEGIKELGSQILKEHPVENTQLQNEKLYLYYLQNGRDMYVDQELDINRLSDYDVDHIVPQSFLKDDSIDNKVLTRSDKARGKSDNVPSEEVVKKMKNYWRQLLNAKLITQRKFDNLTKAERGGLSELDKAGFIKRQLVETRQITKHVAQILDSRMNTKYDENDKLIREVKVITLKSKLVSDFRKDFQFYKVREINNYHHAHDAYLNAVVGTALIKKYPKLESEFVYGDYKVYDVRKMIAKSEQEIGKATAKYFFYSNIMNFFKTEITLANGEIRKRPLIETNGETGEIVWDKGRDFATVRKVLSMPQVNIVKKTEVQTGGFSKESILPKRNSDKLIARKKDWDPKKYGGFDSPTVAYSVLVVAKVEKGKSKKLKSVKELLGITIMERSSFEKNPIDFLEAKGYKEVKKDLIIKLPKYSLFELENGRKRMLASAGELQKGNELALPSKYVNFLYLASHYEKLKGSPEDNEQKQLFVEQHKHYLDEIIEQISEFSKRVILADANLDKVLSAYNKHRDKPIREQAENIIHLFTLTNLGAPAAFKYFDTTIDRKRYTSTKEVLDATLIHQSITGLYETRIDLSQLGGDGGGGSGGTLNIEDEYRLHETSKEPDVSLGSTWLSDFPQAWAETGGMGLAVRQAPLIIPLKATSTPVSIKQYPMSQEARLGIKPHIQRLLDQGILVPCQSPWNTPLLPVKKPGTNDYRPVQDLREVNKRVEDIHPTVPNPYNLLSGLPPSHQWYTVLDLKDAFFCLRLHPTSQPLFAFEWRDPEMGISGQLTWTRLPQGFKNSPTLFNEALHRDLAGFRIQHPDLILLQYVDDLLLAATSELDCQQGTRALLQTLGDLGYRASAKKAQICQKQVKYLGYLLKEGQRWLTEARKETVMGQPIPKTPRQLREFLGKAGFCRLFIPGFAEMAAPLYPLTKPGTLFNWGPDQQKAFQEIKQALLTAPALGLPDLTKPFELFVDEKQGYAKGVLTQKLGPWRRPVAYLSKKLDPVAAGWPPCLRMVAAIAVLTKDAGKLTMGQPLVILAPHAVEALVKQPPDRWLSNARMTHYQALLLDTDRVQFGPVVALNPATLLPLPEEGLQHDCLDILAEAHGTRSDLMDQPLPDADHTWYTDGSSFLQEGQRKAGAAVTTETEVIWARALPAGTSAQRAELIALTQALKMAEGKKLNVYTDSRYAFATAHIHGEIYRRRGWLTSEGKEIKNKDEILALLKALFLPKRLSIIHCPGHQKGNSAEARGNRMADQAAREVATRETPETSTLLAGKRTADGSEFEKRTADGSEFESPKKKAKVE

SEQ ID NO: 2324 - protein, 2110 aa, synthetic construct
MPAAKRVKLDGGDKKYSIGLDIGTNSVGWAVITDEYKVPSKKFKVLGNTDRHSIKKNLIGALLFDSGETAEATRLKRTARRRYTRRKNRICYLQEIFSNEMAKVDDSFFHRLEESFLVEEDKKHERHPIFGNIVDEVAYHEKYPTIYHLRKKLVDSTDKADLRLIYLALAHMIKFRGHFLIEGDLNPDNSDVDKLFIQLVQTYNQLFEENPINASGVDAKAILSARLSKSRRLENLIAQLPGEKKNGLFGNLIALSLGLTPNFKSNFDLAEDAKLQLSKDTYDDDLDNLLAQIGDQYADLFLAAKNLSDAILLSDILRVNTEITKAPLSASMIKRYDEHHQDLTLLKALVRQQLPEKYKEIFFDQSKNGYAGYIDGGASQEEFYKFIKPILEKMDGTEELLVKLNREDLLRKQRTFDNGSIPHQIHLGELHAILRRQEDFYPFLKDNREKIEKILTFRIPYYVGPLARGNSRFAWMTRKSEETITPWNFEEVVDKGASAQSFIERMTNFDKNLPNEKVLPKHSLLYEYFTVYNELTKVKYVTEGMRKPAFLSGEQKKAIVDLLFKTNRKVTVKQLKEDYFKKIECFDSVEISGVEDRFNASLGTYHDLLKIIKDKDFLDNEENEDILEDIVLTLTLFEDREMIEERLKTYAHLFDDKVMKQLKRRRYTGWGRLSRKLINGIRDKQSGKTILDFLKSDGFANRNFMQLIHDDSLTFKEDIQKAQVSGQGDSLHEHIANLAGSPAIKKGILQTVKVVDELVKVMGRHKPENIVIEMARENQTTQKGQKNSRERMKRIEEGIKELGSQILKEHPVENTQLQNEKLYLYYLQNGRDMYVDQELDINRLSDYDVDHIVPQSFLKDDSIDNKVLTRSDKARGKSDNVPSEEVVKKMKNYWRQLLNAKLITQRKFDNLTKAERGGLSELDKAGFIKRQLVETRQITKHVAQILDSRMNTKYDENDKLIREVKVITLKSKLVSDFRKDFQFYKVREINNYHHAHDAYLNAVVGTALIKKYPKLESEFVYGDYKVYDVRKMIAKSEQEIGKATAKYFFYSNIMNFFKTEITLANGEIRKRPLIETNGETGEIVWDKGRDFATVRKVLSMPQVNIVKKTEVQTGGFSKESILPKRNSDKLIARKKDWDPKKYGGFDSPTVAYSVLVVAKVEKGKSKKLKSVKELLGITIMERSSFEKNPIDFLEAKGYKEVKKDLIIKLPKYSLFELENGRKRMLASAGELQKGNELALPSKYVNFLYLASHYEKLKGSPEDNEQKQLFVEQHKHYLDEIIEQISEFSKRVILADANLDKVLSAYNKHRDKPIREQAENIIHLFTLTNLGAPAAFKYFDTTIDRKRYTSTKEVLDATLIHQSITGLYETRIDLSQLGGDGGEAAAKEAAAKEAAAKEAAAKEAAAKGGTLNIEDEYRLHETSKEPDVSLGSTWLSDFPQAWAETGGMGLAVRQAPLIIPLKATSTPVSIKQYPMSQEARLGIKPHIQRLLDQGILVPCQSPWNTPLLPVKKPGTNDYRPVQDLREVNKRVEDIHPTVPNPYNLLSGLPPSHQWYTVLDLKDAFFCLRLHPTSQPLFAFEWRDPEMGISGQLTWTRLPQGFKNSPTLFNEALHRDLAGFRIQHPDLILLQYVDDLLLAATSELDCQQGTRALLQTLGDLGYRASAKKAQICQKQVKYLGYLLKEGQRWLTEARKETVMGQPIPKTPRQLREFLGKAGFCRLFIPGFAEMAAPLYPLTKPGTLFNWGPDQQKAFQEIKQALLTAPALGLPDLTKPFELFVDEKQGYAKGVLTQKLGPWRRPVAYLSKKLDPVAAGWPPCLRMVAAIAVLTKDAGKLTMGQPLVILAPHAVEALVKQPPDRWLSNARMTHYQALLLDTDRVQFGPVVALNPATLLPLPEEGLQHDCLDILAEAHGTRSDLMDQPLPDADHTWYTDGSSFLQEGQRKAGAAVTTETEVIWARALPAGTSAQRAELIALTQALKMAEGKKLNVYTDSRYAFATAHIHGEIYRRRGWLTSEGKEIKNKDEILALLKALFLPKRLSIIHCPGHQKGNSAEARGNRMADQAAREVATRETPETSTLLAGKRTADGSEFEKRTADGSEFESPKKKAKVE

SEQ ID NO: 2325 - protein, 2105 aa, synthetic construct
MPAAKRVKLDGGDKKYSIGLDIGTNSVGWAVITDEYKVPSKKFKVLGNTDRHSIKKNLIGALLFDSGETAEATRLKRTARRRYTRRKNRICYLQEIFSNEMAKVDDSFFHRLEESFLVEEDKKHERHPIFGNIVDEVAYHEKYPTIYHLRKKLVDSTDKADLRLIYLALAHMIKFRGHFLIEGDLNPDNSDVDKLFIQLVQTYNQLFEENPINASGVDAKAILSARLSKSRRLENLIAQLPGEKKNGLFGNLIALSLGLTPNFKSNFDLAEDAKLQLSKDTYDDDLDNLLAQIGDQYADLFLAAKNLSDAILLSDILRVNTEITKAPLSASMIKRYDEHHQDLTLLKALVRQQLPEKYKEIFFDQSKNGYAGYIDGGASQEEFYKFIKPILEKMDGTEELLVKLNREDLLRKQRTFDNGSIPHQIHLGELHAILRRQEDFYPFLKDNREKIEKILTFRIPYYVGPLARGNSRFAWMTRKSEETITPWNFEEVVDKGASAQSFIERMTNFDKNLPNEKVLPKHSLLYEYFTVYNELTKVKYVTEGMRKPAFLSGEQKKAIVDLLFKTNRKVTVKQLKEDYFKKIECFDSVEISGVEDRFNASLGTYHDLLKIIKDKDFLDNEENEDILEDIVLTLTLFEDREMIEERLKTYAHLFDDKVMKQLKRRRYTGWGRLSRKLINGIRDKQSGKTILDFLKSDGFANRNFMQLIHDDSLTFKEDIQKAQVSGQGDSLHEHIANLAGSPAIKKGILQTVKVVDELVKVMGRHKPENIVIEMARENQTTQKGQKNSRERMKRIEEGIKELGSQILKEHPVENTQLQNEKLYLYYLQNGRDMYVDQELDINRLSDYDVDHIVPQSFLKDDSIDNKVLTRSDKARGKSDNVPSEEVVKKMKNYWRQLLNAKLITQRKFDNLTKAERGGLSELDKAGFIKRQLVETRQITKHVAQILDSRMNTKYDENDKLIREVKVITLKSKLVSDFRKDFQFYKVREINNYHHAHDAYLNAVVGTALIKKYPKLESEFVYGDYKVYDVRKMIAKSEQEIGKATAKYFFYSNIMNFFKTEITLANGEIRKRPLIETNGETGEIVWDKGRDFATVRKVLSMPQVNIVKKTEVQTGGFSKESILPKRNSDKLIARKKDWDPKKYGGFDSPTVAYSVLVVAKVEKGKSKKLKSVKELLGITIMERSSFEKNPIDFLEAKGYKEVKKDLIIKLPKYSLFELENGRKRMLASAGELQKGNELALPSKYVNFLYLASHYEKLKGSPEDNEQKQLFVEQHKHYLDEIIEQISEFSKRVILADANLDKVLSAYNKHRDKPIREQAENIIHLFTLTNLGAPAAFKYFDTTIDRKRYTSTKEVLDATLIHQSITGLYETRIDLSQLGGDGGEAAAKEAAAKEAAAKEAAAKGGTLNIEDEYRLHETSKEPDVSLGSTWLSDFPQAWAETGGMGLAVRQAPLIIPLKATSTPVSIKQYPMSQEARLGIKPHIQRLLDQGILVPCQSPWNTPLLPVKKPGTNDYRPVQDLREVNKRVEDIHPTVPNPYNLLSGLPPSHQWYTVLDLKDAFFCLRLHPTSQPLFAFEWRDPEMGISGQLTWTRLPQGFKNSPTLFNEALHRDLAGFRIQHPDLILLQYVDDLLLAATSELDCQQGTRALLQTLGDLGYRASAKKAQICQKQVKYLGYLLKEGQRWLTEARKETVMGQPIPKTPRQLREFLGKAGFCRLFIPGFAEMAAPLYPLTKPGTLFNWGPDQQKAFQEIKQALLTAPALGLPDLTKPFELFVDEKQGYAKGVLTQKLGPWRRPVAYLSKKLDPVAAGWPPCLRMVAAIAVLTKDAGKLTMGQPLVILAPHAVEALVKQPPDRWLSNARMTHYQALLLDTDRVQFGPVVALNPATLLPLPEEGLQHDCLDILAEAHGTRSDLMDQPLPDADHTWYTDGSSFLQEGQRKAGAAVTTETEVIWARALPAGTSAQRAELIALTQALKMAEGKKLNVYTDSRYAFATAHIHGEIYRRRGWLTSEGKEIKNKDEILALLKALFLPKRLSIIHCPGHQKGNSAEARGNRMADQAAREVATRETPETSTLLAGKRTADGSEFEKRTADGSEFESPKKKAKVE

SEQ ID NO: 2326 - protein, 2096 aa, synthetic construct
MPAAKRVKLDGGDKKYSIGLDIGTNSVGWAVITDEYKVPSKKFKVLGNTDRHSIKKNLIGALLFDSGETAEATRLKRTARRRYTRRKNRICYLQEIFSNEMAKVDDSFFHRLEESFLVEEDKKHERHPIFGNIVDEVAYHEKYPTIYHLRKKLVDSTDKADLRLIYLALAHMIKFRGHFLIEGDLNPDNSDVDKLFIQLVQTYNQLFEENPINASGVDAKAILSARLSKSRRLENLIAQLPGEKKNGLFGNLIALSLGLTPNFKSNFDLAEDAKLQLSKDTYDDDLDNLLAQIGDQYADLFLAAKNLSDAILLSDILRVNTEITKAPLSASMIKRYDEHHQDLTLLKALVRQQLPEKYKEIFFDQSKNGYAGYIDGGASQEEFYKFIKPILEKMDGTEELLVKLNREDLLRKQRTFDNGSIPHQIHLGELHAILRRQEDFYPFLKDNREKIEKILTFRIPYYVGPLARGNSRFAWMTRKSEETITPWNFEEVVDKGASAQSFIERMTNFDKNLPNEKVLPKHSLLYEYFTVYNELTKVKYVTEGMRKPAFLSGEQKKAIVDLLFKTNRKVTVKQLKEDYFKKIECFDSVEISGVEDRFNASLGTYHDLLKIIKDKDFLDNEENEDILEDIVLTLTLFEDREMIEERLKTYAHLFDDKVMKQLKRRRYTGWGRLSRKLINGIRDKQSGKTILDFLKSDGFANRNFMQLIHDDSLTFKEDIQKAQVSGQGDSLHEHIANLAGSPAIKKGILQTVKVVDELVKVMGRHKPENIVIEMARENQTTQKGQKNSRERMKRIEEGIKELGSQILKEHPVENTQLQNEKLYLYYLQNGRDMYVDQELDINRLSDYDVDHIVPQSFLKDDSIDNKVLTRSDKARGKSDNVPSEEVVKKMKNYWRQLLNAKLITQRKFDNLTKAERGGLSELDKAGFIKRQLVETRQITKHVAQILDSRMNTKYDENDKLIREVKVITLKSKLVSDFRKDFQFYKVREINNYHHAHDAYLNAVVGTALIKKYPKLESEFVYGDYKVYDVRKMIAKSEQEIGKATAKYFFYSNIMNFFKTEITLANGEIRKRPLIETNGETGEIVWDKGRDFATVRKVLSMPQVNIVKKTEVQTGGFSKESILPKRNSDKLIARKKDWDPKKYGGFDSPTVAYSVLVVAKVEKGKSKKLKSVKELLGITIMERSSFEKNPIDFLEAKGYKEVKKDLIIKLPKYSLFELENGRKRMLASAGELQKGNELALPSKYVNFLYLASHYEKLKGSPEDNEQKQLFVEQHKHYLDEIIEQISEFSKRVILADANLDKVLSAYNKHRDKPIREQAENIIHLFTLTNLGAPAAFKYFDTTIDRKRYTSTKEVLDATLIHQSITGLYETRIDLSQLGGDGGGGSEAAAKPAPGGTLNIEDEYRLHETSKEPDVSLGSTWLSDFPQAWAETGGMGLAVRQAPLIIPLKATSTPVSIKQYPMSQEARLGIKPHIQRLLDQGILVPCQSPWNTPLLPVKKPGTNDYRPVQDLREVNKRVEDIHPTVPNPYNLLSGLPPSHQWYTVLDLKDAFFCLRLHPTSQPLFAFEWRDPEMGISGQLTWTRLPQGFKNSPTLFNEALHRDLAGFRIQHPDLILLQYVDDLLLAATSELDCQQGTRALLQTLGDLGYRASAKKAQICQKQVKYLGYLLKEGQRWLTEARKETVMGQPIPKTPRQLREFLGKAGFCRLFIPGFAEMAAPLYPLTKPGTLFNWGPDQQKAFQEIKQALLTAPALGLPDLTKPFELFVDEKQGYAKGVLTQKLGPWRRPVAYLSKKLDPVAAGWPPCLRMVAAIAVLTKDAGKLTMGQPLVILAPHAVEALVKQPPDRWLSNARMTHYQALLLDTDRVQFGPVVALNPATLLPLPEEGLQHDCLDILAEAHGTRSDLMDQPLPDADHTWYTDGSSFLQEGQRKAGAAVTTETEVIWARALPAGTSAQRAELIALTQALKMAEGKKLNVYTDSRYAFATAHIHGEIYRRRGWLTSEGKEIKNKDEILALLKALFLPKRLSIIHCPGHQKGNSAEARGNRMADQAAREVATRETPETSTLLAGKRTADGSEFEKRTADGSEFESPKKKAKVE

SEQ ID NO: 2327 - protein, 2096 aa, synthetic construct
MPAAKRVKLDGGDKKYSIGLDIGTNSVGWAVITDEYKVPSKKFKVLGNTDRHSIKKNLIGALLFDSGETAEATRLKRTARRRYTRRKNRICYLQEIFSNEMAKVDDSFFHRLEESFLVEEDKKHERHPIFGNIVDEVAYHEKYPTIYHLRKKLVDSTDKADLRLIYLALAHMIKFRGHFLIEGDLNPDNSDVDKLFIQLVQTYNQLFEENPINASGVDAKAILSARLSKSRRLENLIAQLPGEKKNGLFGNLIALSLGLTPNFKSNFDLAEDAKLQLSKDTYDDDLDNLLAQIGDQYADLFLAAKNLSDAILLSDILRVNTEITKAPLSASMIKRYDEHHQDLTLLKALVRQQLPEKYKEIFFDQSKNGYAGYIDGGASQEEFYKFIKPILEKMDGTEELLVKLNREDLLRKQRTFDNGSIPHQIHLGELHAILRRQEDFYPFLKDNREKIEKILTFRIPYYVGPLARGNSRFAWMTRKSEETITPWNFEEVVDKGASAQSFIERMTNFDKNLPNEKVLPKHSLLYEYFTVYNELTKVKYVTEGMRKPAFLSGEQKKAIVDLLFKTNRKVTVKQLKEDYFKKIECFDSVEISGVEDRFNASLGTYHDLLKIIKDKDFLDNEENEDILEDIVLTLTLFEDREMIEERLKTYAHLFDDKVMKQLKRRRYTGWGRLSRKLINGIRDKQSGKTILDFLKSDGFANRNFMQLIHDDSLTFKEDIQKAQVSGQGDSLHEHIANLAGSPAIKKGILQTVKVVDELVKVMGRHKPENIVIEMARENQTTQKGQKNSRERMKRIEEGIKELGSQILKEHPVENTQLQNEKLYLYYLQNGRDMYVDQELDINRLSDYDVDHIVPQSFLKDDSIDNKVLTRSDKARGKSDNVPSEEVVKKMKNYWRQLLNAKLITQRKFDNLTKAERGGLSELDKAGFIKRQLVETRQITKHVAQILDSRMNTKYDENDKLIREVKVITLKSKLVSDFRKDFQFYKVREINNYHHAHDAYLNAVVGTALIKKYPKLESEFVYGDYKVYDVRKMIAKSEQEIGKATAKYFFYSNIMNFFKTEITLANGEIRKRPLIETNGETGEIVWDKGRDFATVRKVLSMPQVNIVKKTEVQTGGFSKESILPKRNSDKLIARKKDWDPKKYGGFDSPTVAYSVLVVAKVEKGKSKKLKSVKELLGITIMERSSFEKNPIDFLEAKGYKEVKKDLIIKLPKYSLFELENGRKRMLASAGELQKGNELALPSKYVNFLYLASHYEKLKGSPEDNEQKQLFVEQHKHYLDEIIEQISEFSKRVILADANLDKVLSAYNKHRDKPIREQAENIIHLFTLTNLGAPAAFKYFDTTIDRKRYTSTKEVLDATLIHQSITGLYETRIDLSQLGGDGGGGGGSSEAAAKGGTLNIEDEYRLHETSKEPDVSLGSTWLSDFPQAWAETGGMGLAVRQAPLIIPLKATSTPVSIKQYPMSQEARLGIKPHIQRLLDQGILVPCQSPWNTPLLPVKKPGTNDYRPVQDLREVNKRVEDIHPTVPNPYNLLSGLPPSHQWYTVLDLKDAFFCLRLHPTSQPLFAFEWRDPEMGISGQLTWTRLPQGFKNSPTLFNEALHRDLAGFRIQHPDLILLQYVDDLLLAATSELDCQQGTRALLQTLGDLGYRASAKKAQICQKQVKYLGYLLKEGQRWLTEARKETVMGQPIPKTPRQLREFLGKAGFCRLFIPGFAEMAAPLYPLTKPGTLFNWGPDQQKAFQEIKQALLTAPALGLPDLTKPFELFVDEKQGYAKGVLTQKLGPWRRPVAYLSKKLDPVAAGWPPCLRMVAAIAVLTKDAGKLTMGQPLVILAPHAVEALVKQPPDRWLSNARMTHYQALLLDTDRVQFGPVVALNPATLLPLPEEGLQHDCLDILAEAHGTRSDLMDQPLPDADHTWYTDGSSFLQEGQRKAGAAVTTETEVIWARALPAGTSAQRAELIALTQALKMAEGKKLNVYTDSRYAFATAHIHGEIYRRRGWLTSEGKEIKNKDEILALLKALFLPKRLSIIHCPGHQKGNSAEARGNRMADQAAREVATRETPETSTLLAGKRTADGSEFEKRTADGSEFESPKKKAKVE

SEQ ID NO: 2328 - protein, 2090 aa, synthetic construct
MPAAKRVKLDGGDKKYSIGLDIGTNSVGWAVITDEYKVPSKKFKVLGNTDRHSIKKNLIGALLFDSGETAEATRLKRTARRRYTRRKNRICYLQEIFSNEMAKVDDSFFHRLEESFLVEEDKKHERHPIFGNIVDEVAYHEKYPTIYHLRKKLVDSTDKADLRLIYLALAHMIKFRGHFLIEGDLNPDNSDVDKLFIQLVQTYNQLFEENPINASGVDAKAILSARLSKSRRLENLIAQLPGEKKNGLFGNLIALSLGLTPNFKSNFDLAEDAKLQLSKDTYDDDLDNLLAQIGDQYADLFLAAKNLSDAILLSDILRVNTEITKAPLSASMIKRYDEHHQDLTLLKALVRQQLPEKYKEIFFDQSKNGYAGYIDGGASQEEFYKFIKPILEKMDGTEELLVKLNREDLLRKQRTFDNGSIPHQIHLGELHAILRRQEDFYPFLKDNREKIEKILTFRIPYYVGPLARGNSRFAWMTRKSEETITPWNFEEVVDKGASAQSFIERMTNFDKNLPNEKVLPKHSLLYEYFTVYNELTKVKYVTEGMRKPAFLSGEQKKAIVDLLFKTNRKVTVKQLKEDYFKKIECFDSVEISGVEDRFNASLGTYHDLLKIIKDKDFLDNEENEDILEDIVLTLTLFEDREMIEERLKTYAHLFDDKVMKQLKRRRYTGWGRLSRKLINGIRDKQSGKTILDFLKSDGFANRNFMQLIHDDSLTFKEDIQKAQVSGQGDSLHEHIANLAGSPAIKKGILQTVKVVDELVKVMGRHKPENIVIEMARENQTTQKGQKNSRERMKRIEEGIKELGSQILKEHPVENTQLQNEKLYLYYLQNGRDMYVDQELDINRLSDYDVDHIVPQSFLKDDSIDNKVLTRSDKARGKSDNVPSEEVVKKMKNYWRQLLNAKLITQRKFDNLTKAERGGLSELDKAGFIKRQLVETRQITKHVAQILDSRMNTKYDENDKLIREVKVITLKSKLVSDFRKDFQFYKVREINNYHHAHDAYLNAVVGTALIKKYPKLESEFVYGDYKVYDVRKMIAKSEQEIGKATAKYFFYSNIMNFFKTEITLANGEIRKRPLIETNGETGEIVWDKGRDFATVRKVLSMPQVNIVKKTEVQTGGFSKESILPKRNSDKLIARKKDWDPKKYGGFDSPTVAYSVLVVAKVEKGKSKKLKSVKELLGITIMERSSFEKNPIDFLEAKGYKEVKKDLIIKLPKYSLFELENGRKRMLASAGELQKGNELALPSKYVNFLYLASHYEKLKGSPEDNEQKQLFVEQHKHYLDEIIEQISEFSKRVILADANLDKVLSAYNKHRDKPIREQAENIIHLFTLTNLGAPAAFKYFDTTIDRKRYTSTKEVLDATLIHQSITGLYETRIDLSQLGGDGGEAAAKGGTLNIEDEYRLHETSKEPDVSLGSTWLSDFPQAWAETGGMGLAVRQAPLIIPLKATSTPVSIKQYPMSQEARLGIKPHIQRLLDQGILVPCQSPWNTPLLPVKKPGTNDYRPVQDLREVNKRVEDIHPTVPNPYNLLSGLPPSHQWYTVLDLKDAFFCLRLHPTSQPLFAFEWRDPEMGISGQLTWTRLPQGFKNSPTLFNEALHRDLAGFRIQHPDLILLQYVDDLLLAATSELDCQQGTRALLQTLGDLGYRASAKKAQICQKQVKYLGYLLKEGQRWLTEARKETVMGQPIPKTPRQLREFLGKAGFCRLFIPGFAEMAAPLYPLTKPGTLFNWGPDQQKAFQEIKQALLTAPALGLPDLTKPFELFVDEKQGYAKGVLTQKLGPWRRPVAYLSKKLDPVAAGWPPCLRMVAAIAVLTKDAGKLTMGQPLVILAPHAVEALVKQPPDRWLSNARMTHYQALLLDTDRVQFGPVVALNPATLLPLPEEGLQHDCLDILAEAHGTRSDLMDQPLPDADHTWYTDGSSFLQEGQRKAGAAVTTETEVIWARALPAGTSAQRAELIALTQALKMAEGKKLNVYTDSRYAFATAHIHGEIYRRRGWLTSEGKEIKNKDEILALLKALFLPKRLSIIHCPGHQKGNSAEARGNRMADQAAREVATRETPETSTLLAGKRTADGSEFEKRTADGSEFESPKKKAKVE

SEQ ID NO: 2329 - protein, 2094 aa, synthetic construct
MPAAKRVKLDGGDKKYSIGLDIGTNSVGWAVITDEYKVPSKKFKVLGNTDRHSIKKNLIGALLFDSGETAEATRLKRTARRRYTRRKNRICYLQEIFSNEMAKVDDSFFHRLEESFLVEEDKKHERHPIFGNIVDEVAYHEKYPTIYHLRKKLVDSTDKADLRLIYLALAHMIKFRGHFLIEGDLNPDNSDVDKLFIQLVQTYNQLFEENPINASGVDAKAILSARLSKSRRLENLIAQLPGEKKNGLFGNLIALSLGLTPNFKSNFDLAEDAKLQLSKDTYDDDLDNLLAQIGDQYADLFLAAKNLSDAILLSDILRVNTEITKAPLSASMIKRYDEHHQDLTLLKALVRQQLPEKYKEIFFDQSKNGYAGYIDGGASQEEFYKFIKPILEKMDGTEELLVKLNREDLLRKQRTFDNGSIPHQIHLGELHAILRRQEDFYPFLKDNREKIEKILTFRIPYYVGPLARGNSRFAWMTRKSEETITPWNFEEVVDKGASAQSFIERMTNFDKNLPNEKVLPKHSLLYEYFTVYNELTKVKYVTEGMRKPAFLSGEQKKAIVDLLFKTNRKVTVKQLKEDYFKKIECFDSVEISGVEDRFNASLGTYHDLLKIIKDKDFLDNEENEDILEDIVLTLTLFEDREMIEERLKTYAHLFDDKVMKQLKRRRYTGWGRLSRKLINGIRDKQSGKTILDFLKSDGFANRNFMQLIHDDSLTFKEDIQKAQVSGQGDSLHEHIANLAGSPAIKKGILQTVKVVDELVKVMGRHKPENIVIEMARENQTTQKGQKNSRERMKRIEEGIKELGSQILKEHPVENTQLQNEKLYLYYLQNGRDMYVDQELDINRLSDYDVDHIVPQSFLKDDSIDNKVLTRSDKARGKSDNVPSEEVVKKMKNYWRQLLNAKLITQRKFDNLTKAERGGLSELDKAGFIKRQLVETRQITKHVAQILDSRMNTKYDENDKLIREVKVITLKSKLVSDFRKDFQFYKVREINNYHHAHDAYLNAVVGTALIKKYPKLESEFVYGDYKVYDVRKMIAKSEQEIGKATAKYFFYSNIMNFFKTEITLANGEIRKRPLIETNGETGEIVWDKGRDFATVRKVLSMPQVNIVKKTEVQTGGFSKESILPKRNSDKLIARKKDWDPKKYGGFDSPTVAYSVLVVAKVEKGKSKKLKSVKELLGITIMERSSFEKNPIDFLEAKGYKEVKKDLIIKLPKYSLFELENGRKRMLASAGELQKGNELALPSKYVNFLYLASHYEKLKGSPEDNEQKQLFVEQHKHYLDEIIEQISEFSKRVILADANLDKVLSAYNKHRDKPIREQAENIIHLFTLTNLGAPAAFKYFDTTIDRKRYTSTKEVLDATLIHQSITGLYETRIDLSQLGGDGGGSSPAPGGGGGTLNIEDEYRLHETSKEPDVSLGSTWLSDFPQAWAETGGMGLAVRQAPLIIPLKATSTPVSIKQYPMSQEARLGIKPHIQRLLDQGILVPCQSPWNTPLLPVKKPGTNDYRPVQDLREVNKRVEDIHPTVPNPYNLLSGLPPSHQWYTVLDLKDAFFCLRLHPTSQPLFAFEWRDPEMGISGQLTWTRLPQGFKNSPTLFNEALHRDLAGFRIQHPDLILLQYVDDLLLAATSELDCQQGTRALLQTLGDLGYRASAKKAQICQKQVKYLGYLLKEGQRWLTEARKETVMGQPIPKTPRQLREFLGKAGFCRLFIPGFAEMAAPLYPLTKPGTLFNWGPDQQKAFQEIKQALLTAPALGLPDLTKPFELFVDEKQGYAKGVLTQKLGPWRRPVAYLSKKLDPVAAGWPPCLRMVAAIAVLTKDAGKLTMGQPLVILAPHAVEALVKQPPDRWLSNARMTHYQALLLDTDRVQFGPVVALNPATLLPLPEEGLQHDCLDILAEAHGTRSDLMDQPLPDADHTWYTDGSSFLQEGQRKAGAAVTTETEVIWARALPAGTSAQRAELIALTQALKMAEGKKLNVYTDSRYAFATAHIHGEIYRRRGWLTSEGKEIKNKDEILALLKALFLPKRLSIIHCPGHQKGNSAEARGNRMADQAAREVATRETPETSTLLAGKRTADGSEFEKRTADGSEFESPKKKAKVE

SEQ ID NO: 2330 - protein, 2088 aa, synthetic construct
MPAAKRVKLDGGDKKYSIGLDIGTNSVGWAVITDEYKVPSKKFKVLGNTDRHSIKKNLIGALLFDSGETAEATRLKRTARRRYTRRKNRICYLQEIFSNEMAKVDDSFFHRLEESFLVEEDKKHERHPIFGNIVDEVAYHEKYPTIYHLRKKLVDSTDKADLRLIYLALAHMIKFRGHFLIEGDLNPDNSDVDKLFIQLVQTYNQLFEENPINASGVDAKAILSARLSKSRRLENLIAQLPGEKKNGLFGNLIALSLGLTPNFKSNFDLAEDAKLQLSKDTYDDDLDNLLAQIGDQYADLFLAAKNLSDAILLSDILRVNTEITKAPLSASMIKRYDEHHQDLTLLKALVRQQLPEKYKEIFFDQSKNGYAGYIDGGASQEEFYKFIKPILEKMDGTEELLVKLNREDLLRKQRTFDNGSIPHQIHLGELHAILRRQEDFYPFLKDNREKIEKILTFRIPYYVGPLARGNSRFAWMTRKSEETITPWNFEEVVDKGASAQSFIERMTNFDKNLPNEKVLPKHSLLYEYFTVYNELTKVKYVTEGMRKPAFLSGEQKKAIVDLLFKTNRKVTVKQLKEDYFKKIECFDSVEISGVEDRFNASLGTYHDLLKIIKDKDFLDNEENEDILEDIVLTLTLFEDREMIEERLKTYAHLFDDKVMKQLKRRRYTGWGRLSRKLINGIRDKQSGKTILDFLKSDGFANRNFMQLIHDDSLTFKEDIQKAQVSGQGDSLHEHIANLAGSPAIKKGILQTVKVVDELVKVMGRHKPENIVIEMARENQTTQKGQKNSRERMKRIEEGIKELGSQILKEHPVENTQLQNEKLYLYYLQNGRDMYVDQELDINRLSDYDVDHIVPQSFLKDDSIDNKVLTRSDKARGKSDNVPSEEVVKKMKNYWRQLLNAKLITQRKFDNLTKAERGGLSELDKAGFIKRQLVETRQITKHVAQILDSRMNTKYDENDKLIREVKVITLKSKLVSDFRKDFQFYKVREINNYHHAHDAYLNAVVGTALIKKYPKLESEFVYGDYKVYDVRKMIAKSEQEIGKATAKYFFYSNIMNFFKTEITLANGEIRKRPLIETNGETGEIVWDKGRDFATVRKVLSMPQVNIVKKTEVQTGGFSKESILPKRNSDKLIARKKDWDPKKYGGFDSPTVAYSVLVVAKVEKGKSKKLKSVKELLGITIMERSSFEKNPIDFLEAKGYKEVKKDLIIKLPKYSLFELENGRKRMLASAGELQKGNELALPSKYVNFLYLASHYEKLKGSPEDNEQKQLFVEQHKHYLDEIIEQISEFSKRVILADANLDKVLSAYNKHRDKPIREQAENIIHLFTLTNLGAPAAFKYFDTTIDRKRYTSTKEVLDATLIHQSITGLYETRIDLSQLGGDGGGSSGGTLNIEDEYRLHETSKEPDVSLGSTWLSDFPQAWAETGGMGLAVRQAPLIIPLKATSTPVSIKQYPMSQEARLGIKPHIQRLLDQGILVPCQSPWNTPLLPVKKPGTNDYRPVQDLREVNKRVEDIHPTVPNPYNLLSGLPPSHQWYTVLDLKDAFFCLRLHPTSQPLFAFEWRDPEMGISGQLTWTRLPQGFKNSPTLFNEALHRDLAGFRIQHPDLILLQYVDDLLLAATSELDCQQGTRALLQTLGDLGYRASAKKAQICQKQVKYLGYLLKEGQRWLTEARKETVMGQPIPKTPRQLREFLGKAGFCRLFIPGFAEMAAPLYPLTKPGTLFNWGPDQQKAFQEIKQALLTAPALGLPDLTKPFELFVDEKQGYAKGVLTQKLGPWRRPVAYLSKKLDPVAAGWPPCLRMVAAIAVLTKDAGKLTMGQPLVILAPHAVEALVKQPPDRWLSNARMTHYQALLLDTDRVQFGPVVALNPATLLPLPEEGLQHDCLDILAEAHGTRSDLMDQPLPDADHTWYTDGSSFLQEGQRKAGAAVTTETEVIWARALPAGTSAQRAELIALTQALKMAEGKKLNVYTDSRYAFATAHIHGEIYRRRGWLTSEGKEIKNKDEILALLKALFLPKRLSIIHCPGHQKGNSAEARGNRMADQAAREVATRETPETSTLLAGKRTADGSEFEKRTADGSEFESPKKKAKVE

SEQ ID NO: 2331 - protein, 2094 aa, synthetic construct
MPAAKRVKLDGGDKKYSIGLDIGTNSVGWAVITDEYKVPSKKFKVLGNTDRHSIKKNLIGALLFDSGETAEATRLKRTARRRYTRRKNRICYLQEIFSNEMAKVDDSFFHRLEESFLVEEDKKHERHPIFGNIVDEVAYHEKYPTIYHLRKKLVDSTDKADLRLIYLALAHMIKFRGHFLIEGDLNPDNSDVDKLFIQLVQTYNQLFEENPINASGVDAKAILSARLSKSRRLENLIAQLPGEKKNGLFGNLIALSLGLTPNFKSNFDLAEDAKLQLSKDTYDDDLDNLLAQIGDQYADLFLAAKNLSDAILLSDILRVNTEITKAPLSASMIKRYDEHHQDLTLLKALVRQQLPEKYKEIFFDQSKNGYAGYIDGGASQEEFYKFIKPILEKMDGTEELLVKLNREDLLRKQRTFDNGSIPHQIHLGELHAILRRQEDFYPFLKDNREKIEKILTFRIPYYVGPLARGNSRFAWMTRKSEETITPWNFEEVVDKGASAQSFIERMTNFDKNLPNEKVLPKHSLLYEYFTVYNELTKVKYVTEGMRKPAFLSGEQKKAIVDLLFKTNRKVTVKQLKEDYFKKIECFDSVEISGVEDRFNASLGTYHDLLKIIKDKDFLDNEENEDILEDIVLTLTLFEDREMIEERLKTYAHLFDDKVMKQLKRRRYTGWGRLSRKLINGIRDKQSGKTILDFLKSDGFANRNFMQLIHDDSLTFKEDIQKAQVSGQGDSLHEHIANLAGSPAIKKGILQTVKVVDELVKVMGRHKPENIVIEMARENQTTQKGQKNSRERMKRIEEGIKELGSQILKEHPVENTQLQNEKLYLYYLQNGRDMYVDQELDINRLSDYDVDHIVPQSFLKDDSIDNKVLTRSDKARGKSDNVPSEEVVKKMKNYWRQLLNAKLITQRKFDNLTKAERGGLSELDKAGFIKRQLVETRQITKHVAQILDSRMNTKYDENDKLIREVKVITLKSKLVSDFRKDFQFYKVREINNYHHAHDAYLNAVVGTALIKKYPKLESEFVYGDYKVYDVRKMIAKSEQEIGKATAKYFFYSNIMNFFKTEITLANGEIRKRPLIETNGETGEIVWDKGRDFATVRKVLSMPQVNIVKKTEVQTGGFSKESILPKRNSDKLIARKKDWDPKKYGGFDSPTVAYSVLVVAKVEKGKSKKLKSVKELLGITIMERSSFEKNPIDFLEAKGYKEVKKDLIIKLPKYSLFELENGRKRMLASAGELQKGNELALPSKYVNFLYLASHYEKLKGSPEDNEQKQLFVEQHKHYLDEIIEQISEFSKRVILADANLDKVLSAYNKHRDKPIREQAENIIHLFTLTNLGAPAAFKYFDTTIDRKRYTSTKEVLDATLIHQSITGLYETRIDLSQLGGDGGGGSGSSGGGGGTLNIEDEYRLHETSKEPDVSLGSTWLSDFPQAWAETGGMGLAVRQAPLIIPLKATSTPVSIKQYPMSQEARLGIKPHIQRLLDQGILVPCQSPWNTPLLPVKKPGTNDYRPVQDLREVNKRVEDIHPTVPNPYNLLSGLPPSHQWYTVLDLKDAFFCLRLHPTSQPLFAFEWRDPEMGISGQLTWTRLPQGFKNSPTLFNEALHRDLAGFRIQHPDLILLQYVDDLLLAATSELDCQQGTRALLQTLGDLGYRASAKKAQICQKQVKYLGYLLKEGQRWLTEARKETVMGQPIPKTPRQLREFLGKAGFCRLFIPGFAEMAAPLYPLTKPGTLFNWGPDQQKAFQEIKQALLTAPALGLPDLTKPFELFVDEKQGYAKGVLTQKLGPWRRPVAYLSKKLDPVAAGWPPCLRMVAAIAVLTKDAGKLTMGQPLVILAPHAVEALVKQPPDRWLSNARMTHYQALLLDTDRVQFGPVVALNPATLLPLPEEGLQHDCLDILAEAHGTRSDLMDQPLPDADHTWYTDGSSFLQEGQRKAGAAVTTETEVIWARALPAGTSAQRAELIALTQALKMAEGKKLNVYTDSRYAFATAHIHGEIYRRRGWLTSEGKEIKNKDEILALLKALFLPKRLSIIHCPGHQKGNSAEARGNRMADQAAREVATRETPETSTLLAGKRTADGSEFEKRTADGSEFESPKKKAKVE

SEQ ID NO: 2332 - protein, 2096 aa, synthetic construct
MPAAKRVKLDGGDKKYSIGLDIGTNSVGWAVITDEYKVPSKKFKVLGNTDRHSIKKNLIGALLFDSGETAEATRLKRTARRRYTRRKNRICYLQEIFSNEMAKVDDSFFHRLEESFLVEEDKKHERHPIFGNIVDEVAYHEKYPTIYHLRKKLVDSTDKADLRLIYLALAHMIKFRGHFLIEGDLNPDNSDVDKLFIQLVQTYNQLFEENPINASGVDAKAILSARLSKSRRLENLIAQLPGEKKNGLFGNLIALSLGLTPNFKSNFDLAEDAKLQLSKDTYDDDLDNLLAQIGDQYADLFLAAKNLSDAILLSDILRVNTEITKAPLSASMIKRYDEHHQDLTLLKALVRQQLPEKYKEIFFDQSKNGYAGYIDGGASQEEFYKFIKPILEKMDGTEELLVKLNREDLLRKQRTFDNGSIPHQIHLGELHAILRRQEDFYPFLKDNREKIEKILTFRIPYYVGPLARGNSRFAWMTRKSEETITPWNFEEVVDKGASAQSFIERMTNFDKNLPNEKVLPKHSLLYEYFTVYNELTKVKYVTEGMRKPAFLSGEQKKAIVDLLFKTNRKVTVKQLKEDYFKKIECFDSVEISGVEDRFNASLGTYHDLLKIIKDKDFLDNEENEDILEDIVLTLTLFEDREMIEERLKTYAHLFDDKVMKQLKRRRYTGWGRLSRKLINGIRDKQSGKTILDFLKSDGFANRNFMQLIHDDSLTFKEDIQKAQVSGQGDSLHEHIANLAGSPAIKKGILQTVKVVDELVKVMGRHKPENIVIEMARENQTTQKGQKNSRERMKRIEEGIKELGSQILKEHPVENTQLQNEKLYLYYLQNGRDMYVDQELDINRLSDYDVDHIVPQSFLKDDSIDNKVLTRSDKARGKSDNVPSEEVVKKMKNYWRQLLNAKLITQRKFDNLTKAERGGLSELDKAGFIKRQLVETRQITKHVAQILDSRMNTKYDENDKLIREVKVITLKSKLVSDFRKDFQFYKVREINNYHHAHDAYLNAVVGTALIKKYPKLESEFVYGDYKVYDVRKMIAKSEQEIGKATAKYFFYSNIMNFFKTEITLANGEIRKRPLIETNGETGEIVWDKGRDFATVRKVLSMPQVNIVKKTEVQTGGFSKESILPKRNSDKLIARKKDWDPKKYGGFDSPTVAYSVLVVAKVEKGKSKKLKSVKELLGITIMERSSFEKNPIDFLEAKGYKEVKKDLIIKLPKYSLFELENGRKRMLASAGELQKGNELALPSKYVNFLYLASHYEKLKGSPEDNEQKQLFVEQHKHYLDEIIEQISEFSKRVILADANLDKVLSAYNKHRDKPIREQAENIIHLFTLTNLGAPAAFKYFDTTIDRKRYTSTKEVLDATLIHQSITGLYETRIDLSQLGGDGGPAPGGSEAAAKGGTLNIEDEYRLHETSKEPDVSLGSTWLSDFPQAWAETGGMGLAVRQAPLIIPLKATSTPVSIKQYPMSQEARLGIKPHIQRLLDQGILVPCQSPWNTPLLPVKKPGTNDYRPVQDLREVNKRVEDIHPTVPNPYNLLSGLPPSHQWYTVLDLKDAFFCLRLHPTSQPLFAFEWRDPEMGISGQLTWTRLPQGFKNSPTLFNEALHRDLAGFRIQHPDLILLQYVDDLLLAATSELDCQQGTRALLQTLGDLGYRASAKKAQICQKQVKYLGYLLKEGQRWLTEARKETVMGQPIPKTPRQLREFLGKAGFCRLFIPGFAEMAAPLYPLTKPGTLFNWGPDQQKAFQEIKQALLTAPALGLPDLTKPFELFVDEKQGYAKGVLTQKLGPWRRPVAYLSKKLDPVAAGWPPCLRMVAAIAVLTKDAGKLTMGQPLVILAPHAVEALVKQPPDRWLSNARMTHYQALLLDTDRVQFGPVVALNPATLLPLPEEGLQHDCLDILAEAHGTRSDLMDQPLPDADHTWYTDGSSFLQEGQRKAGAAVTTETEVIWARALPAGTSAQRAELIALTQALKMAEGKKLNVYTDSRYAFATAHIHGEIYRRRGWLTSEGKEIKNKDEILALLKALFLPKRLSIIHCPGHQKGNSAEARGNRMADQAAREVATRETPETSTLLAGKRTADGSEFEKRTADGSEFESPKKKAKVE

SEQ ID NO: 2333 - protein, 2100 aa, synthetic construct
MPAAKRVKLDGGDKKYSIGLDIGTNSVGWAVITDEYKVPSKKFKVLGNTDRHSIKKNLIGALLFDSGETAEATRLKRTARRRYTRRKNRICYLQEIFSNEMAKVDDSFFHRLEESFLVEEDKKHERHPIFGNIVDEVAYHEKYPTIYHLRKKLVDSTDKADLRLIYLALAHMIKFRGHFLIEGDLNPDNSDVDKLFIQLVQTYNQLFEENPINASGVDAKAILSARLSKSRRLENLIAQLPGEKKNGLFGNLIALSLGLTPNFKSNFDLAEDAKLQLSKDTYDDDLDNLLAQIGDQYADLFLAAKNLSDAILLSDILRVNTEITKAPLSASMIKRYDEHHQDLTLLKALVRQQLPEKYKEIFFDQSKNGYAGYIDGGASQEEFYKFIKPILEKMDGTEELLVKLNREDLLRKQRTFDNGSIPHQIHLGELHAILRRQEDFYPFLKDNREKIEKILTFRIPYYVGPLARGNSRFAWMTRKSEETITPWNFEEVVDKGASAQSFIERMTNFDKNLPNEKVLPKHSLLYEYFTVYNELTKVKYVTEGMRKPAFLSGEQKKAIVDLLFKTNRKVTVKQLKEDYFKKIECFDSVEISGVEDRFNASLGTYHDLLKIIKDKDFLDNEENEDILEDIVLTLTLFEDREMIEERLKTYAHLFDDKVMKQLKRRRYTGWGRLSRKLINGIRDKQSGKTILDFLKSDGFANRNFMQLIHDDSLTFKEDIQKAQVSGQGDSLHEHIANLAGSPAIKKGILQTVKVVDELVKVMGRHKPENIVIEMARENQTTQKGQKNSRERMKRIEEGIKELGSQILKEHPVENTQLQNEKLYLYYLQNGRDMYVDQELDINRLSDYDVDHIVPQSFLKDDSIDNKVLTRSDKARGKSDNVPSEEVVKKMKNYWRQLLNAKLITQRKFDNLTKAERGGLSELDKAGFIKRQLVETRQITKHVAQILDSRMNTKYDENDKLIREVKVITLKSKLVSDFRKDFQFYKVREINNYHHAHDAYLNAVVGTALIKKYPKLESEFVYGDYKVYDVRKMIAKSEQEIGKATAKYFFYSNIMNFFKTEITLANGEIRKRPLIETNGETGEIVWDKGRDFATVRKVLSMPQVNIVKKTEVQTGGFSKESILPKRNSDKLIARKKDWDPKKYGGFDSPTVAYSVLVVAKVEKGKSKKLKSVKELLGITIMERSSFEKNPIDFLEAKGYKEVKKDLIIKLPKYSLFELENGRKRMLASAGELQKGNELALPSKYVNFLYLASHYEKLKGSPEDNEQKQLFVEQHKHYLDEIIEQISEFSKRVILADANLDKVLSAYNKHRDKPIREQAENIIHLFTLTNLGAPAAFKYFDTTIDRKRYTSTKEVLDATLIHQSITGLYETRIDLSQLGGDGGGGGGSGGGGSGGGGSGGTLNIEDEYRLHETSKEPDVSLGSTWLSDFPQAWAETGGMGLAVRQAPLIIPLKATSTPVSIKQYPMSQEARLGIKPHIQRLLDQGILVPCQSPWNTPLLPVKKPGTNDYRPVQDLREVNKRVEDIHPTVPNPYNLLSGLPPSHQWYTVLDLKDAFFCLRLHPTSQPLFAFEWRDPEMGISGQLTWTRLPQGFKNSPTLFNEALHRDLAGFRIQHPDLILLQYVDDLLLAATSELDCQQGTRALLQTLGDLGYRASAKKAQICQKQVKYLGYLLKEGQRWLTEARKETVMGQPIPKTPRQLREFLGKAGFCRLFIPGFAEMAAPLYPLTKPGTLFNWGPDQQKAFQEIKQALLTAPALGLPDLTKPFELFVDEKQGYAKGVLTQKLGPWRRPVAYLSKKLDPVAAGWPPCLRMVAAIAVLTKDAGKLTMGQPLVILAPHAVEALVKQPPDRWLSNARMTHYQALLLDTDRVQFGPVVALNPATLLPLPEEGLQHDCLDILAEAHGTRSDLMDQPLPDADHTWYTDGSSFLQEGQRKAGAAVTTETEVIWARALPAGTSAQRAELIALTQALKMAEGKKLNVYTDSRYAFATAHIHGEIYRRRGWLTSEGKEIKNKDEILALLKALFLPKRLSIIHCPGHQKGNSAEARGNRMADQAAREVATRETPETSTLLAGKRTADGSEFEKRTADGSEFESPKKKAKVE

SEQ ID NO: 2334 - protein, 2096 aa, synthetic construct
MPAAKRVKLDGGDKKYSIGLDIGTNSVGWAVITDEYKVPSKKFKVLGNTDRHSIKKNLIGALLFDSGETAEATRLKRTARRRYTRRKNRICYLQEIFSNEMAKVDDSFFHRLEESFLVEEDKKHERHPIFGNIVDEVAYHEKYPTIYHLRKKLVDSTDKADLRLIYLALAHMIKFRGHFLIEGDLNPDNSDVDKLFIQLVQTYNQLFEENPINASGVDAKAILSARLSKSRRLENLIAQLPGEKKNGLFGNLIALSLGLTPNFKSNFDLAEDAKLQLSKDTYDDDLDNLLAQIGDQYADLFLAAKNLSDAILLSDILRVNTEITKAPLSASMIKRYDEHHQDLTLLKALVRQQLPEKYKEIFFDQSKNGYAGYIDGGASQEEFYKFIKPILEKMDGTEELLVKLNREDLLRKQRTFDNGSIPHQIHLGELHAILRRQEDFYPFLKDNREKIEKILTFRIPYYVGPLARGNSRFAWMTRKSEETITPWNFEEVVDKGASAQSFIERMTNFDKNLPNEKVLPKHSLLYEYFTVYNELTKVKYVTEGMRKPAFLSGEQKKAIVDLLFKTNRKVTVKQLKEDYFKKIECFDSVEISGVEDRFNASLGTYHDLLKIIKDKDFLDNEENEDILEDIVLTLTLFEDREMIEERLKTYAHLFDDKVMKQLKRRRYTGWGRLSRKLINGIRDKQSGKTILDFLKSDGFANRNFMQLIHDDSLTFKEDIQKAQVSGQGDSLHEHIANLAGSPAIKKGILQTVKVVDELVKVMGRHKPENIVIEMARENQTTQKGQKNSRERMKRIEEGIKELGSQILKEHPVENTQLQNEKLYLYYLQNGRDMYVDQELDINRLSDYDVDHIVPQSFLKDDSIDNKVLTRSDKARGKSDNVPSEEVVKKMKNYWRQLLNAKLITQRKFDNLTKAERGGLSELDKAGFIKRQLVETRQITKHVAQILDSRMNTKYDENDKLIREVKVITLKSKLVSDFRKDFQFYKVREINNYHHAHDAYLNAVVGTALIKKYPKLESEFVYGDYKVYDVRKMIAKSEQEIGKATAKYFFYSNIMNFFKTEITLANGEIRKRPLIETNGETGEIVWDKGRDFATVRKVLSMPQVNIVKKTEVQTGGFSKESILPKRNSDKLIARKKDWDPKKYGGFDSPTVAYSVLVVAKVEKGKSKKLKSVKELLGITIMERSSFEKNPIDFLEAKGYKEVKKDLIIKLPKYSLFELENGRKRMLASAGELQKGNELALPSKYVNFLYLASHYEKLKGSPEDNEQKQLFVEQHKHYLDEIIEQISEFSKRVILADANLDKVLSAYNKHRDKPIREQAENIIHLFTLTNLGAPAAFKYFDTTIDRKRYTSTKEVLDATLIHQSITGLYETRIDLSQLGGDGGEAAAKGGSGGGGGTLNIEDEYRLHETSKEPDVSLGSTWLSDFPQAWAETGGMGLAVRQAPLIIPLKATSTPVSIKQYPMSQEARLGIKPHIQRLLDQGILVPCQSPWNTPLLPVKKPGTNDYRPVQDLREVNKRVEDIHPTVPNPYNLLSGLPPSHQWYTVLDLKDAFFCLRLHPTSQPLFAFEWRDPEMGISGQLTWTRLPQGFKNSPTLFNEALHRDLAGFRIQHPDLILLQYVDDLLLAATSELDCQQGTRALLQTLGDLGYRASAKKAQICQKQVKYLGYLLKEGQRWLTEARKETVMGQPIPKTPRQLREFLGKAGFCRLFIPGFAEMAAPLYPLTKPGTLFNWGPDQQKAFQEIKQALLTAPALGLPDLTKPFELFVDEKQGYAKGVLTQKLGPWRRPVAYLSKKLDPVAAGWPPCLRMVAAIAVLTKDAGKLTMGQPLVILAPHAVEALVKQPPDRWLSNARMTHYQALLLDTDRVQFGPVVALNPATLLPLPEEGLQHDCLDILAEAHGTRSDLMDQPLPDADHTWYTDGSSFLQEGQRKAGAAVTTETEVIWARALPAGTSAQRAELIALTQALKMAEGKKLNVYTDSRYAFATAHIHGEIYRRRGWLTSEGKEIKNKDEILALLKALFLPKRLSIIHCPGHQKGNSAEARGNRMADQAAREVATRETPETSTLLAGKRTADGSEFEKRTADGSEFESPKKKAKVE

SEQ ID NO: 2335 - protein, 2091 aa, synthetic construct
MPAAKRVKLDGGDKKYSIGLDIGTNSVGWAVITDEYKVPSKKFKVLGNTDRHSIKKNLIGALLFDSGETAEATRLKRTARRRYTRRKNRICYLQEIFSNEMAKVDDSFFHRLEESFLVEEDKKHERHPIFGNIVDEVAYHEKYPTIYHLRKKLVDSTDKADLRLIYLALAHMIKFRGHFLIEGDLNPDNSDVDKLFIQLVQTYNQLFEENPINASGVDAKAILSARLSKSRRLENLIAQLPGEKKNGLFGNLIALSLGLTPNFKSNFDLAEDAKLQLSKDTYDDDLDNLLAQIGDQYADLFLAAKNLSDAILLSDILRVNTEITKAPLSASMIKRYDEHHQDLTLLKALVRQQLPEKYKEIFFDQSKNGYAGYIDGGASQEEFYKFIKPILEKMDGTEELLVKLNREDLLRKQRTFDNGSIPHQIHLGELHAILRRQEDFYPFLKDNREKIEKILTFRIPYYVGPLARGNSRFAWMTRKSEETITPWNFEEVVDKGASAQSFIERMTNFDKNLPNEKVLPKHSLLYEYFTVYNELTKVKYVTEGMRKPAFLSGEQKKAIVDLLFKTNRKVTVKQLKEDYFKKIECFDSVEISGVEDRFNASLGTYHDLLKIIKDKDFLDNEENEDILEDIVLTLTLFEDREMIEERLKTYAHLFDDKVMKQLKRRRYTGWGRLSRKLINGIRDKQSGKTILDFLKSDGFANRNFMQLIHDDSLTFKEDIQKAQVSGQGDSLHEHIANLAGSPAIKKGILQTVKVVDELVKVMGRHKPENIVIEMARENQTTQKGQKNSRERMKRIEEGIKELGSQILKEHPVENTQLQNEKLYLYYLQNGRDMYVDQELDINRLSDYDVDHIVPQSFLKDDSIDNKVLTRSDKARGKSDNVPSEEVVKKMKNYWRQLLNAKLITQRKFDNLTKAERGGLSELDKAGFIKRQLVETRQITKHVAQILDSRMNTKYDENDKLIREVKVITLKSKLVSDFRKDFQFYKVREINNYHHAHDAYLNAVVGTALIKKYPKLESEFVYGDYKVYDVRKMIAKSEQEIGKATAKYFFYSNIMNFFKTEITLANGEIRKRPLIETNGETGEIVWDKGRDFATVRKVLSMPQVNIVKKTEVQTGGFSKESILPKRNSDKLIARKKDWDPKKYGGFDSPTVAYSVLVVAKVEKGKSKKLKSVKELLGITIMERSSFEKNPIDFLEAKGYKEVKKDLIIKLPKYSLFELENGRKRMLASAGELQKGNELALPSKYVNFLYLASHYEKLKGSPEDNEQKQLFVEQHKHYLDEIIEQISEFSKRVILADANLDKVLSAYNKHRDKPIREQAENIIHLFTLTNLGAPAAFKYFDTTIDRKRYTSTKEVLDATLIHQSITGLYETRIDLSQLGGDGGGGSGGGGGTLNIEDEYRLHETSKEPDVSLGSTWLSDFPQAWAETGGMGLAVRQAPLIIPLKATSTPVSIKQYPMSQEARLGIKPHIQRLLDQGILVPCQSPWNTPLLPVKKPGTNDYRPVQDLREVNKRVEDIHPTVPNPYNLLSGLPPSHQWYTVLDLKDAFFCLRLHPTSQPLFAFEWRDPEMGISGQLTWTRLPQGFKNSPTLFNEALHRDLAGFRIQHPDLILLQYVDDLLLAATSELDCQQGTRALLQTLGDLGYRASAKKAQICQKQVKYLGYLLKEGQRWLTEARKETVMGQPIPKTPRQLREFLGKAGFCRLFIPGFAEMAAPLYPLTKPGTLFNWGPDQQKAFQEIKQALLTAPALGLPDLTKPFELFVDEKQGYAKGVLTQKLGPWRRPVAYLSKKLDPVAAGWPPCLRMVAAIAVLTKDAGKLTMGQPLVILAPHAVEALVKQPPDRWLSNARMTHYQALLLDTDRVQFGPVVALNPATLLPLPEEGLQHDCLDILAEAHGTRSDLMDQPLPDADHTWYTDGSSFLQEGQRKAGAAVTTETEVIWARALPAGTSAQRAELIALTQALKMAEGKKLNVYTDSRYAFATAHIHGEIYRRRGWLTSEGKEIKNKDEILALLKALFLPKRLSIIHCPGHQKGNSAEARGNRMADQAAREVATRETPETSTLLAGKRTADGSEFEKRTADGSEFESPKKKAKVE

SEQ ID NO: 2336 - protein, 2091 aa, synthetic construct
MPAAKRVKLDGGDKKYSIGLDIGTNSVGWAVITDEYKVPSKKFKVLGNTDRHSIKKNLIGALLFDSGETAEATRLKRTARRRYTRRKNRICYLQEIFSNEMAKVDDSFFHRLEESFLVEEDKKHERHPIFGNIVDEVAYHEKYPTIYHLRKKLVDSTDKADLRLIYLALAHMIKFRGHFLIEGDLNPDNSDVDKLFIQLVQTYNQLFEENPINASGVDAKAILSARLSKSRRLENLIAQLPGEKKNGLFGNLIALSLGLTPNFKSNFDLAEDAKLQLSKDTYDDDLDNLLAQIGDQYADLFLAAKNLSDAILLSDILRVNTEITKAPLSASMIKRYDEHHQDLTLLKALVRQQLPEKYKEIFFDQSKNGYAGYIDGGASQEEFYKFIKPILEKMDGTEELLVKLNREDLLRKQRTFDNGSIPHQIHLGELHAILRRQEDFYPFLKDNREKIEKILTFRIPYYVGPLARGNSRFAWMTRKSEETITPWNFEEVVDKGASAQSFIERMTNFDKNLPNEKVLPKHSLLYEYFTVYNELTKVKYVTEGMRKPAFLSGEQKKAIVDLLFKTNRKVTVKQLKEDYFKKIECFDSVEISGVEDRFNASLGTYHDLLKIIKDKDFLDNEENEDILEDIVLTLTLFEDREMIEERLKTYAHLFDDKVMKQLKRRRYTGWGRLSRKLINGIRDKQSGKTILDFLKSDGFANRNFMQLIHDDSLTFKEDIQKAQVSGQGDSLHEHIANLAGSPAIKKGILQTVKVVDELVKVMGRHKPENIVIEMARENQTTQKGQKNSRERMKRIEEGIKELGSQILKEHPVENTQLQNEKLYLYYLQNGRDMYVDQELDINRLSDYDVDHIVPQSFLKDDSIDNKVLTRSDKARGKSDNVPSEEVVKKMKNYWRQLLNAKLITQRKFDNLTKAERGGLSELDKAGFIKRQLVETRQITKHVAQILDSRMNTKYDENDKLIREVKVITLKSKLVSDFRKDFQFYKVREINNYHHAHDAYLNAVVGTALIKKYPKLESEFVYGDYKVYDVRKMIAKSEQEIGKATAKYFFYSNIMNFFKTEITLANGEIRKRPLIETNGETGEIVWDKGRDFATVRKVLSMPQVNIVKKTEVQTGGFSKESILPKRNSDKLIARKKDWDPKKYGGFDSPTVAYSVLVVAKVEKGKSKKLKSVKELLGITIMERSSFEKNPIDFLEAKGYKEVKKDLIIKLPKYSLFELENGRKRMLASAGELQKGNELALPSKYVNFLYLASHYEKLKGSPEDNEQKQLFVEQHKHYLDEIIEQISEFSKRVILADANLDKVLSAYNKHRDKPIREQAENIIHLFTLTNLGAPAAFKYFDTTIDRKRYTSTKEVLDATLIHQSITGLYETRIDLSQLGGDGGPAPGSSGGTLNIEDEYRLHETSKEPDVSLGSTWLSDFPQAWAETGGMGLAVRQAPLIIPLKATSTPVSIKQYPMSQEARLGIKPHIQRLLDQGILVPCQSPWNTPLLPVKKPGTNDYRPVQDLREVNKRVEDIHPTVPNPYNLLSGLPPSHQWYTVLDLKDAFFCLRLHPTSQPLFAFEWRDPEMGISGQLTWTRLPQGFKNSPTLFNEALHRDLAGFRIQHPDLILLQYVDDLLLAATSELDCQQGTRALLQTLGDLGYRASAKKAQICQKQVKYLGYLLKEGQRWLTEARKETVMGQPIPKTPRQLREFLGKAGFCRLFIPGFAEMAAPLYPLTKPGTLFNWGPDQQKAFQEIKQALLTAPALGLPDLTKPFELFVDEKQGYAKGVLTQKLGPWRRPVAYLSKKLDPVAAGWPPCLRMVAAIAVLTKDAGKLTMGQPLVILAPHAVEALVKQPPDRWLSNARMTHYQALLLDTDRVQFGPVVALNPATLLPLPEEGLQHDCLDILAEAHGTRSDLMDQPLPDADHTWYTDGSSFLQEGQRKAGAAVTTETEVIWARALPAGTSAQRAELIALTQALKMAEGKKLNVYTDSRYAFATAHIHGEIYRRRGWLTSEGKEIKNKDEILALLKALFLPKRLSIIHCPGHQKGNSAEARGNRMADQAAREVATRETPETSTLLAGKRTADGSEFEKRTADGSEFESPKKKAKVE

SEQ ID NO: 2337 - protein, 2093 aa, synthetic construct
MPAAKRVKLDGGDKKYSIGLDIGTNSVGWAVITDEYKVPSKKFKVLGNTDRHSIKKNLIGALLFDSGETAEATRLKRTARRRYTRRKNRICYLQEIFSNEMAKVDDSFFHRLEESFLVEEDKKHERHPIFGNIVDEVAYHEKYPTIYHLRKKLVDSTDKADLRLIYLALAHMIKFRGHFLIEGDLNPDNSDVDKLFIQLVQTYNQLFEENPINASGVDAKAILSARLSKSRRLENLIAQLPGEKKNGLFGNLIALSLGLTPNFKSNFDLAEDAKLQLSKDTYDDDLDNLLAQIGDQYADLFLAAKNLSDAILLSDILRVNTEITKAPLSASMIKRYDEHHQDLTLLKALVRQQLPEKYKEIFFDQSKNGYAGYIDGGASQEEFYKFIKPILEKMDGTEELLVKLNREDLLRKQRTFDNGSIPHQIHLGELHAILRRQEDFYPFLKDNREKIEKILTFRIPYYVGPLARGNSRFAWMTRKSEETITPWNFEEVVDKGASAQSFIERMTNFDKNLPNEKVLPKHSLLYEYFTVYNELTKVKYVTEGMRKPAFLSGEQKKAIVDLLFKTNRKVTVKQLKEDYFKKIECFDSVEISGVEDRFNASLGTYHDLLKIIKDKDFLDNEENEDILEDIVLTLTLFEDREMIEERLKTYAHLFDDKVMKQLKRRRYTGWGRLSRKLINGIRDKQSGKTILDFLKSDGFANRNFMQLIHDDSLTFKEDIQKAQVSGQGDSLHEHIANLAGSPAIKKGILQTVKVVDELVKVMGRHKPENIVIEMARENQTTQKGQKNSRERMKRIEEGIKELGSQILKEHPVENTQLQNEKLYLYYLQNGRDMYVDQELDINRLSDYDVDHIVPQSFLKDDSIDNKVLTRSDKARGKSDNVPSEEVVKKMKNYWRQLLNAKLITQRKFDNLTKAERGGLSELDKAGFIKRQLVETRQITKHVAQILDSRMNTKYDENDKLIREVKVITLKSKLVSDFRKDFQFYKVREINNYHHAHDAYLNAVVGTALIKKYPKLESEFVYGDYKVYDVRKMIAKSEQEIGKATAKYFFYSNIMNFFKTEITLANGEIRKRPLIETNGETGEIVWDKGRDFATVRKVLSMPQVNIVKKTEVQTGGFSKESILPKRNSDKLIARKKDWDPKKYGGFDSPTVAYSVLVVAKVEKGKSKKLKSVKELLGITIMERSSFEKNPIDFLEAKGYKEVKKDLIIKLPKYSLFELENGRKRMLASAGELQKGNELALPSKYVNFLYLASHYEKLKGSPEDNEQKQLFVEQHKHYLDEIIEQISEFSKRVILADANLDKVLSAYNKHRDKPIREQAENIIHLFTLTNLGAPAAFKYFDTTIDRKRYTSTKEVLDATLIHQSITGLYETRIDLSQLGGDGGEAAAKPAPGGTLNIEDEYRLHETSKEPDVSLGSTWLSDFPQAWAETGGMGLAVRQAPLIIPLKATSTPVSIKQYPMSQEARLGIKPHIQRLLDQGILVPCQSPWNTPLLPVKKPGTNDYRPVQDLREVNKRVEDIHPTVPNPYNLLSGLPPSHQWYTVLDLKDAFFCLRLHPTSQPLFAFEWRDPEMGISGQLTWTRLPQGFKNSPTLFNEALHRDLAGFRIQHPDLILLQYVDDLLLAATSELDCQQGTRALLQTLGDLGYRASAKKAQICQKQVKYLGYLLKEGQRWLTEARKETVMGQPIPKTPRQLREFLGKAGFCRLFIPGFAEMAAPLYPLTKPGTLFNWGPDQQKAFQEIKQALLTAPALGLPDLTKPFELFVDEKQGYAKGVLTQKLGPWRRPVAYLSKKLDPVAAGWPPCLRMVAAIAVLTKDAGKLTMGQPLVILAPHAVEALVKQPPDRWLSNARMTHYQALLLDTDRVQFGPVVALNPATLLPLPEEGLQHDCLDILAEAHGTRSDLMDQPLPDADHTWYTDGSSFLQEGQRKAGAAVTTETEVIWARALPAGTSAQRAELIALTQALKMAEGKKLNVYTDSRYAFATAHIHGEIYRRRGWLTSEGKEIKNKDEILALLKALFLPKRLSIIHCPGHQKGNSAEARGNRMADQAAREVATRETPETSTLLAGKRTADGSEFEKRTADGSEFESPKKKAKVE

SEQ ID NO: 2338 - protein, 2096 aa, synthetic construct
MPAAKRVKLDGGDKKYSIGLDIGTNSVGWAVITDEYKVPSKKFKVLGNTDRHSIKKNLIGALLFDSGETAEATRLKRTARRRYTRRKNRICYLQEIFSNEMAKVDDSFFHRLEESFLVEEDKKHERHPIFGNIVDEVAYHEKYPTIYHLRKKLVDSTDKADLRLIYLALAHMIKFRGHFLIEGDLNPDNSDVDKLFIQLVQTYNQLFEENPINASGVDAKAILSARLSKSRRLENLIAQLPGEKKNGLFGNLIALSLGLTPNFKSNFDLAEDAKLQLSKDTYDDDLDNLLAQIGDQYADLFLAAKNLSDAILLSDILRVNTEITKAPLSASMIKRYDEHHQDLTLLKALVRQQLPEKYKEIFFDQSKNGYAGYIDGGASQEEFYKFIKPILEKMDGTEELLVKLNREDLLRKQRTFDNGSIPHQIHLGELHAILRRQEDFYPFLKDNREKIEKILTFRIPYYVGPLARGNSRFAWMTRKSEETITPWNFEEVVDKGASAQSFIERMTNFDKNLPNEKVLPKHSLLYEYFTVYNELTKVKYVTEGMRKPAFLSGEQKKAIVDLLFKTNRKVTVKQLKEDYFKKIECFDSVEISGVEDRFNASLGTYHDLLKIIKDKDFLDNEENEDILEDIVLTLTLFEDREMIEERLKTYAHLFDDKVMKQLKRRRYTGWGRLSRKLINGIRDKQSGKTILDFLKSDGFANRNFMQLIHDDSLTFKEDIQKAQVSGQGDSLHEHIANLAGSPAIKKGILQTVKVVDELVKVMGRHKPENIVIEMARENQTTQKGQKNSRERMKRIEEGIKELGSQILKEHPVENTQLQNEKLYLYYLQNGRDMYVDQELDINRLSDYDVDHIVPQSFLKDDSIDNKVLTRSDKARGKSDNVPSEEVVKKMKNYWRQLLNAKLITQRKFDNLTKAERGGLSELDKAGFIKRQLVETRQITKHVAQILDSRMNTKYDENDKLIREVKVITLKSKLVSDFRKDFQFYKVREINNYHHAHDAYLNAVVGTALIKKYPKLESEFVYGDYKVYDVRKMIAKSEQEIGKATAKYFFYSNIMNFFKTEITLANGEIRKRPLIETNGETGEIVWDKGRDFATVRKVLSMPQVNIVKKTEVQTGGFSKESILPKRNSDKLIARKKDWDPKKYGGFDSPTVAYSVLVVAKVEKGKSKKLKSVKELLGITIMERSSFEKNPIDFLEAKGYKEVKKDLIIKLPKYSLFELENGRKRMLASAGELQKGNELALPSKYVNFLYLASHYEKLKGSPEDNEQKQLFVEQHKHYLDEIIEQISEFSKRVILADANLDKVLSAYNKHRDKPIREQAENIIHLFTLTNLGAPAAFKYFDTTIDRKRYTSTKEVLDATLIHQSITGLYETRIDLSQLGGDGGGGSPAPEAAAKGGTLNIEDEYRLHETSKEPDVSLGSTWLSDFPQAWAETGGMGLAVRQAPLIIPLKATSTPVSIKQYPMSQEARLGIKPHIQRLLDQGILVPCQSPWNTPLLPVKKPGTNDYRPVQDLREVNKRVEDIHPTVPNPYNLLSGLPPSHQWYTVLDLKDAFFCLRLHPTSQPLFAFEWRDPEMGISGQLTWTRLPQGFKNSPTLFNEALHRDLAGFRIQHPDLILLQYVDDLLLAATSELDCQQGTRALLQTLGDLGYRASAKKAQICQKQVKYLGYLLKEGQRWLTEARKETVMGQPIPKTPRQLREFLGKAGFCRLFIPGFAEMAAPLYPLTKPGTLFNWGPDQQKAFQEIKQALLTAPALGLPDLTKPFELFVDEKQGYAKGVLTQKLGPWRRPVAYLSKKLDPVAAGWPPCLRMVAAIAVLTKDAGKLTMGQPLVILAPHAVEALVKQPPDRWLSNARMTHYQALLLDTDRVQFGPVVALNPATLLPLPEEGLQHDCLDILAEAHGTRSDLMDQPLPDADHTWYTDGSSFLQEGQRKAGAAVTTETEVIWARALPAGTSAQRAELIALTQALKMAEGKKLNVYTDSRYAFATAHIHGEIYRRRGWLTSEGKEIKNKDEILALLKALFLPKRLSIIHCPGHQKGNSAEARGNRMADQAAREVATRETPETSTLLAGKRTADGSEFEKRTADGSEFESPKKKAKVE

SEQ ID NO: 2339 - protein, 2094 aa, synthetic construct
MPAAKRVKLDGGDKKYSIGLDIGTNSVGWAVITDEYKVPSKKFKVLGNTDRHSIKKNLIGALLFDSGETAEATRLKRTARRRYTRRKNRICYLQEIFSNEMAKVDDSFFHRLEESFLVEEDKKHERHPIFGNIVDEVAYHEKYPTIYHLRKKLVDSTDKADLRLIYLALAHMIKFRGHFLIEGDLNPDNSDVDKLFIQLVQTYNQLFEENPINASGVDAKAILSARLSKSRRLENLIAQLPGEKKNGLFGNLIALSLGLTPNFKSNFDLAEDAKLQLSKDTYDDDLDNLLAQIGDQYADLFLAAKNLSDAILLSDILRVNTEITKAPLSASMIKRYDEHHQDLTLLKALVRQQLPEKYKEIFFDQSKNGYAGYIDGGASQEEFYKFIKPILEKMDGTEELLVKLNREDLLRKQRTFDNGSIPHQIHLGELHAILRRQEDFYPFLKDNREKIEKILTFRIPYYVGPLARGNSRFAWMTRKSEETITPWNFEEVVDKGASAQSFIERMTNFDKNLPNEKVLPKHSLLYEYFTVYNELTKVKYVTEGMRKPAFLSGEQKKAIVDLLFKTNRKVTVKQLKEDYFKKIECFDSVEISGVEDRFNASLGTYHDLLKIIKDKDFLDNEENEDILEDIVLTLTLFEDREMIEERLKTYAHLFDDKVMKQLKRRRYTGWGRLSRKLINGIRDKQSGKTILDFLKSDGFANRNFMQLIHDDSLTFKEDIQKAQVSGQGDSLHEHIANLAGSPAIKKGILQTVKVVDELVKVMGRHKPENIVIEMARENQTTQKGQKNSRERMKRIEEGIKELGSQILKEHPVENTQLQNEKLYLYYLQNGRDMYVDQELDINRLSDYDVDHIVPQSFLKDDSIDNKVLTRSDKARGKSDNVPSEEVVKKMKNYWRQLLNAKLITQRKFDNLTKAERGGLSELDKAGFIKRQLVETRQITKHVAQILDSRMNTKYDENDKLIREVKVITLKSKLVSDFRKDFQFYKVREINNYHHAHDAYLNAVVGTALIKKYPKLESEFVYGDYKVYDVRKMIAKSEQEIGKATAKYFFYSNIMNFFKTEITLANGEIRKRPLIETNGETGEIVWDKGRDFATVRKVLSMPQVNIVKKTEVQTGGFSKESILPKRNSDKLIARKKDWDPKKYGGFDSPTVAYSVLVVAKVEKGKSKKLKSVKELLGITIMERSSFEKNPIDFLEAKGYKEVKKDLIIKLPKYSLFELENGRKRMLASAGELQKGNELALPSKYVNFLYLASHYEKLKGSPEDNEQKQLFVEQHKHYLDEIIEQISEFSKRVILADANLDKVLSAYNKHRDKPIREQAENIIHLFTLTNLGAPAAFKYFDTTIDRKRYTSTKEVLDATLIHQSITGLYETRIDLSQLGGDGGGGSGSSPAPGGTLNIEDEYRLHETSKEPDVSLGSTWLSDFPQAWAETGGMGLAVRQAPLIIPLKATSTPVSIKQYPMSQEARLGIKPHIQRLLDQGILVPCQSPWNTPLLPVKKPGTNDYRPVQDLREVNKRVEDIHPTVPNPYNLLSGLPPSHQWYTVLDLKDAFFCLRLHPTSQPLFAFEWRDPEMGISGQLTWTRLPQGFKNSPTLFNEALHRDLAGFRIQHPDLILLQYVDDLLLAATSELDCQQGTRALLQTLGDLGYRASAKKAQICQKQVKYLGYLLKEGQRWLTEARKETVMGQPIPKTPRQLREFLGKAGFCRLFIPGFAEMAAPLYPLTKPGTLFNWGPDQQKAFQEIKQALLTAPALGLPDLTKPFELFVDEKQGYAKGVLTQKLGPWRRPVAYLSKKLDPVAAGWPPCLRMVAAIAVLTKDAGKLTMGQPLVILAPHAVEALVKQPPDRWLSNARMTHYQALLLDTDRVQFGPVVALNPATLLPLPEEGLQHDCLDILAEAHGTRSDLMDQPLPDADHTWYTDGSSFLQEGQRKAGAAVTTETEVIWARALPAGTSAQRAELIALTQALKMAEGKKLNVYTDSRYAFATAHIHGEIYRRRGWLTSEGKEIKNKDEILALLKALFLPKRLSIIHCPGHQKGNSAEARGNRMADQAAREVATRETPETSTLLAGKRTADGSEFEKRTADGSEFESPKKKAKVE

SEQ ID NO: 2340 - protein, 2091 aa, synthetic construct
MPAAKRVKLDGGDKKYSIGLDIGTNSVGWAVITDEYKVPSKKFKVLGNTDRHSIKKNLIGALLFDSGETAEATRLKRTARRRYTRRKNRICYLQEIFSNEMAKVDDSFFHRLEESFLVEEDKKHERHPIFGNIVDEVAYHEKYPTIYHLRKKLVDSTDKADLRLIYLALAHMIKFRGHFLIEGDLNPDNSDVDKLFIQLVQTYNQLFEENPINASGVDAKAILSARLSKSRRLENLIAQLPGEKKNGLFGNLIALSLGLTPNFKSNFDLAEDAKLQLSKDTYDDDLDNLLAQIGDQYADLFLAAKNLSDAILLSDILRVNTEITKAPLSASMIKRYDEHHQDLTLLKALVRQQLPEKYKEIFFDQSKNGYAGYIDGGASQEEFYKFIKPILEKMDGTEELLVKLNREDLLRKQRTFDNGSIPHQIHLGELHAILRRQEDFYPFLKDNREKIEKILTFRIPYYVGPLARGNSRFAWMTRKSEETITPWNFEEVVDKGASAQSFIERMTNFDKNLPNEKVLPKHSLLYEYFTVYNELTKVKYVTEGMRKPAFLSGEQKKAIVDLLFKTNRKVTVKQLKEDYFKKIECFDSVEISGVEDRFNASLGTYHDLLKIIKDKDFLDNEENEDILEDIVLTLTLFEDREMIEERLKTYAHLFDDKVMKQLKRRRYTGWGRLSRKLINGIRDKQSGKTILDFLKSDGFANRNFMQLIHDDSLTFKEDIQKAQVSGQGDSLHEHIANLAGSPAIKKGILQTVKVVDELVKVMGRHKPENIVIEMARENQTTQKGQKNSRERMKRIEEGIKELGSQILKEHPVENTQLQNEKLYLYYLQNGRDMYVDQELDINRLSDYDVDHIVPQSFLKDDSIDNKVLTRSDKARGKSDNVPSEEVVKKMKNYWRQLLNAKLITQRKFDNLTKAERGGLSELDKAGFIKRQLVETRQITKHVAQILDSRMNTKYDENDKLIREVKVITLKSKLVSDFRKDFQFYKVREINNYHHAHDAYLNAVVGTALIKKYPKLESEFVYGDYKVYDVRKMIAKSEQEIGKATAKYFFYSNIMNFFKTEITLANGEIRKRPLIETNGETGEIVWDKGRDFATVRKVLSMPQVNIVKKTEVQTGGFSKESILPKRNSDKLIARKKDWDPKKYGGFDSPTVAYSVLVVAKVEKGKSKKLKSVKELLGITIMERSSFEKNPIDFLEAKGYKEVKKDLIIKLPKYSLFELENGRKRMLASAGELQKGNELALPSKYVNFLYLASHYEKLKGSPEDNEQKQLFVEQHKHYLDEIIEQISEFSKRVILADANLDKVLSAYNKHRDKPIREQAENIIHLFTLTNLGAPAAFKYFDTTIDRKRYTSTKEVLDATLIHQSITGLYETRIDLSQLGGDGGPAPGGSGGTLNIEDEYRLHETSKEPDVSLGSTWLSDFPQAWAETGGMGLAVRQAPLIIPLKATSTPVSIKQYPMSQEARLGIKPHIQRLLDQGILVPCQSPWNTPLLPVKKPGTNDYRPVQDLREVNKRVEDIHPTVPNPYNLLSGLPPSHQWYTVLDLKDAFFCLRLHPTSQPLFAFEWRDPEMGISGQLTWTRLPQGFKNSPTLFNEALHRDLAGFRIQHPDLILLQYVDDLLLAATSELDCQQGTRALLQTLGDLGYRASAKKAQICQKQVKYLGYLLKEGQRWLTEARKETVMGQPIPKTPRQLREFLGKAGFCRLFIPGFAEMAAPLYPLTKPGTLFNWGPDQQKAFQEIKQALLTAPALGLPDLTKPFELFVDEKQGYAKGVLTQKLGPWRRPVAYLSKKLDPVAAGWPPCLRMVAAIAVLTKDAGKLTMGQPLVILAPHAVEALVKQPPDRWLSNARMTHYQALLLDTDRVQFGPVVALNPATLLPLPEEGLQHDCLDILAEAHGTRSDLMDQPLPDADHTWYTDGSSFLQEGQRKAGAAVTTETEVIWARALPAGTSAQRAELIALTQALKMAEGKKLNVYTDSRYAFATAHIHGEIYRRRGWLTSEGKEIKNKDEILALLKALFLPKRLSIIHCPGHQKGNSAEARGNRMADQAAREVATRETPETSTLLAGKRTADGSEFEKRTADGSEFESPKKKAKVE

SEQ ID NO: 2341 - protein, 2093 aa, synthetic construct
MPAAKRVKLDGGDKKYSIGLDIGTNSVGWAVITDEYKVPSKKFKVLGNTDRHSIKKNLIGALLFDSGETAEATRLKRTARRRYTRRKNRICYLQEIFSNEMAKVDDSFFHRLEESFLVEEDKKHERHPIFGNIVDEVAYHEKYPTIYHLRKKLVDSTDKADLRLIYLALAHMIKFRGHFLIEGDLNPDNSDVDKLFIQLVQTYNQLFEENPINASGVDAKAILSARLSKSRRLENLIAQLPGEKKNGLFGNLIALSLGLTPNFKSNFDLAEDAKLQLSKDTYDDDLDNLLAQIGDQYADLFLAAKNLSDAILLSDILRVNTEITKAPLSASMIKRYDEHHQDLTLLKALVRQQLPEKYKEIFFDQSKNGYAGYIDGGASQEEFYKFIKPILEKMDGTEELLVKLNREDLLRKQRTFDNGSIPHQIHLGELHAILRRQEDFYPFLKDNREKIEKILTFRIPYYVGPLARGNSRFAWMTRKSEETITPWNFEEVVDKGASAQSFIERMTNFDKNLPNEKVLPKHSLLYEYFTVYNELTKVKYVTEGMRKPAFLSGEQKKAIVDLLFKTNRKVTVKQLKEDYFKKIECFDSVEISGVEDRFNASLGTYHDLLKIIKDKDFLDNEENEDILEDIVLTLTLFEDREMIEERLKTYAHLFDDKVMKQLKRRRYTGWGRLSRKLINGIRDKQSGKTILDFLKSDGFANRNFMQLIHDDSLTFKEDIQKAQVSGQGDSLHEHIANLAGSPAIKKGILQTVKVVDELVKVMGRHKPENIVIEMARENQTTQKGQKNSRERMKRIEEGIKELGSQILKEHPVENTQLQNEKLYLYYLQNGRDMYVDQELDINRLSDYDVDHIVPQSFLKDDSIDNKVLTRSDKARGKSDNVPSEEVVKKMKNYWRQLLNAKLITQRKFDNLTKAERGGLSELDKAGFIKRQLVETRQITKHVAQILDSRMNTKYDENDKLIREVKVITLKSKLVSDFRKDFQFYKVREINNYHHAHDAYLNAVVGTALIKKYPKLESEFVYGDYKVYDVRKMIAKSEQEIGKATAKYFFYSNIMNFFKTEITLANGEIRKRPLIETNGETGEIVWDKGRDFATVRKVLSMPQVNIVKKTEVQTGGFSKESILPKRNSDKLIARKKDWDPKKYGGFDSPTVAYSVLVVAKVEKGKSKKLKSVKELLGITIMERSSFEKNPIDFLEAKGYKEVKKDLIIKLPKYSLFELENGRKRMLASAGELQKGNELALPSKYVNFLYLASHYEKLKGSPEDNEQKQLFVEQHKHYLDEIIEQISEFSKRVILADANLDKVLSAYNKHRDKPIREQAENIIHLFTLTNLGAPAAFKYFDTTIDRKRYTSTKEVLDATLIHQSITGLYETRIDLSQLGGDGGEAAAKGGSGGTLNIEDEYRLHETSKEPDVSLGSTWLSDFPQAWAETGGMGLAVRQAPLIIPLKATSTPVSIKQYPMSQEARLGIKPHIQRLLDQGILVPCQSPWNTPLLPVKKPGTNDYRPVQDLREVNKRVEDIHPTVPNPYNLLSGLPPSHQWYTVLDLKDAFFCLRLHPTSQPLFAFEWRDPEMGISGQLTWTRLPQGFKNSPTLFNEALHRDLAGFRIQHPDLILLQYVDDLLLAATSELDCQQGTRALLQTLGDLGYRASAKKAQICQKQVKYLGYLLKEGQRWLTEARKETVMGQPIPKTPRQLREFLGKAGFCRLFIPGFAEMAAPLYPLTKPGTLFNWGPDQQKAFQEIKQALLTAPALGLPDLTKPFELFVDEKQGYAKGVLTQKLGPWRRPVAYLSKKLDPVAAGWPPCLRMVAAIAVLTKDAGKLTMGQPLVILAPHAVEALVKQPPDRWLSNARMTHYQALLLDTDRVQFGPVVALNPATLLPLPEEGLQHDCLDILAEAHGTRSDLMDQPLPDADHTWYTDGSSFLQEGQRKAGAAVTTETEVIWARALPAGTSAQRAELIALTQALKMAEGKKLNVYTDSRYAFATAHIHGEIYRRRGWLTSEGKEIKNKDEILALLKALFLPKRLSIIHCPGHQKGNSAEARGNRMADQAAREVATRETPETSTLLAGKRTADGSEFEKRTADGSEFESPKKKAKVE

SEQ ID NO: 2342 - protein, 2093 aa, synthetic construct
MPAAKRVKLDGGDKKYSIGLDIGTNSVGWAVITDEYKVPSKKFKVLGNTDRHSIKKNLIGALLFDSGETAEATRLKRTARRRYTRRKNRICYLQEIFSNEMAKVDDSFFHRLEESFLVEEDKKHERHPIFGNIVDEVAYHEKYPTIYHLRKKLVDSTDKADLRLIYLALAHMIKFRGHFLIEGDLNPDNSDVDKLFIQLVQTYNQLFEENPINASGVDAKAILSARLSKSRRLENLIAQLPGEKKNGLFGNLIALSLGLTPNFKSNFDLAEDAKLQLSKDTYDDDLDNLLAQIGDQYADLFLAAKNLSDAILLSDILRVNTEITKAPLSASMIKRYDEHHQDLTLLKALVRQQLPEKYKEIFFDQSKNGYAGYIDGGASQEEFYKFIKPILEKMDGTEELLVKLNREDLLRKQRTFDNGSIPHQIHLGELHAILRRQEDFYPFLKDNREKIEKILTFRIPYYVGPLARGNSRFAWMTRKSEETITPWNFEEVVDKGASAQSFIERMTNFDKNLPNEKVLPKHSLLYEYFTVYNELTKVKYVTEGMRKPAFLSGEQKKAIVDLLFKTNRKVTVKQLKEDYFKKIECFDSVEISGVEDRFNASLGTYHDLLKIIKDKDFLDNEENEDILEDIVLTLTLFEDREMIEERLKTYAHLFDDKVMKQLKRRRYTGWGRLSRKLINGIRDKQSGKTILDFLKSDGFANRNFMQLIHDDSLTFKEDIQKAQVSGQGDSLHEHIANLAGSPAIKKGILQTVKVVDELVKVMGRHKPENIVIEMARENQTTQKGQKNSRERMKRIEEGIKELGSQILKEHPVENTQLQNEKLYLYYLQNGRDMYVDQELDINRLSDYDVDHIVPQSFLKDDSIDNKVLTRSDKARGKSDNVPSEEVVKKMKNYWRQLLNAKLITQRKFDNLTKAERGGLSELDKAGFIKRQLVETRQITKHVAQILDSRMNTKYDENDKLIREVKVITLKSKLVSDFRKDFQFYKVREINNYHHAHDAYLNAVVGTALIKKYPKLESEFVYGDYKVYDVRKMIAKSEQEIGKATAKYFFYSNIMNFFKTEITLANGEIRKRPLIETNGETGEIVWDKGRDFATVRKVLSMPQVNIVKKTEVQTGGFSKESILPKRNSDKLIARKKDWDPKKYGGFDSPTVAYSVLVVAKVEKGKSKKLKSVKELLGITIMERSSFEKNPIDFLEAKGYKEVKKDLIIKLPKYSLFELENGRKRMLASAGELQKGNELALPSKYVNFLYLASHYEKLKGSPEDNEQKQLFVEQHKHYLDEIIEQISEFSKRVILADANLDKVLSAYNKHRDKPIREQAENIIHLFTLTNLGAPAAFKYFDTTIDRKRYTSTKEVLDATLIHQSITGLYETRIDLSQLGGDGGGGGEAAAKGGTLNIEDEYRLHETSKEPDVSLGSTWLSDFPQAWAETGGMGLAVRQAPLIIPLKATSTPVSIKQYPMSQEARLGIKPHIQRLLDQGILVPCQSPWNTPLLPVKKPGTNDYRPVQDLREVNKRVEDIHPTVPNPYNLLSGLPPSHQWYTVLDLKDAFFCLRLHPTSQPLFAFEWRDPEMGISGQLTWTRLPQGFKNSPTLFNEALHRDLAGFRIQHPDLILLQYVDDLLLAATSELDCQQGTRALLQTLGDLGYRASAKKAQICQKQVKYLGYLLKEGQRWLTEARKETVMGQPIPKTPRQLREFLGKAGFCRLFIPGFAEMAAPLYPLTKPGTLFNWGPDQQKAFQEIKQALLTAPALGLPDLTKPFELFVDEKQGYAKGVLTQKLGPWRRPVAYLSKKLDPVAAGWPPCLRMVAAIAVLTKDAGKLTMGQPLVILAPHAVEALVKQPPDRWLSNARMTHYQALLLDTDRVQFGPVVALNPATLLPLPEEGLQHDCLDILAEAHGTRSDLMDQPLPDADHTWYTDGSSFLQEGQRKAGAAVTTETEVIWARALPAGTSAQRAELIALTQALKMAEGKKLNVYTDSRYAFATAHIHGEIYRRRGWLTSEGKEIKNKDEILALLKALFLPKRLSIIHCPGHQKGNSAEARGNRMADQAAREVATRETPETSTLLAGKRTADGSEFEKRTADGSEFESPKKKAKVE

SEQ ID NO: 2343 - protein, 2131 aa, synthetic construct
MPAAKRVKLDGGDKKYSIGLDIGTNSVGWAVITDEYKVPSKKFKVLGNTDRHSIKKNLIGALLFDSGETAEATRLKRTARRRYTRRKNRICYLQEIFSNEMAKVDDSFFHRLEESFLVEEDKKHERHPIFGNIVDEVAYHEKYPTIYHLRKKLVDSTDKADLRLIYLALAHMIKFRGHFLIEGDLNPDNSDVDKLFIQLVQTYNQLFEENPINASGVDAKAILSARLSKSRRLENLIAQLPGEKKNGLFGNLIALSLGLTPNFKSNFDLAEDAKLQLSKDTYDDDLDNLLAQIGDQYADLFLAAKNLSDAILLSDILRVNTEITKAPLSASMIKRYDEHHQDLTLLKALVRQQLPEKYKEIFFDQSKNGYAGYIDGGASQEEFYKFIKPILEKMDGTEELLVKLNREDLLRKQRTFDNGSIPHQIHLGELHAILRRQEDFYPFLKDNREKIEKILTFRIPYYVGPLARGNSRFAWMTRKSEETITPWNFEEVVDKGASAQSFIERMTNFDKNLPNEKVLPKHSLLYEYFTVYNELTKVKYVTEGMRKPAFLSGEQKKAIVDLLFKTNRKVTVKQLKEDYFKKIECFDSVEISGVEDRFNASLGTYHDLLKIIKDKDFLDNEENEDILEDIVLTLTLFEDREMIEERLKTYAHLFDDKVMKQLKRRRYTGWGRLSRKLINGIRDKQSGKTILDFLKSDGFANRNFMQLIHDDSLTFKEDIQKAQVSGQGDSLHEHIANLAGSPAIKKGILQTVKVVDELVKVMGRHKPENIVIEMARENQTTQKGQKNSRERMKRIEEGIKELGSQILKEHPVENTQLQNEKLYLYYLQNGRDMYVDQELDINRLSDYDVDHIVPQSFLKDDSIDNKVLTRSDKARGKSDNVPSEEVVKKMKNYWRQLLNAKLITQRKFDNLTKAERGGLSELDKAGFIKRQLVETRQITKHVAQILDSRMNTKYDENDKLIREVKVITLKSKLVSDFRKDFQFYKVREINNYHHAHDAYLNAVVGTALIKKYPKLESEFVYGDYKVYDVRKMIAKSEQEIGKATAKYFFYSNIMNFFKTEITLANGEIRKRPLIETNGETGEIVWDKGRDFATVRKVLSMPQVNIVKKTEVQTGGFSKESILPKRNSDKLIARKKDWDPKKYGGFDSPTVAYSVLVVAKVEKGKSKKLKSVKELLGITIMERSSFEKNPIDFLEAKGYKEVKKDLIIKLPKYSLFELENGRKRMLASAGELQKGNELALPSKYVNFLYLASHYEKLKGSPEDNEQKQLFVEQHKHYLDEIIEQISEFSKRVILADANLDKVLSAYNKHRDKPIREQAENIIHLFTLTNLGAPAAFKYFDTTIDRKRYTSTKEVLDATLIHQSITGLYETRIDLSQLGGDGGAEAAAKEAAAKEAAAKEAAAKALEAEAAAKEAAAKEAAAKEAAAKAGGTLNIEDEYRLHETSKEPDVSLGSTWLSDFPQAWAETGGMGLAVRQAPLIIPLKATSTPVSIKQYPMSQEARLGIKPHIQRLLDQGILVPCQSPWNTPLLPVKKPGTNDYRPVQDLREVNKRVEDIHPTVPNPYNLLSGLPPSHQWYTVLDLKDAFFCLRLHPTSQPLFAFEWRDPEMGISGQLTWTRLPQGFKNSPTLFNEALHRDLAGFRIQHPDLILLQYVDDLLLAATSELDCQQGTRALLQTLGDLGYRASAKKAQICQKQVKYLGYLLKEGQRWLTEARKETVMGQPIPKTPRQLREFLGKAGFCRLFIPGFAEMAAPLYPLTKPGTLFNWGPDQQKAFQEIKQALLTAPALGLPDLTKPFELFVDEKQGYAKGVLTQKLGPWRRPVAYLSKKLDPVAAGWPPCLRMVAAIAVLTKDAGKLTMGQPLVILAPHAVEALVKQPPDRWLSNARMTHYQALLLDTDRVQFGPVVALNPATLLPLPEEGLQHDCLDILAEAHGTRSDLMDQPLPDADHTWYTDGSSFLQEGQRKAGAAVTTETEVIWARALPAGTSAQRAELIALTQALKMAEGKKLNVYTDSRYAFATAHIHGEIYRRRGWLTSEGKEIKNKDEILALLKALFLPKRLSIIHCPGHQKGNSAEARGNRMADQAAREVATRETPETSTLLAGKRTADGSEFEKRTADGSEFESPKKKAKVE

SEQ ID NO: 2344 - protein, 2096 aa, synthetic construct
MPAAKRVKLDGGDKKYSIGLDIGTNSVGWAVITDEYKVPSKKFKVLGNTDRHSIKKNLIGALLFDSGETAEATRLKRTARRRYTRRKNRICYLQEIFSNEMAKVDDSFFHRLEESFLVEEDKKHERHPIFGNIVDEVAYHEKYPTIYHLRKKLVDSTDKADLRLIYLALAHMIKFRGHFLIEGDLNPDNSDVDKLFIQLVQTYNQLFEENPINASGVDAKAILSARLSKSRRLENLIAQLPGEKKNGLFGNLIALSLGLTPNFKSNFDLAEDAKLQLSKDTYDDDLDNLLAQIGDQYADLFLAAKNLSDAILLSDILRVNTEITKAPLSASMIKRYDEHHQDLTLLKALVRQQLPEKYKEIFFDQSKNGYAGYIDGGASQEEFYKFIKPILEKMDGTEELLVKLNREDLLRKQRTFDNGSIPHQIHLGELHAILRRQEDFYPFLKDNREKIEKILTFRIPYYVGPLARGNSRFAWMTRKSEETITPWNFEEVVDKGASAQSFIERMTNFDKNLPNEKVLPKHSLLYEYFTVYNELTKVKYVTEGMRKPAFLSGEQKKAIVDLLFKTNRKVTVKQLKEDYFKKIECFDSVEISGVEDRFNASLGTYHDLLKIIKDKDFLDNEENEDILEDIVLTLTLFEDREMIEERLKTYAHLFDDKVMKQLKRRRYTGWGRLSRKLINGIRDKQSGKTILDFLKSDGFANRNFMQLIHDDSLTFKEDIQKAQVSGQGDSLHEHIANLAGSPAIKKGILQTVKVVDELVKVMGRHKPENIVIEMARENQTTQKGQKNSRERMKRIEEGIKELGSQILKEHPVENTQLQNEKLYLYYLQNGRDMYVDQELDINRLSDYDVDHIVPQSFLKDDSIDNKVLTRSDKARGKSDNVPSEEVVKKMKNYWRQLLNAKLITQRKFDNLTKAERGGLSELDKAGFIKRQLVETRQITKHVAQILDSRMNTKYDENDKLIREVKVITLKSKLVSDFRKDFQFYKVREINNYHHAHDAYLNAVVGTALIKKYPKLESEFVYGDYKVYDVRKMIAKSEQEIGKATAKYFFYSNIMNFFKTEITLANGEIRKRPLIETNGETGEIVWDKGRDFATVRKVLSMPQVNIVKKTEVQTGGFSKESILPKRNSDKLIARKKDWDPKKYGGFDSPTVAYSVLVVAKVEKGKSKKLKSVKELLGITIMERSSFEKNPIDFLEAKGYKEVKKDLIIKLPKYSLFELENGRKRMLASAGELQKGNELALPSKYVNFLYLASHYEKLKGSPEDNEQKQLFVEQHKHYLDEIIEQISEFSKRVILADANLDKVLSAYNKHRDKPIREQAENIIHLFTLTNLGAPAAFKYFDTTIDRKRYTSTKEVLDATLIHQSITGLYETRIDLSQLGGDGGEAAAKGGGGGSGGTLNIEDEYRLHETSKEPDVSLGSTWLSDFPQAWAETGGMGLAVRQAPLIIPLKATSTPVSIKQYPMSQEARLGIKPHIQRLLDQGILVPCQSPWNTPLLPVKKPGTNDYRPVQDLREVNKRVEDIHPTVPNPYNLLSGLPPSHQWYTVLDLKDAFFCLRLHPTSQPLFAFEWRDPEMGISGQLTWTRLPQGFKNSPTLFNEALHRDLAGFRIQHPDLILLQYVDDLLLAATSELDCQQGTRALLQTLGDLGYRASAKKAQICQKQVKYLGYLLKEGQRWLTEARKETVMGQPIPKTPRQLREFLGKAGFCRLFIPGFAEMAAPLYPLTKPGTLFNWGPDQQKAFQEIKQALLTAPALGLPDLTKPFELFVDEKQGYAKGVLTQKLGPWRRPVAYLSKKLDPVAAGWPPCLRMVAAIAVLTKDAGKLTMGQPLVILAPHAVEALVKQPPDRWLSNARMTHYQALLLDTDRVQFGPVVALNPATLLPLPEEGLQHDCLDILAEAHGTRSDLMDQPLPDADHTWYTDGSSFLQEGQRKAGAAVTTETEVIWARALPAGTSAQRAELIALTQALKMAEGKKLNVYTDSRYAFATAHIHGEIYRRRGWLTSEGKEIKNKDEILALLKALFLPKRLSIIHCPGHQKGNSAEARGNRMADQAAREVATRETPETSTLLAGKRTADGSEFEKRTADGSEFESPKKKAKVE

SEQ ID NO: 2345 - protein, 2096 aa, synthetic construct
MPAAKRVKLDGGDKKYSIGLDIGTNSVGWAVITDEYKVPSKKFKVLGNTDRHSIKKNLIGALLFDSGETAEATRLKRTARRRYTRRKNRICYLQEIFSNEMAKVDDSFFHRLEESFLVEEDKKHERHPIFGNIVDEVAYHEKYPTIYHLRKKLVDSTDKADLRLIYLALAHMIKFRGHFLIEGDLNPDNSDVDKLFIQLVQTYNQLFEENPINASGVDAKAILSARLSKSRRLENLIAQLPGEKKNGLFGNLIALSLGLTPNFKSNFDLAEDAKLQLSKDTYDDDLDNLLAQIGDQYADLFLAAKNLSDAILLSDILRVNTEITKAPLSASMIKRYDEHHQDLTLLKALVRQQLPEKYKEIFFDQSKNGYAGYIDGGASQEEFYKFIKPILEKMDGTEELLVKLNREDLLRKQRTFDNGSIPHQIHLGELHAILRRQEDFYPFLKDNREKIEKILTFRIPYYVGPLARGNSRFAWMTRKSEETITPWNFEEVVDKGASAQSFIERMTNFDKNLPNEKVLPKHSLLYEYFTVYNELTKVKYVTEGMRKPAFLSGEQKKAIVDLLFKTNRKVTVKQLKEDYFKKIECFDSVEISGVEDRFNASLGTYHDLLKIIKDKDFLDNEENEDILEDIVLTLTLFEDREMIEERLKTYAHLFDDKVMKQLKRRRYTGWGRLSRKLINGIRDKQSGKTILDFLKSDGFANRNFMQLIHDDSLTFKEDIQKAQVSGQGDSLHEHIANLAGSPAIKKGILQTVKVVDELVKVMGRHKPENIVIEMARENQTTQKGQKNSRERMKRIEEGIKELGSQILKEHPVENTQLQNEKLYLYYLQNGRDMYVDQELDINRLSDYDVDHIVPQSFLKDDSIDNKVLTRSDKARGKSDNVPSEEVVKKMKNYWRQLLNAKLITQRKFDNLTKAERGGLSELDKAGFIKRQLVETRQITKHVAQILDSRMNTKYDENDKLIREVKVITLKSKLVSDFRKDFQFYKVREINNYHHAHDAYLNAVVGTALIKKYPKLESEFVYGDYKVYDVRKMIAKSEQEIGKATAKYFFYSNIMNFFKTEITLANGEIRKRPLIETNGETGEIVWDKGRDFATVRKVLSMPQVNIVKKTEVQTGGFSKESILPKRNSDKLIARKKDWDPKKYGGFDSPTVAYSVLVVAKVEKGKSKKLKSVKELLGITIMERSSFEKNPIDFLEAKGYKEVKKDLIIKLPKYSLFELENGRKRMLASAGELQKGNELALPSKYVNFLYLASHYEKLKGSPEDNEQKQLFVEQHKHYLDEIIEQISEFSKRVILADANLDKVLSAYNKHRDKPIREQAENIIHLFTLTNLGAPAAFKYFDTTIDRKRYTSTKEVLDATLIHQSITGLYETRIDLSQLGGDGGGSSPAPEAAAKGGTLNIEDEYRLHETSKEPDVSLGSTWLSDFPQAWAETGGMGLAVRQAPLIIPLKATSTPVSIKQYPMSQEARLGIKPHIQRLLDQGILVPCQSPWNTPLLPVKKPGTNDYRPVQDLREVNKRVEDIHPTVPNPYNLLSGLPPSHQWYTVLDLKDAFFCLRLHPTSQPLFAFEWRDPEMGISGQLTWTRLPQGFKNSPTLFNEALHRDLAGFRIQHPDLILLQYVDDLLLAATSELDCQQGTRALLQTLGDLGYRASAKKAQICQKQVKYLGYLLKEGQRWLTEARKETVMGQPIPKTPRQLREFLGKAGFCRLFIPGFAEMAAPLYPLTKPGTLFNWGPDQQKAFQEIKQALLTAPALGLPDLTKPFELFVDEKQGYAKGVLTQKLGPWRRPVAYLSKKLDPVAAGWPPCLRMVAAIAVLTKDAGKLTMGQPLVILAPHAVEALVKQPPDRWLSNARMTHYQALLLDTDRVQFGPVVALNPATLLPLPEEGLQHDCLDILAEAHGTRSDLMDQPLPDADHTWYTDGSSFLQEGQRKAGAAVTTETEVIWARALPAGTSAQRAELIALTQALKMAEGKKLNVYTDSRYAFATAHIHGEIYRRRGWLTSEGKEIKNKDEILALLKALFLPKRLSIIHCPGHQKGNSAEARGNRMADQAAREVATRETPETSTLLAGKRTADGSEFEKRTADGSEFESPKKKAKVE

SEQ ID NO: 2346 - protein, 2094 aa, synthetic construct
MPAAKRVKLDGGDKKYSIGLDIGTNSVGWAVITDEYKVPSKKFKVLGNTDRHSIKKNLIGALLFDSGETAEATRLKRTARRRYTRRKNRICYLQEIFSNEMAKVDDSFFHRLEESFLVEEDKKHERHPIFGNIVDEVAYHEKYPTIYHLRKKLVDSTDKADLRLIYLALAHMIKFRGHFLIEGDLNPDNSDVDKLFIQLVQTYNQLFEENPINASGVDAKAILSARLSKSRRLENLIAQLPGEKKNGLFGNLIALSLGLTPNFKSNFDLAEDAKLQLSKDTYDDDLDNLLAQIGDQYADLFLAAKNLSDAILLSDILRVNTEITKAPLSASMIKRYDEHHQDLTLLKALVRQQLPEKYKEIFFDQSKNGYAGYIDGGASQEEFYKFIKPILEKMDGTEELLVKLNREDLLRKQRTFDNGSIPHQIHLGELHAILRRQEDFYPFLKDNREKIEKILTFRIPYYVGPLARGNSRFAWMTRKSEETITPWNFEEVVDKGASAQSFIERMTNFDKNLPNEKVLPKHSLLYEYFTVYNELTKVKYVTEGMRKPAFLSGEQKKAIVDLLFKTNRKVTVKQLKEDYFKKIECFDSVEISGVEDRFNASLGTYHDLLKIIKDKDFLDNEENEDILEDIVLTLTLFEDREMIEERLKTYAHLFDDKVMKQLKRRRYTGWGRLSRKLINGIRDKQSGKTILDFLKSDGFANRNFMQLIHDDSLTFKEDIQKAQVSGQGDSLHEHIANLAGSPAIKKGILQTVKVVDELVKVMGRHKPENIVIEMARENQTTQKGQKNSRERMKRIEEGIKELGSQILKEHPVENTQLQNEKLYLYYLQNGRDMYVDQELDINRLSDYDVDHIVPQSFLKDDSIDNKVLTRSDKARGKSDNVPSEEVVKKMKNYWRQLLNAKLITQRKFDNLTKAERGGLSELDKAGFIKRQLVETRQITKHVAQILDSRMNTKYDENDKLIREVKVITLKSKLVSDFRKDFQFYKVREINNYHHAHDAYLNAVVGTALIKKYPKLESEFVYGDYKVYDVRKMIAKSEQEIGKATAKYFFYSNIMNFFKTEITLANGEIRKRPLIETNGETGEIVWDKGRDFATVRKVLSMPQVNIVKKTEVQTGGFSKESILPKRNSDKLIARKKDWDPKKYGGFDSPTVAYSVLVVAKVEKGKSKKLKSVKELLGITIMERSSFEKNPIDFLEAKGYKEVKKDLIIKLPKYSLFELENGRKRMLASAGELQKGNELALPSKYVNFLYLASHYEKLKGSPEDNEQKQLFVEQHKHYLDEIIEQISEFSKRVILADANLDKVLSAYNKHRDKPIREQAENIIHLFTLTNLGAPAAFKYFDTTIDRKRYTSTKEVLDATLIHQSITGLYETRIDLSQLGGDGGGGGGSSPAPGGTLNIEDEYRLHETSKEPDVSLGSTWLSDFPQAWAETGGMGLAVRQAPLIIPLKATSTPVSIKQYPMSQEARLGIKPHIQRLLDQGILVPCQSPWNTPLLPVKKPGTNDYRPVQDLREVNKRVEDIHPTVPNPYNLLSGLPPSHQWYTVLDLKDAFFCLRLHPTSQPLFAFEWRDPEMGISGQLTWTRLPQGFKNSPTLFNEALHRDLAGFRIQHPDLILLQYVDDLLLAATSELDCQQGTRALLQTLGDLGYRASAKKAQICQKQVKYLGYLLKEGQRWLTEARKETVMGQPIPKTPRQLREFLGKAGFCRLFIPGFAEMAAPLYPLTKPGTLFNWGPDQQKAFQEIKQALLTAPALGLPDLTKPFELFVDEKQGYAKGVLTQKLGPWRRPVAYLSKKLDPVAAGWPPCLRMVAAIAVLTKDAGKLTMGQPLVILAPHAVEALVKQPPDRWLSNARMTHYQALLLDTDRVQFGPVVALNPATLLPLPEEGLQHDCLDILAEAHGTRSDLMDQPLPDADHTWYTDGSSFLQEGQRKAGAAVTTETEVIWARALPAGTSAQRAELIALTQALKMAEGKKLNVYTDSRYAFATAHIHGEIYRRRGWLTSEGKEIKNKDEILALLKALFLPKRLSIIHCPGHQKGNSAEARGNRMADQAAREVATRETPETSTLLAGKRTADGSEFEKRTADGSEFESPKKKAKVE

SEQ ID NO: 2347 - protein, 2096 aa, synthetic construct
MPAAKRVKLDGGDKKYSIGLDIGTNSVGWAVITDEYKVPSKKFKVLGNTDRHSIKKNLIGALLFDSGETAEATRLKRTARRRYTRRKNRICYLQEIFSNEMAKVDDSFFHRLEESFLVEEDKKHERHPIFGNIVDEVAYHEKYPTIYHLRKKLVDSTDKADLRLIYLALAHMIKFRGHFLIEGDLNPDNSDVDKLFIQLVQTYNQLFEENPINASGVDAKAILSARLSKSRRLENLIAQLPGEKKNGLFGNLIALSLGLTPNFKSNFDLAEDAKLQLSKDTYDDDLDNLLAQIGDQYADLFLAAKNLSDAILLSDILRVNTEITKAPLSASMIKRYDEHHQDLTLLKALVRQQLPEKYKEIFFDQSKNGYAGYIDGGASQEEFYKFIKPILEKMDGTEELLVKLNREDLLRKQRTFDNGSIPHQIHLGELHAILRRQEDFYPFLKDNREKIEKILTFRIPYYVGPLARGNSRFAWMTRKSEETITPWNFEEVVDKGASAQSFIERMTNFDKNLPNEKVLPKHSLLYEYFTVYNELTKVKYVTEGMRKPAFLSGEQKKAIVDLLFKTNRKVTVKQLKEDYFKKIECFDSVEISGVEDRFNASLGTYHDLLKIIKDKDFLDNEENEDILEDIVLTLTLFEDREMIEERLKTYAHLFDDKVMKQLKRRRYTGWGRLSRKLINGIRDKQSGKTILDFLKSDGFANRNFMQLIHDDSLTFKEDIQKAQVSGQGDSLHEHIANLAGSPAIKKGILQTVKVVDELVKVMGRHKPENIVIEMARENQTTQKGQKNSRERMKRIEEGIKELGSQILKEHPVENTQLQNEKLYLYYLQNGRDMYVDQELDINRLSDYDVDHIVPQSFLKDDSIDNKVLTRSDKARGKSDNVPSEEVVKKMKNYWRQLLNAKLITQRKFDNLTKAERGGLSELDKAGFIKRQLVETRQITKHVAQILDSRMNTKYDENDKLIREVKVITLKSKLVSDFRKDFQFYKVREINNYHHAHDAYLNAVVGTALIKKYPKLESEFVYGDYKVYDVRKMIAKSEQEIGKATAKYFFYSNIMNFFKTEITLANGEIRKRPLIETNGETGEIVWDKGRDFATVRKVLSMPQVNIVKKTEVQTGGFSKESILPKRNSDKLIARKKDWDPKKYGGFDSPTVAYSVLVVAKVEKGKSKKLKSVKELLGITIMERSSFEKNPIDFLEAKGYKEVKKDLIIKLPKYSLFELENGRKRMLASAGELQKGNELALPSKYVNFLYLASHYEKLKGSPEDNEQKQLFVEQHKHYLDEIIEQISEFSKRVILADANLDKVLSAYNKHRDKPIREQAENIIHLFTLTNLGAPAAFKYFDTTIDRKRYTSTKEVLDATLIHQSITGLYETRIDLSQLGGDGGPAPEAAAKGSSGGTLNIEDEYRLHETSKEPDVSLGSTWLSDFPQAWAETGGMGLAVRQAPLIIPLKATSTPVSIKQYPMSQEARLGIKPHIQRLLDQGILVPCQSPWNTPLLPVKKPGTNDYRPVQDLREVNKRVEDIHPTVPNPYNLLSGLPPSHQWYTVLDLKDAFFCLRLHPTSQPLFAFEWRDPEMGISGQLTWTRLPQGFKNSPTLFNEALHRDLAGFRIQHPDLILLQYVDDLLLAATSELDCQQGTRALLQTLGDLGYRASAKKAQICQKQVKYLGYLLKEGQRWLTEARKETVMGQPIPKTPRQLREFLGKAGFCRLFIPGFAEMAAPLYPLTKPGTLFNWGPDQQKAFQEIKQALLTAPALGLPDLTKPFELFVDEKQGYAKGVLTQKLGPWRRPVAYLSKKLDPVAAGWPPCLRMVAAIAVLTKDAGKLTMGQPLVILAPHAVEALVKQPPDRWLSNARMTHYQALLLDTDRVQFGPVVALNPATLLPLPEEGLQHDCLDILAEAHGTRSDLMDQPLPDADHTWYTDGSSFLQEGQRKAGAAVTTETEVIWARALPAGTSAQRAELIALTQALKMAEGKKLNVYTDSRYAFATAHIHGEIYRRRGWLTSEGKEIKNKDEILALLKALFLPKRLSIIHCPGHQKGNSAEARGNRMADQAAREVATRETPETSTLLAGKRTADGSEFEKRTADGSEFESPKKKAKVE

SEQ ID NO: 2348 - protein, 2093 aa, synthetic construct
MPAAKRVKLDGGDKKYSIGLDIGTNSVGWAVITDEYKVPSKKFKVLGNTDRHSIKKNLIGALLFDSGETAEATRLKRTARRRYTRRKNRICYLQEIFSNEMAKVDDSFFHRLEESFLVEEDKKHERHPIFGNIVDEVAYHEKYPTIYHLRKKLVDSTDKADLRLIYLALAHMIKFRGHFLIEGDLNPDNSDVDKLFIQLVQTYNQLFEENPINASGVDAKAILSARLSKSRRLENLIAQLPGEKKNGLFGNLIALSLGLTPNFKSNFDLAEDAKLQLSKDTYDDDLDNLLAQIGDQYADLFLAAKNLSDAILLSDILRVNTEITKAPLSASMIKRYDEHHQDLTLLKALVRQQLPEKYKEIFFDQSKNGYAGYIDGGASQEEFYKFIKPILEKMDGTEELLVKLNREDLLRKQRTFDNGSIPHQIHLGELHAILRRQEDFYPFLKDNREKIEKILTFRIPYYVGPLARGNSRFAWMTRKSEETITPWNFEEVVDKGASAQSFIERMTNFDKNLPNEKVLPKHSLLYEYFTVYNELTKVKYVTEGMRKPAFLSGEQKKAIVDLLFKTNRKVTVKQLKEDYFKKIECFDSVEISGVEDRFNASLGTYHDLLKIIKDKDFLDNEENEDILEDIVLTLTLFEDREMIEERLKTYAHLFDDKVMKQLKRRRYTGWGRLSRKLINGIRDKQSGKTILDFLKSDGFANRNFMQLIHDDSLTFKEDIQKAQVSGQGDSLHEHIANLAGSPAIKKGILQTVKVVDELVKVMGRHKPENIVIEMARENQTTQKGQKNSRERMKRIEEGIKELGSQILKEHPVENTQLQNEKLYLYYLQNGRDMYVDQELDINRLSDYDVDHIVPQSFLKDDSIDNKVLTRSDKARGKSDNVPSEEVVKKMKNYWRQLLNAKLITQRKFDNLTKAERGGLSELDKAGFIKRQLVETRQITKHVAQILDSRMNTKYDENDKLIREVKVITLKSKLVSDFRKDFQFYKVREINNYHHAHDAYLNAVVGTALIKKYPKLESEFVYGDYKVYDVRKMIAKSEQEIGKATAKYFFYSNIMNFFKTEITLANGEIRKRPLIETNGETGEIVWDKGRDFATVRKVLSMPQVNIVKKTEVQTGGFSKESILPKRNSDKLIARKKDWDPKKYGGFDSPTVAYSVLVVAKVEKGKSKKLKSVKELLGITIMERSSFEKNPIDFLEAKGYKEVKKDLIIKLPKYSLFELENGRKRMLASAGELQKGNELALPSKYVNFLYLASHYEKLKGSPEDNEQKQLFVEQHKHYLDEIIEQISEFSKRVILADANLDKVLSAYNKHRDKPIREQAENIIHLFTLTNLGAPAAFKYFDTTIDRKRYTSTKEVLDATLIHQSITGLYETRIDLSQLGGDGGEAAAKGGGGGTLNIEDEYRLHETSKEPDVSLGSTWLSDFPQAWAETGGMGLAVRQAPLIIPLKATSTPVSIKQYPMSQEARLGIKPHIQRLLDQGILVPCQSPWNTPLLPVKKPGTNDYRPVQDLREVNKRVEDIHPTVPNPYNLLSGLPPSHQWYTVLDLKDAFFCLRLHPTSQPLFAFEWRDPEMGISGQLTWTRLPQGFKNSPTLFNEALHRDLAGFRIQHPDLILLQYVDDLLLAATSELDCQQGTRALLQTLGDLGYRASAKKAQICQKQVKYLGYLLKEGQRWLTEARKETVMGQPIPKTPRQLREFLGKAGFCRLFIPGFAEMAAPLYPLTKPGTLFNWGPDQQKAFQEIKQALLTAPALGLPDLTKPFELFVDEKQGYAKGVLTQKLGPWRRPVAYLSKKLDPVAAGWPPCLRMVAAIAVLTKDAGKLTMGQPLVILAPHAVEALVKQPPDRWLSNARMTHYQALLLDTDRVQFGPVVALNPATLLPLPEEGLQHDCLDILAEAHGTRSDLMDQPLPDADHTWYTDGSSFLQEGQRKAGAAVTTETEVIWARALPAGTSAQRAELIALTQALKMAEGKKLNVYTDSRYAFATAHIHGEIYRRRGWLTSEGKEIKNKDEILALLKALFLPKRLSIIHCPGHQKGNSAEARGNRMADQAAREVATRETPETSTLLAGKRTADGSEFEKRTADGSEFESPKKKAKVE

SEQ ID NO: 2349 - protein, 2093 aa, synthetic construct
MPAAKRVKLDGGDKKYSIGLDIGTNSVGWAVITDEYKVPSKKFKVLGNTDRHSIKKNLIGALLFDSGETAEATRLKRTARRRYTRRKNRICYLQEIFSNEMAKVDDSFFHRLEESFLVEEDKKHERHPIFGNIVDEVAYHEKYPTIYHLRKKLVDSTDKADLRLIYLALAHMIKFRGHFLIEGDLNPDNSDVDKLFIQLVQTYNQLFEENPINASGVDAKAILSARLSKSRRLENLIAQLPGEKKNGLFGNLIALSLGLTPNFKSNFDLAEDAKLQLSKDTYDDDLDNLLAQIGDQYADLFLAAKNLSDAILLSDILRVNTEITKAPLSASMIKRYDEHHQDLTLLKALVRQQLPEKYKEIFFDQSKNGYAGYIDGGASQEEFYKFIKPILEKMDGTEELLVKLNREDLLRKQRTFDNGSIPHQIHLGELHAILRRQEDFYPFLKDNREKIEKILTFRIPYYVGPLARGNSRFAWMTRKSEETITPWNFEEVVDKGASAQSFIERMTNFDKNLPNEKVLPKHSLLYEYFTVYNELTKVKYVTEGMRKPAFLSGEQKKAIVDLLFKTNRKVTVKQLKEDYFKKIECFDSVEISGVEDRFNASLGTYHDLLKIIKDKDFLDNEENEDILEDIVLTLTLFEDREMIEERLKTYAHLFDDKVMKQLKRRRYTGWGRLSRKLINGIRDKQSGKTILDFLKSDGFANRNFMQLIHDDSLTFKEDIQKAQVSGQGDSLHEHIANLAGSPAIKKGILQTVKVVDELVKVMGRHKPENIVIEMARENQTTQKGQKNSRERMKRIEEGIKELGSQILKEHPVENTQLQNEKLYLYYLQNGRDMYVDQELDINRLSDYDVDHIVPQSFLKDDSIDNKVLTRSDKARGKSDNVPSEEVVKKMKNYWRQLLNAKLITQRKFDNLTKAERGGLSELDKAGFIKRQLVETRQITKHVAQILDSRMNTKYDENDKLIREVKVITLKSKLVSDFRKDFQFYKVREINNYHHAHDAYLNAVVGTALIKKYPKLESEFVYGDYKVYDVRKMIAKSEQEIGKATAKYFFYSNIMNFFKTEITLANGEIRKRPLIETNGETGEIVWDKGRDFATVRKVLSMPQVNIVKKTEVQTGGFSKESILPKRNSDKLIARKKDWDPKKYGGFDSPTVAYSVLVVAKVEKGKSKKLKSVKELLGITIMERSSFEKNPIDFLEAKGYKEVKKDLIIKLPKYSLFELENGRKRMLASAGELQKGNELALPSKYVNFLYLASHYEKLKGSPEDNEQKQLFVEQHKHYLDEIIEQISEFSKRVILADANLDKVLSAYNKHRDKPIREQAENIIHLFTLTNLGAPAAFKYFDTTIDRKRYTSTKEVLDATLIHQSITGLYETRIDLSQLGGDGGGGGGGGGGGGTLNIEDEYRLHETSKEPDVSLGSTWLSDFPQAWAETGGMGLAVRQAPLIIPLKATSTPVSIKQYPMSQEARLGIKPHIQRLLDQGILVPCQSPWNTPLLPVKKPGTNDYRPVQDLREVNKRVEDIHPTVPNPYNLLSGLPPSHQWYTVLDLKDAFFCLRLHPTSQPLFAFEWRDPEMGISGQLTWTRLPQGFKNSPTLFNEALHRDLAGFRIQHPDLILLQYVDDLLLAATSELDCQQGTRALLQTLGDLGYRASAKKAQICQKQVKYLGYLLKEGQRWLTEARKETVMGQPIPKTPRQLREFLGKAGFCRLFIPGFAEMAAPLYPLTKPGTLFNWGPDQQKAFQEIKQALLTAPALGLPDLTKPFELFVDEKQGYAKGVLTQKLGPWRRPVAYLSKKLDPVAAGWPPCLRMVAAIAVLTKDAGKLTMGQPLVILAPHAVEALVKQPPDRWLSNARMTHYQALLLDTDRVQFGPVVALNPATLLPLPEEGLQHDCLDILAEAHGTRSDLMDQPLPDADHTWYTDGSSFLQEGQRKAGAAVTTETEVIWARALPAGTSAQRAELIALTQALKMAEGKKLNVYTDSRYAFATAHIHGEIYRRRGWLTSEGKEIKNKDEILALLKALFLPKRLSIIHCPGHQKGNSAEARGNRMADQAAREVATRETPETSTLLAGKRTADGSEFEKRTADGSEFESPKKKAKVE

SEQ ID NO: 2350 - protein, 2093 aa, synthetic construct
MPAAKRVKLDGGDKKYSIGLDIGTNSVGWAVITDEYKVPSKKFKVLGNTDRHSIKKNLIGALLFDSGETAEATRLKRTARRRYTRRKNRICYLQEIFSNEMAKVDDSFFHRLEESFLVEEDKKHERHPIFGNIVDEVAYHEKYPTIYHLRKKLVDSTDKADLRLIYLALAHMIKFRGHFLIEGDLNPDNSDVDKLFIQLVQTYNQLFEENPINASGVDAKAILSARLSKSRRLENLIAQLPGEKKNGLFGNLIALSLGLTPNFKSNFDLAEDAKLQLSKDTYDDDLDNLLAQIGDQYADLFLAAKNLSDAILLSDILRVNTEITKAPLSASMIKRYDEHHQDLTLLKALVRQQLPEKYKEIFFDQSKNGYAGYIDGGASQEEFYKFIKPILEKMDGTEELLVKLNREDLLRKQRTFDNGSIPHQIHLGELHAILRRQEDFYPFLKDNREKIEKILTFRIPYYVGPLARGNSRFAWMTRKSEETITPWNFEEVVDKGASAQSFIERMTNFDKNLPNEKVLPKHSLLYEYFTVYNELTKVKYVTEGMRKPAFLSGEQKKAIVDLLFKTNRKVTVKQLKEDYFKKIECFDSVEISGVEDRFNASLGTYHDLLKIIKDKDFLDNEENEDILEDIVLTLTLFEDREMIEERLKTYAHLFDDKVMKQLKRRRYTGWGRLSRKLINGIRDKQSGKTILDFLKSDGFANRNFMQLIHDDSLTFKEDIQKAQVSGQGDSLHEHIANLAGSPAIKKGILQTVKVVDELVKVMGRHKPENIVIEMARENQTTQKGQKNSRERMKRIEEGIKELGSQILKEHPVENTQLQNEKLYLYYLQNGRDMYVDQELDINRLSDYDVDHIVPQSFLKDDSIDNKVLTRSDKARGKSDNVPSEEVVKKMKNYWRQLLNAKLITQRKFDNLTKAERGGLSELDKAGFIKRQLVETRQITKHVAQILDSRMNTKYDENDKLIREVKVITLKSKLVSDFRKDFQFYKVREINNYHHAHDAYLNAVVGTALIKKYPKLESEFVYGDYKVYDVRKMIAKSEQEIGKATAKYFFYSNIMNFFKTEITLANGEIRKRPLIETNGETGEIVWDKGRDFATVRKVLSMPQVNIVKKTEVQTGGFSKESILPKRNSDKLIARKKDWDPKKYGGFDSPTVAYSVLVVAKVEKGKSKKLKSVKELLGITIMERSSFEKNPIDFLEAKGYKEVKKDLIIKLPKYSLFELENGRKRMLASAGELQKGNELALPSKYVNFLYLASHYEKLKGSPEDNEQKQLFVEQHKHYLDEIIEQISEFSKRVILADANLDKVLSAYNKHRDKPIREQAENIIHLFTLTNLGAPAAFKYFDTTIDRKRYTSTKEVLDATLIHQSITGLYETRIDLSQLGGDGGEAAAKGSSGGTLNIEDEYRLHETSKEPDVSLGSTWLSDFPQAWAETGGMGLAVRQAPLIIPLKATSTPVSIKQYPMSQEARLGIKPHIQRLLDQGILVPCQSPWNTPLLPVKKPGTNDYRPVQDLREVNKRVEDIHPTVPNPYNLLSGLPPSHQWYTVLDLKDAFFCLRLHPTSQPLFAFEWRDPEMGISGQLTWTRLPQGFKNSPTLFNEALHRDLAGFRIQHPDLILLQYVDDLLLAATSELDCQQGTRALLQTLGDLGYRASAKKAQICQKQVKYLGYLLKEGQRWLTEARKETVMGQPIPKTPRQLREFLGKAGFCRLFIPGFAEMAAPLYPLTKPGTLFNWGPDQQKAFQEIKQALLTAPALGLPDLTKPFELFVDEKQGYAKGVLTQKLGPWRRPVAYLSKKLDPVAAGWPPCLRMVAAIAVLTKDAGKLTMGQPLVILAPHAVEALVKQPPDRWLSNARMTHYQALLLDTDRVQFGPVVALNPATLLPLPEEGLQHDCLDILAEAHGTRSDLMDQPLPDADHTWYTDGSSFLQEGQRKAGAAVTTETEVIWARALPAGTSAQRAELIALTQALKMAEGKKLNVYTDSRYAFATAHIHGEIYRRRGWLTSEGKEIKNKDEILALLKALFLPKRLSIIHCPGHQKGNSAEARGNRMADQAAREVATRETPETSTLLAGKRTADGSEFEKRTADGSEFESPKKKAKVE

SEQ ID NO: 2351 - protein, 2096 aa, synthetic construct
MPAAKRVKLDGGDKKYSIGLDIGTNSVGWAVITDEYKVPSKKFKVLGNTDRHSIKKNLIGALLFDSGETAEATRLKRTARRRYTRRKNRICYLQEIFSNEMAKVDDSFFHRLEESFLVEEDKKHERHPIFGNIVDEVAYHEKYPTIYHLRKKLVDSTDKADLRLIYLALAHMIKFRGHFLIEGDLNPDNSDVDKLFIQLVQTYNQLFEENPINASGVDAKAILSARLSKSRRLENLIAQLPGEKKNGLFGNLIALSLGLTPNFKSNFDLAEDAKLQLSKDTYDDDLDNLLAQIGDQYADLFLAAKNLSDAILLSDILRVNTEITKAPLSASMIKRYDEHHQDLTLLKALVRQQLPEKYKEIFFDQSKNGYAGYIDGGASQEEFYKFIKPILEKMDGTEELLVKLNREDLLRKQRTFDNGSIPHQIHLGELHAILRRQEDFYPFLKDNREKIEKILTFRIPYYVGPLARGNSRFAWMTRKSEETITPWNFEEVVDKGASAQSFIERMTNFDKNLPNEKVLPKHSLLYEYFTVYNELTKVKYVTEGMRKPAFLSGEQKKAIVDLLFKTNRKVTVKQLKEDYFKKIECFDSVEISGVEDRFNASLGTYHDLLKIIKDKDFLDNEENEDILEDIVLTLTLFEDREMIEERLKTYAHLFDDKVMKQLKRRRYTGWGRLSRKLINGIRDKQSGKTILDFLKSDGFANRNFMQLIHDDSLTFKEDIQKAQVSGQGDSLHEHIANLAGSPAIKKGILQTVKVVDELVKVMGRHKPENIVIEMARENQTTQKGQKNSRERMKRIEEGIKELGSQILKEHPVENTQLQNEKLYLYYLQNGRDMYVDQELDINRLSDYDVDHIVPQSFLKDDSIDNKVLTRSDKARGKSDNVPSEEVVKKMKNYWRQLLNAKLITQRKFDNLTKAERGGLSELDKAGFIKRQLVETRQITKHVAQILDSRMNTKYDENDKLIREVKVITLKSKLVSDFRKDFQFYKVREINNYHHAHDAYLNAVVGTALIKKYPKLESEFVYGDYKVYDVRKMIAKSEQEIGKATAKYFFYSNIMNFFKTEITLANGEIRKRPLIETNGETGEIVWDKGRDFATVRKVLSMPQVNIVKKTEVQTGGFSKESILPKRNSDKLIARKKDWDPKKYGGFDSPTVAYSVLVVAKVEKGKSKKLKSVKELLGITIMERSSFEKNPIDFLEAKGYKEVKKDLIIKLPKYSLFELENGRKRMLASAGELQKGNELALPSKYVNFLYLASHYEKLKGSPEDNEQKQLFVEQHKHYLDEIIEQISEFSKRVILADANLDKVLSAYNKHRDKPIREQAENIIHLFTLTNLGAPAAFKYFDTTIDRKRYTSTKEVLDATLIHQSITGLYETRIDLSQLGGDGGGGGGGSEAAAKGGTLNIEDEYRLHETSKEPDVSLGSTWLSDFPQAWAETGGMGLAVRQAPLIIPLKATSTPVSIKQYPMSQEARLGIKPHIQRLLDQGILVPCQSPWNTPLLPVKKPGTNDYRPVQDLREVNKRVEDIHPTVPNPYNLLSGLPPSHQWYTVLDLKDAFFCLRLHPTSQPLFAFEWRDPEMGISGQLTWTRLPQGFKNSPTLFNEALHRDLAGFRIQHPDLILLQYVDDLLLAATSELDCQQGTRALLQTLGDLGYRASAKKAQICQKQVKYLGYLLKEGQRWLTEARKETVMGQPIPKTPRQLREFLGKAGFCRLFIPGFAEMAAPLYPLTKPGTLFNWGPDQQKAFQEIKQALLTAPALGLPDLTKPFELFVDEKQGYAKGVLTQKLGPWRRPVAYLSKKLDPVAAGWPPCLRMVAAIAVLTKDAGKLTMGQPLVILAPHAVEALVKQPPDRWLSNARMTHYQALLLDTDRVQFGPVVALNPATLLPLPEEGLQHDCLDILAEAHGTRSDLMDQPLPDADHTWYTDGSSFLQEGQRKAGAAVTTETEVIWARALPAGTSAQRAELIALTQALKMAEGKKLNVYTDSRYAFATAHIHGEIYRRRGWLTSEGKEIKNKDEILALLKALFLPKRLSIIHCPGHQKGNSAEARGNRMADQAAREVATRETPETSTLLAGKRTADGSEFEKRTADGSEFESPKKKAKVE

SEQ ID NO: 2352 - protein, 2096 aa, synthetic construct
MPAAKRVKLDGGDKKYSIGLDIGTNSVGWAVITDEYKVPSKKFKVLGNTDRHSIKKNLIGALLFDSGETAEATRLKRTARRRYTRRKNRICYLQEIFSNEMAKVDDSFFHRLEESFLVEEDKKHERHPIFGNIVDEVAYHEKYPTIYHLRKKLVDSTDKADLRLIYLALAHMIKFRGHFLIEGDLNPDNSDVDKLFIQLVQTYNQLFEENPINASGVDAKAILSARLSKSRRLENLIAQLPGEKKNGLFGNLIALSLGLTPNFKSNFDLAEDAKLQLSKDTYDDDLDNLLAQIGDQYADLFLAAKNLSDAILLSDILRVNTEITKAPLSASMIKRYDEHHQDLTLLKALVRQQLPEKYKEIFFDQSKNGYAGYIDGGASQEEFYKFIKPILEKMDGTEELLVKLNREDLLRKQRTFDNGSIPHQIHLGELHAILRRQEDFYPFLKDNREKIEKILTFRIPYYVGPLARGNSRFAWMTRKSEETITPWNFEEVVDKGASAQSFIERMTNFDKNLPNEKVLPKHSLLYEYFTVYNELTKVKYVTEGMRKPAFLSGEQKKAIVDLLFKTNRKVTVKQLKEDYFKKIECFDSVEISGVEDRFNASLGTYHDLLKIIKDKDFLDNEENEDILEDIVLTLTLFEDREMIEERLKTYAHLFDDKVMKQLKRRRYTGWGRLSRKLINGIRDKQSGKTILDFLKSDGFANRNFMQLIHDDSLTFKEDIQKAQVSGQGDSLHEHIANLAGSPAIKKGILQTVKVVDELVKVMGRHKPENIVIEMARENQTTQKGQKNSRERMKRIEEGIKELGSQILKEHPVENTQLQNEKLYLYYLQNGRDMYVDQELDINRLSDYDVDHIVPQSFLKDDSIDNKVLTRSDKARGKSDNVPSEEVVKKMKNYWRQLLNAKLITQRKFDNLTKAERGGLSELDKAGFIKRQLVETRQITKHVAQILDSRMNTKYDENDKLIREVKVITLKSKLVSDFRKDFQFYKVREINNYHHAHDAYLNAVVGTALIKKYPKLESEFVYGDYKVYDVRKMIAKSEQEIGKATAKYFFYSNIMNFFKTEITLANGEIRKRPLIETNGETGEIVWDKGRDFATVRKVLSMPQVNIVKKTEVQTGGFSKESILPKRNSDKLIARKKDWDPKKYGGFDSPTVAYSVLVVAKVEKGKSKKLKSVKELLGITIMERSSFEKNPIDFLEAKGYKEVKKDLIIKLPKYSLFELENGRKRMLASAGELQKGNELALPSKYVNFLYLASHYEKLKGSPEDNEQKQLFVEQHKHYLDEIIEQISEFSKRVILADANLDKVLSAYNKHRDKPIREQAENIIHLFTLTNLGAPAAFKYFDTTIDRKRYTSTKEVLDATLIHQSITGLYETRIDLSQLGGDGGGSSEAAAKGGSGGTLNIEDEYRLHETSKEPDVSLGSTWLSDFPQAWAETGGMGLAVRQAPLIIPLKATSTPVSIKQYPMSQEARLGIKPHIQRLLDQGILVPCQSPWNTPLLPVKKPGTNDYRPVQDLREVNKRVEDIHPTVPNPYNLLSGLPPSHQWYTVLDLKDAFFCLRLHPTSQPLFAFEWRDPEMGISGQLTWTRLPQGFKNSPTLFNEALHRDLAGFRIQHPDLILLQYVDDLLLAATSELDCQQGTRALLQTLGDLGYRASAKKAQICQKQVKYLGYLLKEGQRWLTEARKETVMGQPIPKTPRQLREFLGKAGFCRLFIPGFAEMAAPLYPLTKPGTLFNWGPDQQKAFQEIKQALLTAPALGLPDLTKPFELFVDEKQGYAKGVLTQKLGPWRRPVAYLSKKLDPVAAGWPPCLRMVAAIAVLTKDAGKLTMGQPLVILAPHAVEALVKQPPDRWLSNARMTHYQALLLDTDRVQFGPVVALNPATLLPLPEEGLQHDCLDILAEAHGTRSDLMDQPLPDADHTWYTDGSSFLQEGQRKAGAAVTTETEVIWARALPAGTSAQRAELIALTQALKMAEGKKLNVYTDSRYAFATAHIHGEIYRRRGWLTSEGKEIKNKDEILALLKALFLPKRLSIIHCPGHQKGNSAEARGNRMADQAAREVATRETPETSTLLAGKRTADGSEFEKRTADGSEFESPKKKAKVE

SEQ ID NO: 2353 - protein, 2091 aa, synthetic construct
MPAAKRVKLDGGDKKYSIGLDIGTNSVGWAVITDEYKVPSKKFKVLGNTDRHSIKKNLIGALLFDSGETAEATRLKRTARRRYTRRKNRICYLQEIFSNEMAKVDDSFFHRLEESFLVEEDKKHERHPIFGNIVDEVAYHEKYPTIYHLRKKLVDSTDKADLRLIYLALAHMIKFRGHFLIEGDLNPDNSDVDKLFIQLVQTYNQLFEENPINASGVDAKAILSARLSKSRRLENLIAQLPGEKKNGLFGNLIALSLGLTPNFKSNFDLAEDAKLQLSKDTYDDDLDNLLAQIGDQYADLFLAAKNLSDAILLSDILRVNTEITKAPLSASMIKRYDEHHQDLTLLKALVRQQLPEKYKEIFFDQSKNGYAGYIDGGASQEEFYKFIKPILEKMDGTEELLVKLNREDLLRKQRTFDNGSIPHQIHLGELHAILRRQEDFYPFLKDNREKIEKILTFRIPYYVGPLARGNSRFAWMTRKSEETITPWNFEEVVDKGASAQSFIERMTNFDKNLPNEKVLPKHSLLYEYFTVYNELTKVKYVTEGMRKPAFLSGEQKKAIVDLLFKTNRKVTVKQLKEDYFKKIECFDSVEISGVEDRFNASLGTYHDLLKIIKDKDFLDNEENEDILEDIVLTLTLFEDREMIEERLKTYAHLFDDKVMKQLKRRRYTGWGRLSRKLINGIRDKQSGKTILDFLKSDGFANRNFMQLIHDDSLTFKEDIQKAQVSGQGDSLHEHIANLAGSPAIKKGILQTVKVVDELVKVMGRHKPENIVIEMARENQTTQKGQKNSRERMKRIEEGIKELGSQILKEHPVENTQLQNEKLYLYYLQNGRDMYVDQELDINRLSDYDVDHIVPQSFLKDDSIDNKVLTRSDKARGKSDNVPSEEVVKKMKNYWRQLLNAKLITQRKFDNLTKAERGGLSELDKAGFIKRQLVETRQITKHVAQILDSRMNTKYDENDKLIREVKVITLKSKLVSDFRKDFQFYKVREINNYHHAHDAYLNAVVGTALIKKYPKLESEFVYGDYKVYDVRKMIAKSEQEIGKATAKYFFYSNIMNFFKTEITLANGEIRKRPLIETNGETGEIVWDKGRDFATVRKVLSMPQVNIVKKTEVQTGGFSKESILPKRNSDKLIARKKDWDPKKYGGFDSPTVAYSVLVVAKVEKGKSKKLKSVKELLGITIMERSSFEKNPIDFLEAKGYKEVKKDLIIKLPKYSLFELENGRKRMLASAGELQKGNELALPSKYVNFLYLASHYEKLKGSPEDNEQKQLFVEQHKHYLDEIIEQISEFSKRVILADANLDKVLSAYNKHRDKPIREQAENIIHLFTLTNLGAPAAFKYFDTTIDRKRYTSTKEVLDATLIHQSITGLYETRIDLSQLGGDGGGGSGSSGGTLNIEDEYRLHETSKEPDVSLGSTWLSDFPQAWAETGGMGLAVRQAPLIIPLKATSTPVSIKQYPMSQEARLGIKPHIQRLLDQGILVPCQSPWNTPLLPVKKPGTNDYRPVQDLREVNKRVEDIHPTVPNPYNLLSGLPPSHQWYTVLDLKDAFFCLRLHPTSQPLFAFEWRDPEMGISGQLTWTRLPQGFKNSPTLFNEALHRDLAGFRIQHPDLILLQYVDDLLLAATSELDCQQGTRALLQTLGDLGYRASAKKAQICQKQVKYLGYLLKEGQRWLTEARKETVMGQPIPKTPRQLREFLGKAGFCRLFIPGFAEMAAPLYPLTKPGTLFNWGPDQQKAFQEIKQALLTAPALGLPDLTKPFELFVDEKQGYAKGVLTQKLGPWRRPVAYLSKKLDPVAAGWPPCLRMVAAIAVLTKDAGKLTMGQPLVILAPHAVEALVKQPPDRWLSNARMTHYQALLLDTDRVQFGPVVALNPATLLPLPEEGLQHDCLDILAEAHGTRSDLMDQPLPDADHTWYTDGSSFLQEGQRKAGAAVTTETEVIWARALPAGTSAQRAELIALTQALKMAEGKKLNVYTDSRYAFATAHIHGEIYRRRGWLTSEGKEIKNKDEILALLKALFLPKRLSIIHCPGHQKGNSAEARGNRMADQAAREVATRETPETSTLLAGKRTADGSEFEKRTADGSEFESPKKKAKVE

SEQ ID NO: 2354 - protein, 2091 aa, synthetic construct
MPAAKRVKLDGGDKKYSIGLDIGTNSVGWAVITDEYKVPSKKFKVLGNTDRHSIKKNLIGALLFDSGETAEATRLKRTARRRYTRRKNRICYLQEIFSNEMAKVDDSFFHRLEESFLVEEDKKHERHPIFGNIVDEVAYHEKYPTIYHLRKKLVDSTDKADLRLIYLALAHMIKFRGHFLIEGDLNPDNSDVDKLFIQLVQTYNQLFEENPINASGVDAKAILSARLSKSRRLENLIAQLPGEKKNGLFGNLIALSLGLTPNFKSNFDLAEDAKLQLSKDTYDDDLDNLLAQIGDQYADLFLAAKNLSDAILLSDILRVNTEITKAPLSASMIKRYDEHHQDLTLLKALVRQQLPEKYKEIFFDQSKNGYAGYIDGGASQEEFYKFIKPILEKMDGTEELLVKLNREDLLRKQRTFDNGSIPHQIHLGELHAILRRQEDFYPFLKDNREKIEKILTFRIPYYVGPLARGNSRFAWMTRKSEETITPWNFEEVVDKGASAQSFIERMTNFDKNLPNEKVLPKHSLLYEYFTVYNELTKVKYVTEGMRKPAFLSGEQKKAIVDLLFKTNRKVTVKQLKEDYFKKIECFDSVEISGVEDRFNASLGTYHDLLKIIKDKDFLDNEENEDILEDIVLTLTLFEDREMIEERLKTYAHLFDDKVMKQLKRRRYTGWGRLSRKLINGIRDKQSGKTILDFLKSDGFANRNFMQLIHDDSLTFKEDIQKAQVSGQGDSLHEHIANLAGSPAIKKGILQTVKVVDELVKVMGRHKPENIVIEMARENQTTQKGQKNSRERMKRIEEGIKELGSQILKEHPVENTQLQNEKLYLYYLQNGRDMYVDQELDINRLSDYDVDHIVPQSFLKDDSIDNKVLTRSDKARGKSDNVPSEEVVKKMKNYWRQLLNAKLITQRKFDNLTKAERGGLSELDKAGFIKRQLVETRQITKHVAQILDSRMNTKYDENDKLIREVKVITLKSKLVSDFRKDFQFYKVREINNYHHAHDAYLNAVVGTALIKKYPKLESEFVYGDYKVYDVRKMIAKSEQEIGKATAKYFFYSNIMNFFKTEITLANGEIRKRPLIETNGETGEIVWDKGRDFATVRKVLSMPQVNIVKKTEVQTGGFSKESILPKRNSDKLIARKKDWDPKKYGGFDSPTVAYSVLVVAKVEKGKSKKLKSVKELLGITIMERSSFEKNPIDFLEAKGYKEVKKDLIIKLPKYSLFELENGRKRMLASAGELQKGNELALPSKYVNFLYLASHYEKLKGSPEDNEQKQLFVEQHKHYLDEIIEQISEFSKRVILADANLDKVLSAYNKHRDKPIREQAENIIHLFTLTNLGAPAAFKYFDTTIDRKRYTSTKEVLDATLIHQSITGLYETRIDLSQLGGDGGGGGGGGGGTLNIEDEYRLHETSKEPDVSLGSTWLSDFPQAWAETGGMGLAVRQAPLIIPLKATSTPVSIKQYPMSQEARLGIKPHIQRLLDQGILVPCQSPWNTPLLPVKKPGTNDYRPVQDLREVNKRVEDIHPTVPNPYNLLSGLPPSHQWYTVLDLKDAFFCLRLHPTSQPLFAFEWRDPEMGISGQLTWTRLPQGFKNSPTLFNEALHRDLAGFRIQHPDLILLQYVDDLLLAATSELDCQQGTRALLQTLGDLGYRASAKKAQICQKQVKYLGYLLKEGQRWLTEARKETVMGQPIPKTPRQLREFLGKAGFCRLFIPGFAEMAAPLYPLTKPGTLFNWGPDQQKAFQEIKQALLTAPALGLPDLTKPFELFVDEKQGYAKGVLTQKLGPWRRPVAYLSKKLDPVAAGWPPCLRMVAAIAVLTKDAGKLTMGQPLVILAPHAVEALVKQPPDRWLSNARMTHYQALLLDTDRVQFGPVVALNPATLLPLPEEGLQHDCLDILAEAHGTRSDLMDQPLPDADHTWYTDGSSFLQEGQRKAGAAVTTETEVIWARALPAGTSAQRAELIALTQALKMAEGKKLNVYTDSRYAFATAHIHGEIYRRRGWLTSEGKEIKNKDEILALLKALFLPKRLSIIHCPGHQKGNSAEARGNRMADQAAREVATRETPETSTLLAGKRTADGSEFEKRTADGSEFESPKKKAKVE

SEQ ID NO: 2355 - protein, 2096 aa, synthetic construct
MPAAKRVKLDGGDKKYSIGLDIGTNSVGWAVITDEYKVPSKKFKVLGNTDRHSIKKNLIGALLFDSGETAEATRLKRTARRRYTRRKNRICYLQEIFSNEMAKVDDSFFHRLEESFLVEEDKKHERHPIFGNIVDEVAYHEKYPTIYHLRKKLVDSTDKADLRLIYLALAHMIKFRGHFLIEGDLNPDNSDVDKLFIQLVQTYNQLFEENPINASGVDAKAILSARLSKSRRLENLIAQLPGEKKNGLFGNLIALSLGLTPNFKSNFDLAEDAKLQLSKDTYDDDLDNLLAQIGDQYADLFLAAKNLSDAILLSDILRVNTEITKAPLSASMIKRYDEHHQDLTLLKALVRQQLPEKYKEIFFDQSKNGYAGYIDGGASQEEFYKFIKPILEKMDGTEELLVKLNREDLLRKQRTFDNGSIPHQIHLGELHAILRRQEDFYPFLKDNREKIEKILTFRIPYYVGPLARGNSRFAWMTRKSEETITPWNFEEVVDKGASAQSFIERMTNFDKNLPNEKVLPKHSLLYEYFTVYNELTKVKYVTEGMRKPAFLSGEQKKAIVDLLFKTNRKVTVKQLKEDYFKKIECFDSVEISGVEDRFNASLGTYHDLLKIIKDKDFLDNEENEDILEDIVLTLTLFEDREMIEERLKTYAHLFDDKVMKQLKRRRYTGWGRLSRKLINGIRDKQSGKTILDFLKSDGFANRNFMQLIHDDSLTFKEDIQKAQVSGQGDSLHEHIANLAGSPAIKKGILQTVKVVDELVKVMGRHKPENIVIEMARENQTTQKGQKNSRERMKRIEEGIKELGSQILKEHPVENTQLQNEKLYLYYLQNGRDMYVDQELDINRLSDYDVDHIVPQSFLKDDSIDNKVLTRSDKARGKSDNVPSEEVVKKMKNYWRQLLNAKLITQRKFDNLTKAERGGLSELDKAGFIKRQLVETRQITKHVAQILDSRMNTKYDENDKLIREVKVITLKSKLVSDFRKDFQFYKVREINNYHHAHDAYLNAVVGTALIKKYPKLESEFVYGDYKVYDVRKMIAKSEQEIGKATAKYFFYSNIMNFFKTEITLANGEIRKRPLIETNGETGEIVWDKGRDFATVRKVLSMPQVNIVKKTEVQTGGFSKESILPKRNSDKLIARKKDWDPKKYGGFDSPTVAYSVLVVAKVEKGKSKKLKSVKELLGITIMERSSFEKNPIDFLEAKGYKEVKKDLIIKLPKYSLFELENGRKRMLASAGELQKGNELALPSKYVNFLYLASHYEKLKGSPEDNEQKQLFVEQHKHYLDEIIEQISEFSKRVILADANLDKVLSAYNKHRDKPIREQAENIIHLFTLTNLGAPAAFKYFDTTIDRKRYTSTKEVLDATLIHQSITGLYETRIDLSQLGGDGGPAPGSSEAAAKGGTLNIEDEYRLHETSKEPDVSLGSTWLSDFPQAWAETGGMGLAVRQAPLIIPLKATSTPVSIKQYPMSQEARLGIKPHIQRLLDQGILVPCQSPWNTPLLPVKKPGTNDYRPVQDLREVNKRVEDIHPTVPNPYNLLSGLPPSHQWYTVLDLKDAFFCLRLHPTSQPLFAFEWRDPEMGISGQLTWTRLPQGFKNSPTLFNEALHRDLAGFRIQHPDLILLQYVDDLLLAATSELDCQQGTRALLQTLGDLGYRASAKKAQICQKQVKYLGYLLKEGQRWLTEARKETVMGQPIPKTPRQLREFLGKAGFCRLFIPGFAEMAAPLYPLTKPGTLFNWGPDQQKAFQEIKQALLTAPALGLPDLTKPFELFVDEKQGYAKGVLTQKLGPWRRPVAYLSKKLDPVAAGWPPCLRMVAAIAVLTKDAGKLTMGQPLVILAPHAVEALVKQPPDRWLSNARMTHYQALLLDTDRVQFGPVVALNPATLLPLPEEGLQHDCLDILAEAHGTRSDLMDQPLPDADHTWYTDGSSFLQEGQRKAGAAVTTETEVIWARALPAGTSAQRAELIALTQALKMAEGKKLNVYTDSRYAFATAHIHGEIYRRRGWLTSEGKEIKNKDEILALLKALFLPKRLSIIHCPGHQKGNSAEARGNRMADQAAREVATRETPETSTLLAGKRTADGSEFEKRTADGSEFESPKKKAKVE

SEQ ID NO: 2356 - protein, 2093 aa, synthetic construct
MPAAKRVKLDGGDKKYSIGLDIGTNSVGWAVITDEYKVPSKKFKVLGNTDRHSIKKNLIGALLFDSGETAEATRLKRTARRRYTRRKNRICYLQEIFSNEMAKVDDSFFHRLEESFLVEEDKKHERHPIFGNIVDEVAYHEKYPTIYHLRKKLVDSTDKADLRLIYLALAHMIKFRGHFLIEGDLNPDNSDVDKLFIQLVQTYNQLFEENPINASGVDAKAILSARLSKSRRLENLIAQLPGEKKNGLFGNLIALSLGLTPNFKSNFDLAEDAKLQLSKDTYDDDLDNLLAQIGDQYADLFLAAKNLSDAILLSDILRVNTEITKAPLSASMIKRYDEHHQDLTLLKALVRQQLPEKYKEIFFDQSKNGYAGYIDGGASQEEFYKFIKPILEKMDGTEELLVKLNREDLLRKQRTFDNGSIPHQIHLGELHAILRRQEDFYPFLKDNREKIEKILTFRIPYYVGPLARGNSRFAWMTRKSEETITPWNFEEVVDKGASAQSFIERMTNFDKNLPNEKVLPKHSLLYEYFTVYNELTKVKYVTEGMRKPAFLSGEQKKAIVDLLFKTNRKVTVKQLKEDYFKKIECFDSVEISGVEDRFNASLGTYHDLLKIIKDKDFLDNEENEDILEDIVLTLTLFEDREMIEERLKTYAHLFDDKVMKQLKRRRYTGWGRLSRKLINGIRDKQSGKTILDFLKSDGFANRNFMQLIHDDSLTFKEDIQKAQVSGQGDSLHEHIANLAGSPAIKKGILQTVKVVDELVKVMGRHKPENIVIEMARENQTTQKGQKNSRERMKRIEEGIKELGSQILKEHPVENTQLQNEKLYLYYLQNGRDMYVDQELDINRLSDYDVDHIVPQSFLKDDSIDNKVLTRSDKARGKSDNVPSEEVVKKMKNYWRQLLNAKLITQRKFDNLTKAERGGLSELDKAGFIKRQLVETRQITKHVAQILDSRMNTKYDENDKLIREVKVITLKSKLVSDFRKDFQFYKVREINNYHHAHDAYLNAVVGTALIKKYPKLESEFVYGDYKVYDVRKMIAKSEQEIGKATAKYFFYSNIMNFFKTEITLANGEIRKRPLIETNGETGEIVWDKGRDFATVRKVLSMPQVNIVKKTEVQTGGFSKESILPKRNSDKLIARKKDWDPKKYGGFDSPTVAYSVLVVAKVEKGKSKKLKSVKELLGITIMERSSFEKNPIDFLEAKGYKEVKKDLIIKLPKYSLFELENGRKRMLASAGELQKGNELALPSKYVNFLYLASHYEKLKGSPEDNEQKQLFVEQHKHYLDEIIEQISEFSKRVILADANLDKVLSAYNKHRDKPIREQAENIIHLFTLTNLGAPAAFKYFDTTIDRKRYTSTKEVLDATLIHQSITGLYETRIDLSQLGGDGGPAPEAAAKGGTLNIEDEYRLHETSKEPDVSLGSTWLSDFPQAWAETGGMGLAVRQAPLIIPLKATSTPVSIKQYPMSQEARLGIKPHIQRLLDQGILVPCQSPWNTPLLPVKKPGTNDYRPVQDLREVNKRVEDIHPTVPNPYNLLSGLPPSHQWYTVLDLKDAFFCLRLHPTSQPLFAFEWRDPEMGISGQLTWTRLPQGFKNSPTLFNEALHRDLAGFRIQHPDLILLQYVDDLLLAATSELDCQQGTRALLQTLGDLGYRASAKKAQICQKQVKYLGYLLKEGQRWLTEARKETVMGQPIPKTPRQLREFLGKAGFCRLFIPGFAEMAAPLYPLTKPGTLFNWGPDQQKAFQEIKQALLTAPALGLPDLTKPFELFVDEKQGYAKGVLTQKLGPWRRPVAYLSKKLDPVAAGWPPCLRMVAAIAVLTKDAGKLTMGQPLVILAPHAVEALVKQPPDRWLSNARMTHYQALLLDTDRVQFGPVVALNPATLLPLPEEGLQHDCLDILAEAHGTRSDLMDQPLPDADHTWYTDGSSFLQEGQRKAGAAVTTETEVIWARALPAGTSAQRAELIALTQALKMAEGKKLNVYTDSRYAFATAHIHGEIYRRRGWLTSEGKEIKNKDEILALLKALFLPKRLSIIHCPGHQKGNSAEARGNRMADQAAREVATRETPETSTLLAGKRTADGSEFEKRTADGSEFESPKKKAKVE

SEQ ID NO: 2357 - protein, 2096 aa, synthetic construct
MPAAKRVKLDGGDKKYSIGLDIGTNSVGWAVITDEYKVPSKKFKVLGNTDRHSIKKNLIGALLFDSGETAEATRLKRTARRRYTRRKNRICYLQEIFSNEMAKVDDSFFHRLEESFLVEEDKKHERHPIFGNIVDEVAYHEKYPTIYHLRKKLVDSTDKADLRLIYLALAHMIKFRGHFLIEGDLNPDNSDVDKLFIQLVQTYNQLFEENPINASGVDAKAILSARLSKSRRLENLIAQLPGEKKNGLFGNLIALSLGLTPNFKSNFDLAEDAKLQLSKDTYDDDLDNLLAQIGDQYADLFLAAKNLSDAILLSDILRVNTEITKAPLSASMIKRYDEHHQDLTLLKALVRQQLPEKYKEIFFDQSKNGYAGYIDGGASQEEFYKFIKPILEKMDGTEELLVKLNREDLLRKQRTFDNGSIPHQIHLGELHAILRRQEDFYPFLKDNREKIEKILTFRIPYYVGPLARGNSRFAWMTRKSEETITPWNFEEVVDKGASAQSFIERMTNFDKNLPNEKVLPKHSLLYEYFTVYNELTKVKYVTEGMRKPAFLSGEQKKAIVDLLFKTNRKVTVKQLKEDYFKKIECFDSVEISGVEDRFNASLGTYHDLLKIIKDKDFLDNEENEDILEDIVLTLTLFEDREMIEERLKTYAHLFDDKVMKQLKRRRYTGWGRLSRKLINGIRDKQSGKTILDFLKSDGFANRNFMQLIHDDSLTFKEDIQKAQVSGQGDSLHEHIANLAGSPAIKKGILQTVKVVDELVKVMGRHKPENIVIEMARENQTTQKGQKNSRERMKRIEEGIKELGSQILKEHPVENTQLQNEKLYLYYLQNGRDMYVDQELDINRLSDYDVDHIVPQSFLKDDSIDNKVLTRSDKARGKSDNVPSEEVVKKMKNYWRQLLNAKLITQRKFDNLTKAERGGLSELDKAGFIKRQLVETRQITKHVAQILDSRMNTKYDENDKLIREVKVITLKSKLVSDFRKDFQFYKVREINNYHHAHDAYLNAVVGTALIKKYPKLESEFVYGDYKVYDVRKMIAKSEQEIGKATAKYFFYSNIMNFFKTEITLANGEIRKRPLIETNGETGEIVWDKGRDFATVRKVLSMPQVNIVKKTEVQTGGFSKESILPKRNSDKLIARKKDWDPKKYGGFDSPTVAYSVLVVAKVEKGKSKKLKSVKELLGITIMERSSFEKNPIDFLEAKGYKEVKKDLIIKLPKYSLFELENGRKRMLASAGELQKGNELALPSKYVNFLYLASHYEKLKGSPEDNEQKQLFVEQHKHYLDEIIEQISEFSKRVILADANLDKVLSAYNKHRDKPIREQAENIIHLFTLTNLGAPAAFKYFDTTIDRKRYTSTKEVLDATLIHQSITGLYETRIDLSQLGGDGGEAAAKPAPGSSGGTLNIEDEYRLHETSKEPDVSLGSTWLSDFPQAWAETGGMGLAVRQAPLIIPLKATSTPVSIKQYPMSQEARLGIKPHIQRLLDQGILVPCQSPWNTPLLPVKKPGTNDYRPVQDLREVNKRVEDIHPTVPNPYNLLSGLPPSHQWYTVLDLKDAFFCLRLHPTSQPLFAFEWRDPEMGISGQLTWTRLPQGFKNSPTLFNEALHRDLAGFRIQHPDLILLQYVDDLLLAATSELDCQQGTRALLQTLGDLGYRASAKKAQICQKQVKYLGYLLKEGQRWLTEARKETVMGQPIPKTPRQLREFLGKAGFCRLFIPGFAEMAAPLYPLTKPGTLFNWGPDQQKAFQEIKQALLTAPALGLPDLTKPFELFVDEKQGYAKGVLTQKLGPWRRPVAYLSKKLDPVAAGWPPCLRMVAAIAVLTKDAGKLTMGQPLVILAPHAVEALVKQPPDRWLSNARMTHYQALLLDTDRVQFGPVVALNPATLLPLPEEGLQHDCLDILAEAHGTRSDLMDQPLPDADHTWYTDGSSFLQEGQRKAGAAVTTETEVIWARALPAGTSAQRAELIALTQALKMAEGKKLNVYTDSRYAFATAHIHGEIYRRRGWLTSEGKEIKNKDEILALLKALFLPKRLSIIHCPGHQKGNSAEARGNRMADQAAREVATRETPETSTLLAGKRTADGSEFEKRTADGSEFESPKKKAKVE

SEQ ID NO: 2358 - protein, 2096 aa, synthetic construct
MPAAKRVKLDGGDKKYSIGLDIGTNSVGWAVITDEYKVPSKKFKVLGNTDRHSIKKNLIGALLFDSGETAEATRLKRTARRRYTRRKNRICYLQEIFSNEMAKVDDSFFHRLEESFLVEEDKKHERHPIFGNIVDEVAYHEKYPTIYHLRKKLVDSTDKADLRLIYLALAHMIKFRGHFLIEGDLNPDNSDVDKLFIQLVQTYNQLFEENPINASGVDAKAILSARLSKSRRLENLIAQLPGEKKNGLFGNLIALSLGLTPNFKSNFDLAEDAKLQLSKDTYDDDLDNLLAQIGDQYADLFLAAKNLSDAILLSDILRVNTEITKAPLSASMIKRYDEHHQDLTLLKALVRQQLPEKYKEIFFDQSKNGYAGYIDGGASQEEFYKFIKPILEKMDGTEELLVKLNREDLLRKQRTFDNGSIPHQIHLGELHAILRRQEDFYPFLKDNREKIEKILTFRIPYYVGPLARGNSRFAWMTRKSEETITPWNFEEVVDKGASAQSFIERMTNFDKNLPNEKVLPKHSLLYEYFTVYNELTKVKYVTEGMRKPAFLSGEQKKAIVDLLFKTNRKVTVKQLKEDYFKKIECFDSVEISGVEDRFNASLGTYHDLLKIIKDKDFLDNEENEDILEDIVLTLTLFEDREMIEERLKTYAHLFDDKVMKQLKRRRYTGWGRLSRKLINGIRDKQSGKTILDFLKSDGFANRNFMQLIHDDSLTFKEDIQKAQVSGQGDSLHEHIANLAGSPAIKKGILQTVKVVDELVKVMGRHKPENIVIEMARENQTTQKGQKNSRERMKRIEEGIKELGSQILKEHPVENTQLQNEKLYLYYLQNGRDMYVDQELDINRLSDYDVDHIVPQSFLKDDSIDNKVLTRSDKARGKSDNVPSEEVVKKMKNYWRQLLNAKLITQRKFDNLTKAERGGLSELDKAGFIKRQLVETRQITKHVAQILDSRMNTKYDENDKLIREVKVITLKSKLVSDFRKDFQFYKVREINNYHHAHDAYLNAVVGTALIKKYPKLESEFVYGDYKVYDVRKMIAKSEQEIGKATAKYFFYSNIMNFFKTEITLANGEIRKRPLIETNGETGEIVWDKGRDFATVRKVLSMPQVNIVKKTEVQTGGFSKESILPKRNSDKLIARKKDWDPKKYGGFDSPTVAYSVLVVAKVEKGKSKKLKSVKELLGITIMERSSFEKNPIDFLEAKGYKEVKKDLIIKLPKYSLFELENGRKRMLASAGELQKGNELALPSKYVNFLYLASHYEKLKGSPEDNEQKQLFVEQHKHYLDEIIEQISEFSKRVILADANLDKVLSAYNKHRDKPIREQAENIIHLFTLTNLGAPAAFKYFDTTIDRKRYTSTKEVLDATLIHQSITGLYETRIDLSQLGGDGGGGSEAAAKGGGGGTLNIEDEYRLHETSKEPDVSLGSTWLSDFPQAWAETGGMGLAVRQAPLIIPLKATSTPVSIKQYPMSQEARLGIKPHIQRLLDQGILVPCQSPWNTPLLPVKKPGTNDYRPVQDLREVNKRVEDIHPTVPNPYNLLSGLPPSHQWYTVLDLKDAFFCLRLHPTSQPLFAFEWRDPEMGISGQLTWTRLPQGFKNSPTLFNEALHRDLAGFRIQHPDLILLQYVDDLLLAATSELDCQQGTRALLQTLGDLGYRASAKKAQICQKQVKYLGYLLKEGQRWLTEARKETVMGQPIPKTPRQLREFLGKAGFCRLFIPGFAEMAAPLYPLTKPGTLFNWGPDQQKAFQEIKQALLTAPALGLPDLTKPFELFVDEKQGYAKGVLTQKLGPWRRPVAYLSKKLDPVAAGWPPCLRMVAAIAVLTKDAGKLTMGQPLVILAPHAVEALVKQPPDRWLSNARMTHYQALLLDTDRVQFGPVVALNPATLLPLPEEGLQHDCLDILAEAHGTRSDLMDQPLPDADHTWYTDGSSFLQEGQRKAGAAVTTETEVIWARALPAGTSAQRAELIALTQALKMAEGKKLNVYTDSRYAFATAHIHGEIYRRRGWLTSEGKEIKNKDEILALLKALFLPKRLSIIHCPGHQKGNSAEARGNRMADQAAREVATRETPETSTLLAGKRTADGSEFEKRTADGSEFESPKKKAKVE

SEQ ID NO: 2359 - protein, 2096 aa, synthetic construct
MPAAKRVKLDGGDKKYSIGLDIGTNSVGWAVITDEYKVPSKKFKVLGNTDRHSIKKNLIGALLFDSGETAEATRLKRTARRRYTRRKNRICYLQEIFSNEMAKVDDSFFHRLEESFLVEEDKKHERHPIFGNIVDEVAYHEKYPTIYHLRKKLVDSTDKADLRLIYLALAHMIKFRGHFLIEGDLNPDNSDVDKLFIQLVQTYNQLFEENPINASGVDAKAILSARLSKSRRLENLIAQLPGEKKNGLFGNLIALSLGLTPNFKSNFDLAEDAKLQLSKDTYDDDLDNLLAQIGDQYADLFLAAKNLSDAILLSDILRVNTEITKAPLSASMIKRYDEHHQDLTLLKALVRQQLPEKYKEIFFDQSKNGYAGYIDGGASQEEFYKFIKPILEKMDGTEELLVKLNREDLLRKQRTFDNGSIPHQIHLGELHAILRRQEDFYPFLKDNREKIEKILTFRIPYYVGPLARGNSRFAWMTRKSEETITPWNFEEVVDKGASAQSFIERMTNFDKNLPNEKVLPKHSLLYEYFTVYNELTKVKYVTEGMRKPAFLSGEQKKAIVDLLFKTNRKVTVKQLKEDYFKKIECFDSVEISGVEDRFNASLGTYHDLLKIIKDKDFLDNEENEDILEDIVLTLTLFEDREMIEERLKTYAHLFDDKVMKQLKRRRYTGWGRLSRKLINGIRDKQSGKTILDFLKSDGFANRNFMQLIHDDSLTFKEDIQKAQVSGQGDSLHEHIANLAGSPAIKKGILQTVKVVDELVKVMGRHKPENIVIEMARENQTTQKGQKNSRERMKRIEEGIKELGSQILKEHPVENTQLQNEKLYLYYLQNGRDMYVDQELDINRLSDYDVDHIVPQSFLKDDSIDNKVLTRSDKARGKSDNVPSEEVVKKMKNYWRQLLNAKLITQRKFDNLTKAERGGLSELDKAGFIKRQLVETRQITKHVAQILDSRMNTKYDENDKLIREVKVITLKSKLVSDFRKDFQFYKVREINNYHHAHDAYLNAVVGTALIKKYPKLESEFVYGDYKVYDVRKMIAKSEQEIGKATAKYFFYSNIMNFFKTEITLANGEIRKRPLIETNGETGEIVWDKGRDFATVRKVLSMPQVNIVKKTEVQTGGFSKESILPKRNSDKLIARKKDWDPKKYGGFDSPTVAYSVLVVAKVEKGKSKKLKSVKELLGITIMERSSFEKNPIDFLEAKGYKEVKKDLIIKLPKYSLFELENGRKRMLASAGELQKGNELALPSKYVNFLYLASHYEKLKGSPEDNEQKQLFVEQHKHYLDEIIEQISEFSKRVILADANLDKVLSAYNKHRDKPIREQAENIIHLFTLTNLGAPAAFKYFDTTIDRKRYTSTKEVLDATLIHQSITGLYETRIDLSQLGGDGGGSSEAAAKPAPGGTLNIEDEYRLHETSKEPDVSLGSTWLSDFPQAWAETGGMGLAVRQAPLIIPLKATSTPVSIKQYPMSQEARLGIKPHIQRLLDQGILVPCQSPWNTPLLPVKKPGTNDYRPVQDLREVNKRVEDIHPTVPNPYNLLSGLPPSHQWYTVLDLKDAFFCLRLHPTSQPLFAFEWRDPEMGISGQLTWTRLPQGFKNSPTLFNEALHRDLAGFRIQHPDLILLQYVDDLLLAATSELDCQQGTRALLQTLGDLGYRASAKKAQICQKQVKYLGYLLKEGQRWLTEARKETVMGQPIPKTPRQLREFLGKAGFCRLFIPGFAEMAAPLYPLTKPGTLFNWGPDQQKAFQEIKQALLTAPALGLPDLTKPFELFVDEKQGYAKGVLTQKLGPWRRPVAYLSKKLDPVAAGWPPCLRMVAAIAVLTKDAGKLTMGQPLVILAPHAVEALVKQPPDRWLSNARMTHYQALLLDTDRVQFGPVVALNPATLLPLPEEGLQHDCLDILAEAHGTRSDLMDQPLPDADHTWYTDGSSFLQEGQRKAGAAVTTETEVIWARALPAGTSAQRAELIALTQALKMAEGKKLNVYTDSRYAFATAHIHGEIYRRRGWLTSEGKEIKNKDEILALLKALFLPKRLSIIHCPGHQKGNSAEARGNRMADQAAREVATRETPETSTLLAGKRTADGSEFEKRTADGSEFESPKKKAKVE

SEQ ID NO: 2360 - protein, 2094 aa, synthetic construct
MPAAKRVKLDGGDKKYSIGLDIGTNSVGWAVITDEYKVPSKKFKVLGNTDRHSIKKNLIGALLFDSGETAEATRLKRTARRRYTRRKNRICYLQEIFSNEMAKVDDSFFHRLEESFLVEEDKKHERHPIFGNIVDEVAYHEKYPTIYHLRKKLVDSTDKADLRLIYLALAHMIKFRGHFLIEGDLNPDNSDVDKLFIQLVQTYNQLFEENPINASGVDAKAILSARLSKSRRLENLIAQLPGEKKNGLFGNLIALSLGLTPNFKSNFDLAEDAKLQLSKDTYDDDLDNLLAQIGDQYADLFLAAKNLSDAILLSDILRVNTEITKAPLSASMIKRYDEHHQDLTLLKALVRQQLPEKYKEIFFDQSKNGYAGYIDGGASQEEFYKFIKPILEKMDGTEELLVKLNREDLLRKQRTFDNGSIPHQIHLGELHAILRRQEDFYPFLKDNREKIEKILTFRIPYYVGPLARGNSRFAWMTRKSEETITPWNFEEVVDKGASAQSFIERMTNFDKNLPNEKVLPKHSLLYEYFTVYNELTKVKYVTEGMRKPAFLSGEQKKAIVDLLFKTNRKVTVKQLKEDYFKKIECFDSVEISGVEDRFNASLGTYHDLLKIIKDKDFLDNEENEDILEDIVLTLTLFEDREMIEERLKTYAHLFDDKVMKQLKRRRYTGWGRLSRKLINGIRDKQSGKTILDFLKSDGFANRNFMQLIHDDSLTFKEDIQKAQVSGQGDSLHEHIANLAGSPAIKKGILQTVKVVDELVKVMGRHKPENIVIEMARENQTTQKGQKNSRERMKRIEEGIKELGSQILKEHPVENTQLQNEKLYLYYLQNGRDMYVDQELDINRLSDYDVDHIVPQSFLKDDSIDNKVLTRSDKARGKSDNVPSEEVVKKMKNYWRQLLNAKLITQRKFDNLTKAERGGLSELDKAGFIKRQLVETRQITKHVAQILDSRMNTKYDENDKLIREVKVITLKSKLVSDFRKDFQFYKVREINNYHHAHDAYLNAVVGTALIKKYPKLESEFVYGDYKVYDVRKMIAKSEQEIGKATAKYFFYSNIMNFFKTEITLANGEIRKRPLIETNGETGEIVWDKGRDFATVRKVLSMPQVNIVKKTEVQTGGFSKESILPKRNSDKLIARKKDWDPKKYGGFDSPTVAYSVLVVAKVEKGKSKKLKSVKELLGITIMERSSFEKNPIDFLEAKGYKEVKKDLIIKLPKYSLFELENGRKRMLASAGELQKGNELALPSKYVNFLYLASHYEKLKGSPEDNEQKQLFVEQHKHYLDEIIEQISEFSKRVILADANLDKVLSAYNKHRDKPIREQAENIIHLFTLTNLGAPAAFKYFDTTIDRKRYTSTKEVLDATLIHQSITGLYETRIDLSQLGGDGGGGSGGSGGSGGTLNIEDEYRLHETSKEPDVSLGSTWLSDFPQAWAETGGMGLAVRQAPLIIPLKATSTPVSIKQYPMSQEARLGIKPHIQRLLDQGILVPCQSPWNTPLLPVKKPGTNDYRPVQDLREVNKRVEDIHPTVPNPYNLLSGLPPSHQWYTVLDLKDAFFCLRLHPTSQPLFAFEWRDPEMGISGQLTWTRLPQGFKNSPTLFNEALHRDLAGFRIQHPDLILLQYVDDLLLAATSELDCQQGTRALLQTLGDLGYRASAKKAQICQKQVKYLGYLLKEGQRWLTEARKETVMGQPIPKTPRQLREFLGKAGFCRLFIPGFAEMAAPLYPLTKPGTLFNWGPDQQKAFQEIKQALLTAPALGLPDLTKPFELFVDEKQGYAKGVLTQKLGPWRRPVAYLSKKLDPVAAGWPPCLRMVAAIAVLTKDAGKLTMGQPLVILAPHAVEALVKQPPDRWLSNARMTHYQALLLDTDRVQFGPVVALNPATLLPLPEEGLQHDCLDILAEAHGTRSDLMDQPLPDADHTWYTDGSSFLQEGQRKAGAAVTTETEVIWARALPAGTSAQRAELIALTQALKMAEGKKLNVYTDSRYAFATAHIHGEIYRRRGWLTSEGKEIKNKDEILALLKALFLPKRLSIIHCPGHQKGNSAEARGNRMADQAAREVATRETPETSTLLAGKRTADGSEFEKRTADGSEFESPKKKAKVE

SEQ ID NO: 2361 - protein, 2095 aa, synthetic construct
MPAAKRVKLDGGDKKYSIGLDIGTNSVGWAVITDEYKVPSKKFKVLGNTDRHSIKKNLIGALLFDSGETAEATRLKRTARRRYTRRKNRICYLQEIFSNEMAKVDDSFFHRLEESFLVEEDKKHERHPIFGNIVDEVAYHEKYPTIYHLRKKLVDSTDKADLRLIYLALAHMIKFRGHFLIEGDLNPDNSDVDKLFIQLVQTYNQLFEENPINASGVDAKAILSARLSKSRRLENLIAQLPGEKKNGLFGNLIALSLGLTPNFKSNFDLAEDAKLQLSKDTYDDDLDNLLAQIGDQYADLFLAAKNLSDAILLSDILRVNTEITKAPLSASMIKRYDEHHQDLTLLKALVRQQLPEKYKEIFFDQSKNGYAGYIDGGASQEEFYKFIKPILEKMDGTEELLVKLNREDLLRKQRTFDNGSIPHQIHLGELHAILRRQEDFYPFLKDNREKIEKILTFRIPYYVGPLARGNSRFAWMTRKSEETITPWNFEEVVDKGASAQSFIERMTNFDKNLPNEKVLPKHSLLYEYFTVYNELTKVKYVTEGMRKPAFLSGEQKKAIVDLLFKTNRKVTVKQLKEDYFKKIECFDSVEISGVEDRFNASLGTYHDLLKIIKDKDFLDNEENEDILEDIVLTLTLFEDREMIEERLKTYAHLFDDKVMKQLKRRRYTGWGRLSRKLINGIRDKQSGKTILDFLKSDGFANRNFMQLIHDDSLTFKEDIQKAQVSGQGDSLHEHIANLAGSPAIKKGILQTVKVVDELVKVMGRHKPENIVIEMARENQTTQKGQKNSRERMKRIEEGIKELGSQILKEHPVENTQLQNEKLYLYYLQNGRDMYVDQELDINRLSDYDVDHIVPQSFLKDDSIDNKVLTRSDKARGKSDNVPSEEVVKKMKNYWRQLLNAKLITQRKFDNLTKAERGGLSELDKAGFIKRQLVETRQITKHVAQILDSRMNTKYDENDKLIREVKVITLKSKLVSDFRKDFQFYKVREINNYHHAHDAYLNAVVGTALIKKYPKLESEFVYGDYKVYDVRKMIAKSEQEIGKATAKYFFYSNIMNFFKTEITLANGEIRKRPLIETNGETGEIVWDKGRDFATVRKVLSMPQVNIVKKTEVQTGGFSKESILPKRNSDKLIARKKDWDPKKYGGFDSPTVAYSVLVVAKVEKGKSKKLKSVKELLGITIMERSSFEKNPIDFLEAKGYKEVKKDLIIKLPKYSLFELENGRKRMLASAGELQKGNELALPSKYVNFLYLASHYEKLKGSPEDNEQKQLFVEQHKHYLDEIIEQISEFSKRVILADANLDKVLSAYNKHRDKPIREQAENIIHLFTLTNLGAPAAFKYFDTTIDRKRYTSTKEVLDATLIHQSITGLYETRIDLSQLGGDGGEAAAKEAAAKGGTLNIEDEYRLHETSKEPDVSLGSTWLSDFPQAWAETGGMGLAVRQAPLIIPLKATSTPVSIKQYPMSQEARLGIKPHIQRLLDQGILVPCQSPWNTPLLPVKKPGTNDYRPVQDLREVNKRVEDIHPTVPNPYNLLSGLPPSHQWYTVLDLKDAFFCLRLHPTSQPLFAFEWRDPEMGISGQLTWTRLPQGFKNSPTLFNEALHRDLAGFRIQHPDLILLQYVDDLLLAATSELDCQQGTRALLQTLGDLGYRASAKKAQICQKQVKYLGYLLKEGQRWLTEARKETVMGQPIPKTPRQLREFLGKAGFCRLFIPGFAEMAAPLYPLTKPGTLFNWGPDQQKAFQEIKQALLTAPALGLPDLTKPFELFVDEKQGYAKGVLTQKLGPWRRPVAYLSKKLDPVAAGWPPCLRMVAAIAVLTKDAGKLTMGQPLVILAPHAVEALVKQPPDRWLSNARMTHYQALLLDTDRVQFGPVVALNPATLLPLPEEGLQHDCLDILAEAHGTRSDLMDQPLPDADHTWYTDGSSFLQEGQRKAGAAVTTETEVIWARALPAGTSAQRAELIALTQALKMAEGKKLNVYTDSRYAFATAHIHGEIYRRRGWLTSEGKEIKNKDEILALLKALFLPKRLSIIHCPGHQKGNSAEARGNRMADQAAREVATRETPETSTLLAGKRTADGSEFEKRTADGSEFESPKKKAKVE

SEQ ID NO: 2362 - protein, 2091 aa, synthetic construct
MPAAKRVKLDGGDKKYSIGLDIGTNSVGWAVITDEYKVPSKKFKVLGNTDRHSIKKNLIGALLFDSGETAEATRLKRTARRRYTRRKNRICYLQEIFSNEMAKVDDSFFHRLEESFLVEEDKKHERHPIFGNIVDEVAYHEKYPTIYHLRKKLVDSTDKADLRLIYLALAHMIKFRGHFLIEGDLNPDNSDVDKLFIQLVQTYNQLFEENPINASGVDAKAILSARLSKSRRLENLIAQLPGEKKNGLFGNLIALSLGLTPNFKSNFDLAEDAKLQLSKDTYDDDLDNLLAQIGDQYADLFLAAKNLSDAILLSDILRVNTEITKAPLSASMIKRYDEHHQDLTLLKALVRQQLPEKYKEIFFDQSKNGYAGYIDGGASQEEFYKFIKPILEKMDGTEELLVKLNREDLLRKQRTFDNGSIPHQIHLGELHAILRRQEDFYPFLKDNREKIEKILTFRIPYYVGPLARGNSRFAWMTRKSEETITPWNFEEVVDKGASAQSFIERMTNFDKNLPNEKVLPKHSLLYEYFTVYNELTKVKYVTEGMRKPAFLSGEQKKAIVDLLFKTNRKVTVKQLKEDYFKKIECFDSVEISGVEDRFNASLGTYHDLLKIIKDKDFLDNEENEDILEDIVLTLTLFEDREMIEERLKTYAHLFDDKVMKQLKRRRYTGWGRLSRKLINGIRDKQSGKTILDFLKSDGFANRNFMQLIHDDSLTFKEDIQKAQVSGQGDSLHEHIANLAGSPAIKKGILQTVKVVDELVKVMGRHKPENIVIEMARENQTTQKGQKNSRERMKRIEEGIKELGSQILKEHPVENTQLQNEKLYLYYLQNGRDMYVDQELDINRLSDYDVDHIVPQSFLKDDSIDNKVLTRSDKARGKSDNVPSEEVVKKMKNYWRQLLNAKLITQRKFDNLTKAERGGLSELDKAGFIKRQLVETRQITKHVAQILDSRMNTKYDENDKLIREVKVITLKSKLVSDFRKDFQFYKVREINNYHHAHDAYLNAVVGTALIKKYPKLESEFVYGDYKVYDVRKMIAKSEQEIGKATAKYFFYSNIMNFFKTEITLANGEIRKRPLIETNGETGEIVWDKGRDFATVRKVLSMPQVNIVKKTEVQTGGFSKESILPKRNSDKLIARKKDWDPKKYGGFDSPTVAYSVLVVAKVEKGKSKKLKSVKELLGITIMERSSFEKNPIDFLEAKGYKEVKKDLIIKLPKYSLFELENGRKRMLASAGELQKGNELALPSKYVNFLYLASHYEKLKGSPEDNEQKQLFVEQHKHYLDEIIEQISEFSKRVILADANLDKVLSAYNKHRDKPIREQAENIIHLFTLTNLGAPAAFKYFDTTIDRKRYTSTKEVLDATLIHQSITGLYETRIDLSQLGGDGGGSSGGGGGTLNIEDEYRLHETSKEPDVSLGSTWLSDFPQAWAETGGMGLAVRQAPLIIPLKATSTPVSIKQYPMSQEARLGIKPHIQRLLDQGILVPCQSPWNTPLLPVKKPGTNDYRPVQDLREVNKRVEDIHPTVPNPYNLLSGLPPSHQWYTVLDLKDAFFCLRLHPTSQPLFAFEWRDPEMGISGQLTWTRLPQGFKNSPTLFNEALHRDLAGFRIQHPDLILLQYVDDLLLAATSELDCQQGTRALLQTLGDLGYRASAKKAQICQKQVKYLGYLLKEGQRWLTEARKETVMGQPIPKTPRQLREFLGKAGFCRLFIPGFAEMAAPLYPLTKPGTLFNWGPDQQKAFQEIKQALLTAPALGLPDLTKPFELFVDEKQGYAKGVLTQKLGPWRRPVAYLSKKLDPVAAGWPPCLRMVAAIAVLTKDAGKLTMGQPLVILAPHAVEALVKQPPDRWLSNARMTHYQALLLDTDRVQFGPVVALNPATLLPLPEEGLQHDCLDILAEAHGTRSDLMDQPLPDADHTWYTDGSSFLQEGQRKAGAAVTTETEVIWARALPAGTSAQRAELIALTQALKMAEGKKLNVYTDSRYAFATAHIHGEIYRRRGWLTSEGKEIKNKDEILALLKALFLPKRLSIIHCPGHQKGNSAEARGNRMADQAAREVATRETPETSTLLAGKRTADGSEFEKRTADGSEFESPKKKAKVE

SEQ ID NO: 2363 - protein, 2093 aa, synthetic construct
MPAAKRVKLDGGDKKYSIGLDIGTNSVGWAVITDEYKVPSKKFKVLGNTDRHSIKKNLIGALLFDSGETAEATRLKRTARRRYTRRKNRICYLQEIFSNEMAKVDDSFFHRLEESFLVEEDKKHERHPIFGNIVDEVAYHEKYPTIYHLRKKLVDSTDKADLRLIYLALAHMIKFRGHFLIEGDLNPDNSDVDKLFIQLVQTYNQLFEENPINASGVDAKAILSARLSKSRRLENLIAQLPGEKKNGLFGNLIALSLGLTPNFKSNFDLAEDAKLQLSKDTYDDDLDNLLAQIGDQYADLFLAAKNLSDAILLSDILRVNTEITKAPLSASMIKRYDEHHQDLTLLKALVRQQLPEKYKEIFFDQSKNGYAGYIDGGASQEEFYKFIKPILEKMDGTEELLVKLNREDLLRKQRTFDNGSIPHQIHLGELHAILRRQEDFYPFLKDNREKIEKILTFRIPYYVGPLARGNSRFAWMTRKSEETITPWNFEEVVDKGASAQSFIERMTNFDKNLPNEKVLPKHSLLYEYFTVYNELTKVKYVTEGMRKPAFLSGEQKKAIVDLLFKTNRKVTVKQLKEDYFKKIECFDSVEISGVEDRFNASLGTYHDLLKIIKDKDFLDNEENEDILEDIVLTLTLFEDREMIEERLKTYAHLFDDKVMKQLKRRRYTGWGRLSRKLINGIRDKQSGKTILDFLKSDGFANRNFMQLIHDDSLTFKEDIQKAQVSGQGDSLHEHIANLAGSPAIKKGILQTVKVVDELVKVMGRHKPENIVIEMARENQTTQKGQKNSRERMKRIEEGIKELGSQILKEHPVENTQLQNEKLYLYYLQNGRDMYVDQELDINRLSDYDVDHIVPQSFLKDDSIDNKVLTRSDKARGKSDNVPSEEVVKKMKNYWRQLLNAKLITQRKFDNLTKAERGGLSELDKAGFIKRQLVETRQITKHVAQILDSRMNTKYDENDKLIREVKVITLKSKLVSDFRKDFQFYKVREINNYHHAHDAYLNAVVGTALIKKYPKLESEFVYGDYKVYDVRKMIAKSEQEIGKATAKYFFYSNIMNFFKTEITLANGEIRKRPLIETNGETGEIVWDKGRDFATVRKVLSMPQVNIVKKTEVQTGGFSKESILPKRNSDKLIARKKDWDPKKYGGFDSPTVAYSVLVVAKVEKGKSKKLKSVKELLGITIMERSSFEKNPIDFLEAKGYKEVKKDLIIKLPKYSLFELENGRKRMLASAGELQKGNELALPSKYVNFLYLASHYEKLKGSPEDNEQKQLFVEQHKHYLDEIIEQISEFSKRVILADANLDKVLSAYNKHRDKPIREQAENIIHLFTLTNLGAPAAFKYFDTTIDRKRYTSTKEVLDATLIHQSITGLYETRIDLSQLGGDGGGGSEAAAKGGTLNIEDEYRLHETSKEPDVSLGSTWLSDFPQAWAETGGMGLAVRQAPLIIPLKATSTPVSIKQYPMSQEARLGIKPHIQRLLDQGILVPCQSPWNTPLLPVKKPGTNDYRPVQDLREVNKRVEDIHPTVPNPYNLLSGLPPSHQWYTVLDLKDAFFCLRLHPTSQPLFAFEWRDPEMGISGQLTWTRLPQGFKNSPTLFNEALHRDLAGFRIQHPDLILLQYVDDLLLAATSELDCQQGTRALLQTLGDLGYRASAKKAQICQKQVKYLGYLLKEGQRWLTEARKETVMGQPIPKTPRQLREFLGKAGFCRLFIPGFAEMAAPLYPLTKPGTLFNWGPDQQKAFQEIKQALLTAPALGLPDLTKPFELFVDEKQGYAKGVLTQKLGPWRRPVAYLSKKLDPVAAGWPPCLRMVAAIAVLTKDAGKLTMGQPLVILAPHAVEALVKQPPDRWLSNARMTHYQALLLDTDRVQFGPVVALNPATLLPLPEEGLQHDCLDILAEAHGTRSDLMDQPLPDADHTWYTDGSSFLQEGQRKAGAAVTTETEVIWARALPAGTSAQRAELIALTQALKMAEGKKLNVYTDSRYAFATAHIHGEIYRRRGWLTSEGKEIKNKDEILALLKALFLPKRLSIIHCPGHQKGNSAEARGNRMADQAAREVATRETPETSTLLAGKRTADGSEFEKRTADGSEFESPKKKAKVE

SEQ ID NO: 2364 - protein, 2090 aa, synthetic construct
MPAAKRVKLDGGDKKYSIGLDIGTNSVGWAVITDEYKVPSKKFKVLGNTDRHSIKKNLIGALLFDSGETAEATRLKRTARRRYTRRKNRICYLQEIFSNEMAKVDDSFFHRLEESFLVEEDKKHERHPIFGNIVDEVAYHEKYPTIYHLRKKLVDSTDKADLRLIYLALAHMIKFRGHFLIEGDLNPDNSDVDKLFIQLVQTYNQLFEENPINASGVDAKAILSARLSKSRRLENLIAQLPGEKKNGLFGNLIALSLGLTPNFKSNFDLAEDAKLQLSKDTYDDDLDNLLAQIGDQYADLFLAAKNLSDAILLSDILRVNTEITKAPLSASMIKRYDEHHQDLTLLKALVRQQLPEKYKEIFFDQSKNGYAGYIDGGASQEEFYKFIKPILEKMDGTEELLVKLNREDLLRKQRTFDNGSIPHQIHLGELHAILRRQEDFYPFLKDNREKIEKILTFRIPYYVGPLARGNSRFAWMTRKSEETITPWNFEEVVDKGASAQSFIERMTNFDKNLPNEKVLPKHSLLYEYFTVYNELTKVKYVTEGMRKPAFLSGEQKKAIVDLLFKTNRKVTVKQLKEDYFKKIECFDSVEISGVEDRFNASLGTYHDLLKIIKDKDFLDNEENEDILEDIVLTLTLFEDREMIEERLKTYAHLFDDKVMKQLKRRRYTGWGRLSRKLINGIRDKQSGKTILDFLKSDGFANRNFMQLIHDDSLTFKEDIQKAQVSGQGDSLHEHIANLAGSPAIKKGILQTVKVVDELVKVMGRHKPENIVIEMARENQTTQKGQKNSRERMKRIEEGIKELGSQILKEHPVENTQLQNEKLYLYYLQNGRDMYVDQELDINRLSDYDVDHIVPQSFLKDDSIDNKVLTRSDKARGKSDNVPSEEVVKKMKNYWRQLLNAKLITQRKFDNLTKAERGGLSELDKAGFIKRQLVETRQITKHVAQILDSRMNTKYDENDKLIREVKVITLKSKLVSDFRKDFQFYKVREINNYHHAHDAYLNAVVGTALIKKYPKLESEFVYGDYKVYDVRKMIAKSEQEIGKATAKYFFYSNIMNFFKTEITLANGEIRKRPLIETNGETGEIVWDKGRDFATVRKVLSMPQVNIVKKTEVQTGGFSKESILPKRNSDKLIARKKDWDPKKYGGFDSPTVAYSVLVVAKVEKGKSKKLKSVKELLGITIMERSSFEKNPIDFLEAKGYKEVKKDLIIKLPKYSLFELENGRKRMLASAGELQKGNELALPSKYVNFLYLASHYEKLKGSPEDNEQKQLFVEQHKHYLDEIIEQISEFSKRVILADANLDKVLSAYNKHRDKPIREQAENIIHLFTLTNLGAPAAFKYFDTTIDRKRYTSTKEVLDATLIHQSITGLYETRIDLSQLGGDGGPAPAPGGTLNIEDEYRLHETSKEPDVSLGSTWLSDFPQAWAETGGMGLAVRQAPLIIPLKATSTPVSIKQYPMSQEARLGIKPHIQRLLDQGILVPCQSPWNTPLLPVKKPGTNDYRPVQDLREVNKRVEDIHPTVPNPYNLLSGLPPSHQWYTVLDLKDAFFCLRLHPTSQPLFAFEWRDPEMGISGQLTWTRLPQGFKNSPTLFNEALHRDLAGFRIQHPDLILLQYVDDLLLAATSELDCQQGTRALLQTLGDLGYRASAKKAQICQKQVKYLGYLLKEGQRWLTEARKETVMGQPIPKTPRQLREFLGKAGFCRLFIPGFAEMAAPLYPLTKPGTLFNWGPDQQKAFQEIKQALLTAPALGLPDLTKPFELFVDEKQGYAKGVLTQKLGPWRRPVAYLSKKLDPVAAGWPPCLRMVAAIAVLTKDAGKLTMGQPLVILAPHAVEALVKQPPDRWLSNARMTHYQALLLDTDRVQFGPVVALNPATLLPLPEEGLQHDCLDILAEAHGTRSDLMDQPLPDADHTWYTDGSSFLQEGQRKAGAAVTTETEVIWARALPAGTSAQRAELIALTQALKMAEGKKLNVYTDSRYAFATAHIHGEIYRRRGWLTSEGKEIKNKDEILALLKALFLPKRLSIIHCPGHQKGNSAEARGNRMADQAAREVATRETPETSTLLAGKRTADGSEFEKRTADGSEFESPKKKAKVE

SEQ ID NO: 2365 - protein, 2094 aa, synthetic construct
MPAAKRVKLDGGDKKYSIGLDIGTNSVGWAVITDEYKVPSKKFKVLGNTDRHSIKKNLIGALLFDSGETAEATRLKRTARRRYTRRKNRICYLQEIFSNEMAKVDDSFFHRLEESFLVEEDKKHERHPIFGNIVDEVAYHEKYPTIYHLRKKLVDSTDKADLRLIYLALAHMIKFRGHFLIEGDLNPDNSDVDKLFIQLVQTYNQLFEENPINASGVDAKAILSARLSKSRRLENLIAQLPGEKKNGLFGNLIALSLGLTPNFKSNFDLAEDAKLQLSKDTYDDDLDNLLAQIGDQYADLFLAAKNLSDAILLSDILRVNTEITKAPLSASMIKRYDEHHQDLTLLKALVRQQLPEKYKEIFFDQSKNGYAGYIDGGASQEEFYKFIKPILEKMDGTEELLVKLNREDLLRKQRTFDNGSIPHQIHLGELHAILRRQEDFYPFLKDNREKIEKILTFRIPYYVGPLARGNSRFAWMTRKSEETITPWNFEEVVDKGASAQSFIERMTNFDKNLPNEKVLPKHSLLYEYFTVYNELTKVKYVTEGMRKPAFLSGEQKKAIVDLLFKTNRKVTVKQLKEDYFKKIECFDSVEISGVEDRFNASLGTYHDLLKIIKDKDFLDNEENEDILEDIVLTLTLFEDREMIEERLKTYAHLFDDKVMKQLKRRRYTGWGRLSRKLINGIRDKQSGKTILDFLKSDGFANRNFMQLIHDDSLTFKEDIQKAQVSGQGDSLHEHIANLAGSPAIKKGILQTVKVVDELVKVMGRHKPENIVIEMARENQTTQKGQKNSRERMKRIEEGIKELGSQILKEHPVENTQLQNEKLYLYYLQNGRDMYVDQELDINRLSDYDVDHIVPQSFLKDDSIDNKVLTRSDKARGKSDNVPSEEVVKKMKNYWRQLLNAKLITQRKFDNLTKAERGGLSELDKAGFIKRQLVETRQITKHVAQILDSRMNTKYDENDKLIREVKVITLKSKLVSDFRKDFQFYKVREINNYHHAHDAYLNAVVGTALIKKYPKLESEFVYGDYKVYDVRKMIAKSEQEIGKATAKYFFYSNIMNFFKTEITLANGEIRKRPLIETNGETGEIVWDKGRDFATVRKVLSMPQVNIVKKTEVQTGGFSKESILPKRNSDKLIARKKDWDPKKYGGFDSPTVAYSVLVVAKVEKGKSKKLKSVKELLGITIMERSSFEKNPIDFLEAKGYKEVKKDLIIKLPKYSLFELENGRKRMLASAGELQKGNELALPSKYVNFLYLASHYEKLKGSPEDNEQKQLFVEQHKHYLDEIIEQISEFSKRVILADANLDKVLSAYNKHRDKPIREQAENIIHLFTLTNLGAPAAFKYFDTTIDRKRYTSTKEVLDATLIHQSITGLYETRIDLSQLGGDGGGGSPAPGGGGGTLNIEDEYRLHETSKEPDVSLGSTWLSDFPQAWAETGGMGLAVRQAPLIIPLKATSTPVSIKQYPMSQEARLGIKPHIQRLLDQGILVPCQSPWNTPLLPVKKPGTNDYRPVQDLREVNKRVEDIHPTVPNPYNLLSGLPPSHQWYTVLDLKDAFFCLRLHPTSQPLFAFEWRDPEMGISGQLTWTRLPQGFKNSPTLFNEALHRDLAGFRIQHPDLILLQYVDDLLLAATSELDCQQGTRALLQTLGDLGYRASAKKAQICQKQVKYLGYLLKEGQRWLTEARKETVMGQPIPKTPRQLREFLGKAGFCRLFIPGFAEMAAPLYPLTKPGTLFNWGPDQQKAFQEIKQALLTAPALGLPDLTKPFELFVDEKQGYAKGVLTQKLGPWRRPVAYLSKKLDPVAAGWPPCLRMVAAIAVLTKDAGKLTMGQPLVILAPHAVEALVKQPPDRWLSNARMTHYQALLLDTDRVQFGPVVALNPATLLPLPEEGLQHDCLDILAEAHGTRSDLMDQPLPDADHTWYTDGSSFLQEGQRKAGAAVTTETEVIWARALPAGTSAQRAELIALTQALKMAEGKKLNVYTDSRYAFATAHIHGEIYRRRGWLTSEGKEIKNKDEILALLKALFLPKRLSIIHCPGHQKGNSAEARGNRMADQAAREVATRETPETSTLLAGKRTADGSEFEKRTADGSEFESPKKKAKVE

SEQ ID NO: 2366 - protein, 2091 aa, synthetic construct
MPAAKRVKLDGGDKKYSIGLDIGTNSVGWAVITDEYKVPSKKFKVLGNTDRHSIKKNLIGALLFDSGETAEATRLKRTARRRYTRRKNRICYLQEIFSNEMAKVDDSFFHRLEESFLVEEDKKHERHPIFGNIVDEVAYHEKYPTIYHLRKKLVDSTDKADLRLIYLALAHMIKFRGHFLIEGDLNPDNSDVDKLFIQLVQTYNQLFEENPINASGVDAKAILSARLSKSRRLENLIAQLPGEKKNGLFGNLIALSLGLTPNFKSNFDLAEDAKLQLSKDTYDDDLDNLLAQIGDQYADLFLAAKNLSDAILLSDILRVNTEITKAPLSASMIKRYDEHHQDLTLLKALVRQQLPEKYKEIFFDQSKNGYAGYIDGGASQEEFYKFIKPILEKMDGTEELLVKLNREDLLRKQRTFDNGSIPHQIHLGELHAILRRQEDFYPFLKDNREKIEKILTFRIPYYVGPLARGNSRFAWMTRKSEETITPWNFEEVVDKGASAQSFIERMTNFDKNLPNEKVLPKHSLLYEYFTVYNELTKVKYVTEGMRKPAFLSGEQKKAIVDLLFKTNRKVTVKQLKEDYFKKIECFDSVEISGVEDRFNASLGTYHDLLKIIKDKDFLDNEENEDILEDIVLTLTLFEDREMIEERLKTYAHLFDDKVMKQLKRRRYTGWGRLSRKLINGIRDKQSGKTILDFLKSDGFANRNFMQLIHDDSLTFKEDIQKAQVSGQGDSLHEHIANLAGSPAIKKGILQTVKVVDELVKVMGRHKPENIVIEMARENQTTQKGQKNSRERMKRIEEGIKELGSQILKEHPVENTQLQNEKLYLYYLQNGRDMYVDQELDINRLSDYDVDHIVPQSFLKDDSIDNKVLTRSDKARGKSDNVPSEEVVKKMKNYWRQLLNAKLITQRKFDNLTKAERGGLSELDKAGFIKRQLVETRQITKHVAQILDSRMNTKYDENDKLIREVKVITLKSKLVSDFRKDFQFYKVREINNYHHAHDAYLNAVVGTALIKKYPKLESEFVYGDYKVYDVRKMIAKSEQEIGKATAKYFFYSNIMNFFKTEITLANGEIRKRPLIETNGETGEIVWDKGRDFATVRKVLSMPQVNIVKKTEVQTGGFSKESILPKRNSDKLIARKKDWDPKKYGGFDSPTVAYSVLVVAKVEKGKSKKLKSVKELLGITIMERSSFEKNPIDFLEAKGYKEVKKDLIIKLPKYSLFELENGRKRMLASAGELQKGNELALPSKYVNFLYLASHYEKLKGSPEDNEQKQLFVEQHKHYLDEIIEQISEFSKRVILADANLDKVLSAYNKHRDKPIREQAENIIHLFTLTNLGAPAAFKYFDTTIDRKRYTSTKEVLDATLIHQSITGLYETRIDLSQLGGDGGGSSPAPGGTLNIEDEYRLHETSKEPDVSLGSTWLSDFPQAWAETGGMGLAVRQAPLIIPLKATSTPVSIKQYPMSQEARLGIKPHIQRLLDQGILVPCQSPWNTPLLPVKKPGTNDYRPVQDLREVNKRVEDIHPTVPNPYNLLSGLPPSHQWYTVLDLKDAFFCLRLHPTSQPLFAFEWRDPEMGISGQLTWTRLPQGFKNSPTLFNEALHRDLAGFRIQHPDLILLQYVDDLLLAATSELDCQQGTRALLQTLGDLGYRASAKKAQICQKQVKYLGYLLKEGQRWLTEARKETVMGQPIPKTPRQLREFLGKAGFCRLFIPGFAEMAAPLYPLTKPGTLFNWGPDQQKAFQEIKQALLTAPALGLPDLTKPFELFVDEKQGYAKGVLTQKLGPWRRPVAYLSKKLDPVAAGWPPCLRMVAAIAVLTKDAGKLTMGQPLVILAPHAVEALVKQPPDRWLSNARMTHYQALLLDTDRVQFGPVVALNPATLLPLPEEGLQHDCLDILAEAHGTRSDLMDQPLPDADHTWYTDGSSFLQEGQRKAGAAVTTETEVIWARALPAGTSAQRAELIALTQALKMAEGKKLNVYTDSRYAFATAHIHGEIYRRRGWLTSEGKEIKNKDEILALLKALFLPKRLSIIHCPGHQKGNSAEARGNRMADQAAREVATRETPETSTLLAGKRTADGSEFEKRTADGSEFESPKKKAKVE

SEQ ID NO: 2367 - protein, 2096 aa, synthetic construct
MPAAKRVKLDGGDKKYSIGLDIGTNSVGWAVITDEYKVPSKKFKVLGNTDRHSIKKNLIGALLFDSGETAEATRLKRTARRRYTRRKNRICYLQEIFSNEMAKVDDSFFHRLEESFLVEEDKKHERHPIFGNIVDEVAYHEKYPTIYHLRKKLVDSTDKADLRLIYLALAHMIKFRGHFLIEGDLNPDNSDVDKLFIQLVQTYNQLFEENPINASGVDAKAILSARLSKSRRLENLIAQLPGEKKNGLFGNLIALSLGLTPNFKSNFDLAEDAKLQLSKDTYDDDLDNLLAQIGDQYADLFLAAKNLSDAILLSDILRVNTEITKAPLSASMIKRYDEHHQDLTLLKALVRQQLPEKYKEIFFDQSKNGYAGYIDGGASQEEFYKFIKPILEKMDGTEELLVKLNREDLLRKQRTFDNGSIPHQIHLGELHAILRRQEDFYPFLKDNREKIEKILTFRIPYYVGPLARGNSRFAWMTRKSEETITPWNFEEVVDKGASAQSFIERMTNFDKNLPNEKVLPKHSLLYEYFTVYNELTKVKYVTEGMRKPAFLSGEQKKAIVDLLFKTNRKVTVKQLKEDYFKKIECFDSVEISGVEDRFNASLGTYHDLLKIIKDKDFLDNEENEDILEDIVLTLTLFEDREMIEERLKTYAHLFDDKVMKQLKRRRYTGWGRLSRKLINGIRDKQSGKTILDFLKSDGFANRNFMQLIHDDSLTFKEDIQKAQVSGQGDSLHEHIANLAGSPAIKKGILQTVKVVDELVKVMGRHKPENIVIEMARENQTTQKGQKNSRERMKRIEEGIKELGSQILKEHPVENTQLQNEKLYLYYLQNGRDMYVDQELDINRLSDYDVDHIVPQSFLKDDSIDNKVLTRSDKARGKSDNVPSEEVVKKMKNYWRQLLNAKLITQRKFDNLTKAERGGLSELDKAGFIKRQLVETRQITKHVAQILDSRMNTKYDENDKLIREVKVITLKSKLVSDFRKDFQFYKVREINNYHHAHDAYLNAVVGTALIKKYPKLESEFVYGDYKVYDVRKMIAKSEQEIGKATAKYFFYSNIMNFFKTEITLANGEIRKRPLIETNGETGEIVWDKGRDFATVRKVLSMPQVNIVKKTEVQTGGFSKESILPKRNSDKLIARKKDWDPKKYGGFDSPTVAYSVLVVAKVEKGKSKKLKSVKELLGITIMERSSFEKNPIDFLEAKGYKEVKKDLIIKLPKYSLFELENGRKRMLASAGELQKGNELALPSKYVNFLYLASHYEKLKGSPEDNEQKQLFVEQHKHYLDEIIEQISEFSKRVILADANLDKVLSAYNKHRDKPIREQAENIIHLFTLTNLGAPAAFKYFDTTIDRKRYTSTKEVLDATLIHQSITGLYETRIDLSQLGGDGGEAAAKGSSGGGGGTLNIEDEYRLHETSKEPDVSLGSTWLSDFPQAWAETGGMGLAVRQAPLIIPLKATSTPVSIKQYPMSQEARLGIKPHIQRLLDQGILVPCQSPWNTPLLPVKKPGTNDYRPVQDLREVNKRVEDIHPTVPNPYNLLSGLPPSHQWYTVLDLKDAFFCLRLHPTSQPLFAFEWRDPEMGISGQLTWTRLPQGFKNSPTLFNEALHRDLAGFRIQHPDLILLQYVDDLLLAATSELDCQQGTRALLQTLGDLGYRASAKKAQICQKQVKYLGYLLKEGQRWLTEARKETVMGQPIPKTPRQLREFLGKAGFCRLFIPGFAEMAAPLYPLTKPGTLFNWGPDQQKAFQEIKQALLTAPALGLPDLTKPFELFVDEKQGYAKGVLTQKLGPWRRPVAYLSKKLDPVAAGWPPCLRMVAAIAVLTKDAGKLTMGQPLVILAPHAVEALVKQPPDRWLSNARMTHYQALLLDTDRVQFGPVVALNPATLLPLPEEGLQHDCLDILAEAHGTRSDLMDQPLPDADHTWYTDGSSFLQEGQRKAGAAVTTETEVIWARALPAGTSAQRAELIALTQALKMAEGKKLNVYTDSRYAFATAHIHGEIYRRRGWLTSEGKEIKNKDEILALLKALFLPKRLSIIHCPGHQKGNSAEARGNRMADQAAREVATRETPETSTLLAGKRTADGSEFEKRTADGSEFESPKKKAKVE

SEQ ID NO: 2368 - protein, 2096 aa, synthetic construct
MPAAKRVKLDGGDKKYSIGLDIGTNSVGWAVITDEYKVPSKKFKVLGNTDRHSIKKNLIGALLFDSGETAEATRLKRTARRRYTRRKNRICYLQEIFSNEMAKVDDSFFHRLEESFLVEEDKKHERHPIFGNIVDEVAYHEKYPTIYHLRKKLVDSTDKADLRLIYLALAHMIKFRGHFLIEGDLNPDNSDVDKLFIQLVQTYNQLFEENPINASGVDAKAILSARLSKSRRLENLIAQLPGEKKNGLFGNLIALSLGLTPNFKSNFDLAEDAKLQLSKDTYDDDLDNLLAQIGDQYADLFLAAKNLSDAILLSDILRVNTEITKAPLSASMIKRYDEHHQDLTLLKALVRQQLPEKYKEIFFDQSKNGYAGYIDGGASQEEFYKFIKPILEKMDGTEELLVKLNREDLLRKQRTFDNGSIPHQIHLGELHAILRRQEDFYPFLKDNREKIEKILTFRIPYYVGPLARGNSRFAWMTRKSEETITPWNFEEVVDKGASAQSFIERMTNFDKNLPNEKVLPKHSLLYEYFTVYNELTKVKYVTEGMRKPAFLSGEQKKAIVDLLFKTNRKVTVKQLKEDYFKKIECFDSVEISGVEDRFNASLGTYHDLLKIIKDKDFLDNEENEDILEDIVLTLTLFEDREMIEERLKTYAHLFDDKVMKQLKRRRYTGWGRLSRKLINGIRDKQSGKTILDFLKSDGFANRNFMQLIHDDSLTFKEDIQKAQVSGQGDSLHEHIANLAGSPAIKKGILQTVKVVDELVKVMGRHKPENIVIEMARENQTTQKGQKNSRERMKRIEEGIKELGSQILKEHPVENTQLQNEKLYLYYLQNGRDMYVDQELDINRLSDYDVDHIVPQSFLKDDSIDNKVLTRSDKARGKSDNVPSEEVVKKMKNYWRQLLNAKLITQRKFDNLTKAERGGLSELDKAGFIKRQLVETRQITKHVAQILDSRMNTKYDENDKLIREVKVITLKSKLVSDFRKDFQFYKVREINNYHHAHDAYLNAVVGTALIKKYPKLESEFVYGDYKVYDVRKMIAKSEQEIGKATAKYFFYSNIMNFFKTEITLANGEIRKRPLIETNGETGEIVWDKGRDFATVRKVLSMPQVNIVKKTEVQTGGFSKESILPKRNSDKLIARKKDWDPKKYGGFDSPTVAYSVLVVAKVEKGKSKKLKSVKELLGITIMERSSFEKNPIDFLEAKGYKEVKKDLIIKLPKYSLFELENGRKRMLASAGELQKGNELALPSKYVNFLYLASHYEKLKGSPEDNEQKQLFVEQHKHYLDEIIEQISEFSKRVILADANLDKVLSAYNKHRDKPIREQAENIIHLFTLTNLGAPAAFKYFDTTIDRKRYTSTKEVLDATLIHQSITGLYETRIDLSQLGGDGGEAAAKGSSGGSGGTLNIEDEYRLHETSKEPDVSLGSTWLSDFPQAWAETGGMGLAVRQAPLIIPLKATSTPVSIKQYPMSQEARLGIKPHIQRLLDQGILVPCQSPWNTPLLPVKKPGTNDYRPVQDLREVNKRVEDIHPTVPNPYNLLSGLPPSHQWYTVLDLKDAFFCLRLHPTSQPLFAFEWRDPEMGISGQLTWTRLPQGFKNSPTLFNEALHRDLAGFRIQHPDLILLQYVDDLLLAATSELDCQQGTRALLQTLGDLGYRASAKKAQICQKQVKYLGYLLKEGQRWLTEARKETVMGQPIPKTPRQLREFLGKAGFCRLFIPGFAEMAAPLYPLTKPGTLFNWGPDQQKAFQEIKQALLTAPALGLPDLTKPFELFVDEKQGYAKGVLTQKLGPWRRPVAYLSKKLDPVAAGWPPCLRMVAAIAVLTKDAGKLTMGQPLVILAPHAVEALVKQPPDRWLSNARMTHYQALLLDTDRVQFGPVVALNPATLLPLPEEGLQHDCLDILAEAHGTRSDLMDQPLPDADHTWYTDGSSFLQEGQRKAGAAVTTETEVIWARALPAGTSAQRAELIALTQALKMAEGKKLNVYTDSRYAFATAHIHGEIYRRRGWLTSEGKEIKNKDEILALLKALFLPKRLSIIHCPGHQKGNSAEARGNRMADQAAREVATRETPETSTLLAGKRTADGSEFEKRTADGSEFESPKKKAKVE

SEQ ID NO: 2369 - protein, 2095 aa, synthetic construct
MPAAKRVKLDGGDKKYSIGLDIGTNSVGWAVITDEYKVPSKKFKVLGNTDRHSIKKNLIGALLFDSGETAEATRLKRTARRRYTRRKNRICYLQEIFSNEMAKVDDSFFHRLEESFLVEEDKKHERHPIFGNIVDEVAYHEKYPTIYHLRKKLVDSTDKADLRLIYLALAHMIKFRGHFLIEGDLNPDNSDVDKLFIQLVQTYNQLFEENPINASGVDAKAILSARLSKSRRLENLIAQLPGEKKNGLFGNLIALSLGLTPNFKSNFDLAEDAKLQLSKDTYDDDLDNLLAQIGDQYADLFLAAKNLSDAILLSDILRVNTEITKAPLSASMIKRYDEHHQDLTLLKALVRQQLPEKYKEIFFDQSKNGYAGYIDGGASQEEFYKFIKPILEKMDGTEELLVKLNREDLLRKQRTFDNGSIPHQIHLGELHAILRRQEDFYPFLKDNREKIEKILTFRIPYYVGPLARGNSRFAWMTRKSEETITPWNFEEVVDKGASAQSFIERMTNFDKNLPNEKVLPKHSLLYEYFTVYNELTKVKYVTEGMRKPAFLSGEQKKAIVDLLFKTNRKVTVKQLKEDYFKKIECFDSVEISGVEDRFNASLGTYHDLLKIIKDKDFLDNEENEDILEDIVLTLTLFEDREMIEERLKTYAHLFDDKVMKQLKRRRYTGWGRLSRKLINGIRDKQSGKTILDFLKSDGFANRNFMQLIHDDSLTFKEDIQKAQVSGQGDSLHEHIANLAGSPAIKKGILQTVKVVDELVKVMGRHKPENIVIEMARENQTTQKGQKNSRERMKRIEEGIKELGSQILKEHPVENTQLQNEKLYLYYLQNGRDMYVDQELDINRLSDYDVDHIVPQSFLKDDSIDNKVLTRSDKARGKSDNVPSEEVVKKMKNYWRQLLNAKLITQRKFDNLTKAERGGLSELDKAGFIKRQLVETRQITKHVAQILDSRMNTKYDENDKLIREVKVITLKSKLVSDFRKDFQFYKVREINNYHHAHDAYLNAVVGTALIKKYPKLESEFVYGDYKVYDVRKMIAKSEQEIGKATAKYFFYSNIMNFFKTEITLANGEIRKRPLIETNGETGEIVWDKGRDFATVRKVLSMPQVNIVKKTEVQTGGFSKESILPKRNSDKLIARKKDWDPKKYGGFDSPTVAYSVLVVAKVEKGKSKKLKSVKELLGITIMERSSFEKNPIDFLEAKGYKEVKKDLIIKLPKYSLFELENGRKRMLASAGELQKGNELALPSKYVNFLYLASHYEKLKGSPEDNEQKQLFVEQHKHYLDEIIEQISEFSKRVILADANLDKVLSAYNKHRDKPIREQAENIIHLFTLTNLGAPAAFKYFDTTIDRKRYTSTKEVLDATLIHQSITGLYETRIDLSQLGGDGGGGGGSGGGGSGGTLNIEDEYRLHETSKEPDVSLGSTWLSDFPQAWAETGGMGLAVRQAPLIIPLKATSTPVSIKQYPMSQEARLGIKPHIQRLLDQGILVPCQSPWNTPLLPVKKPGTNDYRPVQDLREVNKRVEDIHPTVPNPYNLLSGLPPSHQWYTVLDLKDAFFCLRLHPTSQPLFAFEWRDPEMGISGQLTWTRLPQGFKNSPTLFNEALHRDLAGFRIQHPDLILLQYVDDLLLAATSELDCQQGTRALLQTLGDLGYRASAKKAQICQKQVKYLGYLLKEGQRWLTEARKETVMGQPIPKTPRQLREFLGKAGFCRLFIPGFAEMAAPLYPLTKPGTLFNWGPDQQKAFQEIKQALLTAPALGLPDLTKPFELFVDEKQGYAKGVLTQKLGPWRRPVAYLSKKLDPVAAGWPPCLRMVAAIAVLTKDAGKLTMGQPLVILAPHAVEALVKQPPDRWLSNARMTHYQALLLDTDRVQFGPVVALNPATLLPLPEEGLQHDCLDILAEAHGTRSDLMDQPLPDADHTWYTDGSSFLQEGQRKAGAAVTTETEVIWARALPAGTSAQRAELIALTQALKMAEGKKLNVYTDSRYAFATAHIHGEIYRRRGWLTSEGKEIKNKDEILALLKALFLPKRLSIIHCPGHQKGNSAEARGNRMADQAAREVATRETPETSTLLAGKRTADGSEFEKRTADGSEFESPKKKAKVE

SEQ ID NO: 2370 - protein, 2096 aa, synthetic construct
MPAAKRVKLDGGDKKYSIGLDIGTNSVGWAVITDEYKVPSKKFKVLGNTDRHSIKKNLIGALLFDSGETAEATRLKRTARRRYTRRKNRICYLQEIFSNEMAKVDDSFFHRLEESFLVEEDKKHERHPIFGNIVDEVAYHEKYPTIYHLRKKLVDSTDKADLRLIYLALAHMIKFRGHFLIEGDLNPDNSDVDKLFIQLVQTYNQLFEENPINASGVDAKAILSARLSKSRRLENLIAQLPGEKKNGLFGNLIALSLGLTPNFKSNFDLAEDAKLQLSKDTYDDDLDNLLAQIGDQYADLFLAAKNLSDAILLSDILRVNTEITKAPLSASMIKRYDEHHQDLTLLKALVRQQLPEKYKEIFFDQSKNGYAGYIDGGASQEEFYKFIKPILEKMDGTEELLVKLNREDLLRKQRTFDNGSIPHQIHLGELHAILRRQEDFYPFLKDNREKIEKILTFRIPYYVGPLARGNSRFAWMTRKSEETITPWNFEEVVDKGASAQSFIERMTNFDKNLPNEKVLPKHSLLYEYFTVYNELTKVKYVTEGMRKPAFLSGEQKKAIVDLLFKTNRKVTVKQLKEDYFKKIECFDSVEISGVEDRFNASLGTYHDLLKIIKDKDFLDNEENEDILEDIVLTLTLFEDREMIEERLKTYAHLFDDKVMKQLKRRRYTGWGRLSRKLINGIRDKQSGKTILDFLKSDGFANRNFMQLIHDDSLTFKEDIQKAQVSGQGDSLHEHIANLAGSPAIKKGILQTVKVVDELVKVMGRHKPENIVIEMARENQTTQKGQKNSRERMKRIEEGIKELGSQILKEHPVENTQLQNEKLYLYYLQNGRDMYVDQELDINRLSDYDVDHIVPQSFLKDDSIDNKVLTRSDKARGKSDNVPSEEVVKKMKNYWRQLLNAKLITQRKFDNLTKAERGGLSELDKAGFIKRQLVETRQITKHVAQILDSRMNTKYDENDKLIREVKVITLKSKLVSDFRKDFQFYKVREINNYHHAHDAYLNAVVGTALIKKYPKLESEFVYGDYKVYDVRKMIAKSEQEIGKATAKYFFYSNIMNFFKTEITLANGEIRKRPLIETNGETGEIVWDKGRDFATVRKVLSMPQVNIVKKTEVQTGGFSKESILPKRNSDKLIARKKDWDPKKYGGFDSPTVAYSVLVVAKVEKGKSKKLKSVKELLGITIMERSSFEKNPIDFLEAKGYKEVKKDLIIKLPKYSLFELENGRKRMLASAGELQKGNELALPSKYVNFLYLASHYEKLKGSPEDNEQKQLFVEQHKHYLDEIIEQISEFSKRVILADANLDKVLSAYNKHRDKPIREQAENIIHLFTLTNLGAPAAFKYFDTTIDRKRYTSTKEVLDATLIHQSITGLYETRIDLSQLGGDGGEAAAKGGSGSSGGTLNIEDEYRLHETSKEPDVSLGSTWLSDFPQAWAETGGMGLAVRQAPLIIPLKATSTPVSIKQYPMSQEARLGIKPHIQRLLDQGILVPCQSPWNTPLLPVKKPGTNDYRPVQDLREVNKRVEDIHPTVPNPYNLLSGLPPSHQWYTVLDLKDAFFCLRLHPTSQPLFAFEWRDPEMGISGQLTWTRLPQGFKNSPTLFNEALHRDLAGFRIQHPDLILLQYVDDLLLAATSELDCQQGTRALLQTLGDLGYRASAKKAQICQKQVKYLGYLLKEGQRWLTEARKETVMGQPIPKTPRQLREFLGKAGFCRLFIPGFAEMAAPLYPLTKPGTLFNWGPDQQKAFQEIKQALLTAPALGLPDLTKPFELFVDEKQGYAKGVLTQKLGPWRRPVAYLSKKLDPVAAGWPPCLRMVAAIAVLTKDAGKLTMGQPLVILAPHAVEALVKQPPDRWLSNARMTHYQALLLDTDRVQFGPVVALNPATLLPLPEEGLQHDCLDILAEAHGTRSDLMDQPLPDADHTWYTDGSSFLQEGQRKAGAAVTTETEVIWARALPAGTSAQRAELIALTQALKMAEGKKLNVYTDSRYAFATAHIHGEIYRRRGWLTSEGKEIKNKDEILALLKALFLPKRLSIIHCPGHQKGNSAEARGNRMADQAAREVATRETPETSTLLAGKRTADGSEFEKRTADGSEFESPKKKAKVE

SEQ ID NO: 2371 - protein, 2094 aa, synthetic construct
MPAAKRVKLDGGDKKYSIGLDIGTNSVGWAVITDEYKVPSKKFKVLGNTDRHSIKKNLIGALLFDSGETAEATRLKRTARRRYTRRKNRICYLQEIFSNEMAKVDDSFFHRLEESFLVEEDKKHERHPIFGNIVDEVAYHEKYPTIYHLRKKLVDSTDKADLRLIYLALAHMIKFRGHFLIEGDLNPDNSDVDKLFIQLVQTYNQLFEENPINASGVDAKAILSARLSKSRRLENLIAQLPGEKKNGLFGNLIALSLGLTPNFKSNFDLAEDAKLQLSKDTYDDDLDNLLAQIGDQYADLFLAAKNLSDAILLSDILRVNTEITKAPLSASMIKRYDEHHQDLTLLKALVRQQLPEKYKEIFFDQSKNGYAGYIDGGASQEEFYKFIKPILEKMDGTEELLVKLNREDLLRKQRTFDNGSIPHQIHLGELHAILRRQEDFYPFLKDNREKIEKILTFRIPYYVGPLARGNSRFAWMTRKSEETITPWNFEEVVDKGASAQSFIERMTNFDKNLPNEKVLPKHSLLYEYFTVYNELTKVKYVTEGMRKPAFLSGEQKKAIVDLLFKTNRKVTVKQLKEDYFKKIECFDSVEISGVEDRFNASLGTYHDLLKIIKDKDFLDNEENEDILEDIVLTLTLFEDREMIEERLKTYAHLFDDKVMKQLKRRRYTGWGRLSRKLINGIRDKQSGKTILDFLKSDGFANRNFMQLIHDDSLTFKEDIQKAQVSGQGDSLHEHIANLAGSPAIKKGILQTVKVVDELVKVMGRHKPENIVIEMARENQTTQKGQKNSRERMKRIEEGIKELGSQILKEHPVENTQLQNEKLYLYYLQNGRDMYVDQELDINRLSDYDVDHIVPQSFLKDDSIDNKVLTRSDKARGKSDNVPSEEVVKKMKNYWRQLLNAKLITQRKFDNLTKAERGGLSELDKAGFIKRQLVETRQITKHVAQILDSRMNTKYDENDKLIREVKVITLKSKLVSDFRKDFQFYKVREINNYHHAHDAYLNAVVGTALIKKYPKLESEFVYGDYKVYDVRKMIAKSEQEIGKATAKYFFYSNIMNFFKTEITLANGEIRKRPLIETNGETGEIVWDKGRDFATVRKVLSMPQVNIVKKTEVQTGGFSKESILPKRNSDKLIARKKDWDPKKYGGFDSPTVAYSVLVVAKVEKGKSKKLKSVKELLGITIMERSSFEKNPIDFLEAKGYKEVKKDLIIKLPKYSLFELENGRKRMLASAGELQKGNELALPSKYVNFLYLASHYEKLKGSPEDNEQKQLFVEQHKHYLDEIIEQISEFSKRVILADANLDKVLSAYNKHRDKPIREQAENIIHLFTLTNLGAPAAFKYFDTTIDRKRYTSTKEVLDATLIHQSITGLYETRIDLSQLGGDGGGGSGGGGSSGGTLNIEDEYRLHETSKEPDVSLGSTWLSDFPQAWAETGGMGLAVRQAPLIIPLKATSTPVSIKQYPMSQEARLGIKPHIQRLLDQGILVPCQSPWNTPLLPVKKPGTNDYRPVQDLREVNKRVEDIHPTVPNPYNLLSGLPPSHQWYTVLDLKDAFFCLRLHPTSQPLFAFEWRDPEMGISGQLTWTRLPQGFKNSPTLFNEALHRDLAGFRIQHPDLILLQYVDDLLLAATSELDCQQGTRALLQTLGDLGYRASAKKAQICQKQVKYLGYLLKEGQRWLTEARKETVMGQPIPKTPRQLREFLGKAGFCRLFIPGFAEMAAPLYPLTKPGTLFNWGPDQQKAFQEIKQALLTAPALGLPDLTKPFELFVDEKQGYAKGVLTQKLGPWRRPVAYLSKKLDPVAAGWPPCLRMVAAIAVLTKDAGKLTMGQPLVILAPHAVEALVKQPPDRWLSNARMTHYQALLLDTDRVQFGPVVALNPATLLPLPEEGLQHDCLDILAEAHGTRSDLMDQPLPDADHTWYTDGSSFLQEGQRKAGAAVTTETEVIWARALPAGTSAQRAELIALTQALKMAEGKKLNVYTDSRYAFATAHIHGEIYRRRGWLTSEGKEIKNKDEILALLKALFLPKRLSIIHCPGHQKGNSAEARGNRMADQAAREVATRETPETSTLLAGKRTADGSEFEKRTADGSEFESPKKKAKVE

SEQ ID NO: 2372 - protein, 2096 aa, synthetic construct
MPAAKRVKLDGGDKKYSIGLDIGTNSVGWAVITDEYKVPSKKFKVLGNTDRHSIKKNLIGALLFDSGETAEATRLKRTARRRYTRRKNRICYLQEIFSNEMAKVDDSFFHRLEESFLVEEDKKHERHPIFGNIVDEVAYHEKYPTIYHLRKKLVDSTDKADLRLIYLALAHMIKFRGHFLIEGDLNPDNSDVDKLFIQLVQTYNQLFEENPINASGVDAKAILSARLSKSRRLENLIAQLPGEKKNGLFGNLIALSLGLTPNFKSNFDLAEDAKLQLSKDTYDDDLDNLLAQIGDQYADLFLAAKNLSDAILLSDILRVNTEITKAPLSASMIKRYDEHHQDLTLLKALVRQQLPEKYKEIFFDQSKNGYAGYIDGGASQEEFYKFIKPILEKMDGTEELLVKLNREDLLRKQRTFDNGSIPHQIHLGELHAILRRQEDFYPFLKDNREKIEKILTFRIPYYVGPLARGNSRFAWMTRKSEETITPWNFEEVVDKGASAQSFIERMTNFDKNLPNEKVLPKHSLLYEYFTVYNELTKVKYVTEGMRKPAFLSGEQKKAIVDLLFKTNRKVTVKQLKEDYFKKIECFDSVEISGVEDRFNASLGTYHDLLKIIKDKDFLDNEENEDILEDIVLTLTLFEDREMIEERLKTYAHLFDDKVMKQLKRRRYTGWGRLSRKLINGIRDKQSGKTILDFLKSDGFANRNFMQLIHDDSLTFKEDIQKAQVSGQGDSLHEHIANLAGSPAIKKGILQTVKVVDELVKVMGRHKPENIVIEMARENQTTQKGQKNSRERMKRIEEGIKELGSQILKEHPVENTQLQNEKLYLYYLQNGRDMYVDQELDINRLSDYDVDHIVPQSFLKDDSIDNKVLTRSDKARGKSDNVPSEEVVKKMKNYWRQLLNAKLITQRKFDNLTKAERGGLSELDKAGFIKRQLVETRQITKHVAQILDSRMNTKYDENDKLIREVKVITLKSKLVSDFRKDFQFYKVREINNYHHAHDAYLNAVVGTALIKKYPKLESEFVYGDYKVYDVRKMIAKSEQEIGKATAKYFFYSNIMNFFKTEITLANGEIRKRPLIETNGETGEIVWDKGRDFATVRKVLSMPQVNIVKKTEVQTGGFSKESILPKRNSDKLIARKKDWDPKKYGGFDSPTVAYSVLVVAKVEKGKSKKLKSVKELLGITIMERSSFEKNPIDFLEAKGYKEVKKDLIIKLPKYSLFELENGRKRMLASAGELQKGNELALPSKYVNFLYLASHYEKLKGSPEDNEQKQLFVEQHKHYLDEIIEQISEFSKRVILADANLDKVLSAYNKHRDKPIREQAENIIHLFTLTNLGAPAAFKYFDTTIDRKRYTSTKEVLDATLIHQSITGLYETRIDLSQLGGDGGEAAAKGGSPAPGGTLNIEDEYRLHETSKEPDVSLGSTWLSDFPQAWAETGGMGLAVRQAPLIIPLKATSTPVSIKQYPMSQEARLGIKPHIQRLLDQGILVPCQSPWNTPLLPVKKPGTNDYRPVQDLREVNKRVEDIHPTVPNPYNLLSGLPPSHQWYTVLDLKDAFFCLRLHPTSQPLFAFEWRDPEMGISGQLTWTRLPQGFKNSPTLFNEALHRDLAGFRIQHPDLILLQYVDDLLLAATSELDCQQGTRALLQTLGDLGYRASAKKAQICQKQVKYLGYLLKEGQRWLTEARKETVMGQPIPKTPRQLREFLGKAGFCRLFIPGFAEMAAPLYPLTKPGTLFNWGPDQQKAFQEIKQALLTAPALGLPDLTKPFELFVDEKQGYAKGVLTQKLGPWRRPVAYLSKKLDPVAAGWPPCLRMVAAIAVLTKDAGKLTMGQPLVILAPHAVEALVKQPPDRWLSNARMTHYQALLLDTDRVQFGPVVALNPATLLPLPEEGLQHDCLDILAEAHGTRSDLMDQPLPDADHTWYTDGSSFLQEGQRKAGAAVTTETEVIWARALPAGTSAQRAELIALTQALKMAEGKKLNVYTDSRYAFATAHIHGEIYRRRGWLTSEGKEIKNKDEILALLKALFLPKRLSIIHCPGHQKGNSAEARGNRMADQAAREVATRETPETSTLLAGKRTADGSEFEKRTADGSEFESPKKKAKVE

SEQ ID NO: 2373 - protein, 2100 aa, synthetic construct
MPAAKRVKLDGGDKKYSIGLDIGTNSVGWAVITDEYKVPSKKFKVLGNTDRHSIKKNLIGALLFDSGETAEATRLKRTARRRYTRRKNRICYLQEIFSNEMAKVDDSFFHRLEESFLVEEDKKHERHPIFGNIVDEVAYHEKYPTIYHLRKKLVDSTDKADLRLIYLALAHMIKFRGHFLIEGDLNPDNSDVDKLFIQLVQTYNQLFEENPINASGVDAKAILSARLSKSRRLENLIAQLPGEKKNGLFGNLIALSLGLTPNFKSNFDLAEDAKLQLSKDTYDDDLDNLLAQIGDQYADLFLAAKNLSDAILLSDILRVNTEITKAPLSASMIKRYDEHHQDLTLLKALVRQQLPEKYKEIFFDQSKNGYAGYIDGGASQEEFYKFIKPILEKMDGTEELLVKLNREDLLRKQRTFDNGSIPHQIHLGELHAILRRQEDFYPFLKDNREKIEKILTFRIPYYVGPLARGNSRFAWMTRKSEETITPWNFEEVVDKGASAQSFIERMTNFDKNLPNEKVLPKHSLLYEYFTVYNELTKVKYVTEGMRKPAFLSGEQKKAIVDLLFKTNRKVTVKQLKEDYFKKIECFDSVEISGVEDRFNASLGTYHDLLKIIKDKDFLDNEENEDILEDIVLTLTLFEDREMIEERLKTYAHLFDDKVMKQLKRRRYTGWGRLSRKLINGIRDKQSGKTILDFLKSDGFANRNFMQLIHDDSLTFKEDIQKAQVSGQGDSLHEHIANLAGSPAIKKGILQTVKVVDELVKVMGRHKPENIVIEMARENQTTQKGQKNSRERMKRIEEGIKELGSQILKEHPVENTQLQNEKLYLYYLQNGRDMYVDQELDINRLSDYDVDHIVPQSFLKDDSIDNKVLTRSDKARGKSDNVPSEEVVKKMKNYWRQLLNAKLITQRKFDNLTKAERGGLSELDKAGFIKRQLVETRQITKHVAQILDSRMNTKYDENDKLIREVKVITLKSKLVSDFRKDFQFYKVREINNYHHAHDAYLNAVVGTALIKKYPKLESEFVYGDYKVYDVRKMIAKSEQEIGKATAKYFFYSNIMNFFKTEITLANGEIRKRPLIETNGETGEIVWDKGRDFATVRKVLSMPQVNIVKKTEVQTGGFSKESILPKRNSDKLIARKKDWDPKKYGGFDSPTVAYSVLVVAKVEKGKSKKLKSVKELLGITIMERSSFEKNPIDFLEAKGYKEVKKDLIIKLPKYSLFELENGRKRMLASAGELQKGNELALPSKYVNFLYLASHYEKLKGSPEDNEQKQLFVEQHKHYLDEIIEQISEFSKRVILADANLDKVLSAYNKHRDKPIREQAENIIHLFTLTNLGAPAAFKYFDTTIDRKRYTSTKEVLDATLIHQSITGLYETRIDLSQLGGDGGEAAAKEAAAKEAAAKGGTLNIEDEYRLHETSKEPDVSLGSTWLSDFPQAWAETGGMGLAVRQAPLIIPLKATSTPVSIKQYPMSQEARLGIKPHIQRLLDQGILVPCQSPWNTPLLPVKKPGTNDYRPVQDLREVNKRVEDIHPTVPNPYNLLSGLPPSHQWYTVLDLKDAFFCLRLHPTSQPLFAFEWRDPEMGISGQLTWTRLPQGFKNSPTLFNEALHRDLAGFRIQHPDLILLQYVDDLLLAATSELDCQQGTRALLQTLGDLGYRASAKKAQICQKQVKYLGYLLKEGQRWLTEARKETVMGQPIPKTPRQLREFLGKAGFCRLFIPGFAEMAAPLYPLTKPGTLFNWGPDQQKAFQEIKQALLTAPALGLPDLTKPFELFVDEKQGYAKGVLTQKLGPWRRPVAYLSKKLDPVAAGWPPCLRMVAAIAVLTKDAGKLTMGQPLVILAPHAVEALVKQPPDRWLSNARMTHYQALLLDTDRVQFGPVVALNPATLLPLPEEGLQHDCLDILAEAHGTRSDLMDQPLPDADHTWYTDGSSFLQEGQRKAGAAVTTETEVIWARALPAGTSAQRAELIALTQALKMAEGKKLNVYTDSRYAFATAHIHGEIYRRRGWLTSEGKEIKNKDEILALLKALFLPKRLSIIHCPGHQKGNSAEARGNRMADQAAREVATRETPETSTLLAGKRTADGSEFEKRTADGSEFESPKKKAKVE

SEQ ID NO: 2374 - protein, 2100 aa, synthetic construct
MPAAKRVKLDGGDKKYSIGLDIGTNSVGWAVITDEYKVPSKKFKVLGNTDRHSIKKNLIGALLFDSGETAEATRLKRTARRRYTRRKNRICYLQEIFSNEMAKVDDSFFHRLEESFLVEEDKKHERHPIFGNIVDEVAYHEKYPTIYHLRKKLVDSTDKADLRLIYLALAHMIKFRGHFLIEGDLNPDNSDVDKLFIQLVQTYNQLFEENPINASGVDAKAILSARLSKSRRLENLIAQLPGEKKNGLFGNLIALSLGLTPNFKSNFDLAEDAKLQLSKDTYDDDLDNLLAQIGDQYADLFLAAKNLSDAILLSDILRVNTEITKAPLSASMIKRYDEHHQDLTLLKALVRQQLPEKYKEIFFDQSKNGYAGYIDGGASQEEFYKFIKPILEKMDGTEELLVKLNREDLLRKQRTFDNGSIPHQIHLGELHAILRRQEDFYPFLKDNREKIEKILTFRIPYYVGPLARGNSRFAWMTRKSEETITPWNFEEVVDKGASAQSFIERMTNFDKNLPNEKVLPKHSLLYEYFTVYNELTKVKYVTEGMRKPAFLSGEQKKAIVDLLFKTNRKVTVKQLKEDYFKKIECFDSVEISGVEDRFNASLGTYHDLLKIIKDKDFLDNEENEDILEDIVLTLTLFEDREMIEERLKTYAHLFDDKVMKQLKRRRYTGWGRLSRKLINGIRDKQSGKTILDFLKSDGFANRNFMQLIHDDSLTFKEDIQKAQVSGQGDSLHEHIANLAGSPAIKKGILQTVKVVDELVKVMGRHKPENIVIEMARENQTTQKGQKNSRERMKRIEEGIKELGSQILKEHPVENTQLQNEKLYLYYLQNGRDMYVDQELDINRLSDYDVDHIVPQSFLKDDSIDNKVLTRSDKARGKSDNVPSEEVVKKMKNYWRQLLNAKLITQRKFDNLTKAERGGLSELDKAGFIKRQLVETRQITKHVAQILDSRMNTKYDENDKLIREVKVITLKSKLVSDFRKDFQFYKVREINNYHHAHDAYLNAVVGTALIKKYPKLESEFVYGDYKVYDVRKMIAKSEQEIGKATAKYFFYSNIMNFFKTEITLANGEIRKRPLIETNGETGEIVWDKGRDFATVRKVLSMPQVNIVKKTEVQTGGFSKESILPKRNSDKLIARKKDWDPKKYGGFDSPTVAYSVLVVAKVEKGKSKKLKSVKELLGITIMERSSFEKNPIDFLEAKGYKEVKKDLIIKLPKYSLFELENGRKRMLASAGELQKGNELALPSKYVNFLYLASHYEKLKGSPEDNEQKQLFVEQHKHYLDEIIEQISEFSKRVILADANLDKVLSAYNKHRDKPIREQAENIIHLFTLTNLGAPAAFKYFDTTIDRKRYTSTKEVLDATLIHQSITGLYETRIDLSQLGGDGGGGGGSEAAAKGGGGSGGTLNIEDEYRLHETSKEPDVSLGSTWLSDFPQAWAETGGMGLAVRQAPLIIPLKATSTPVSIKQYPMSQEARLGIKPHIQRLLDQGILVPCQSPWNTPLLPVKKPGTNDYRPVQDLREVNKRVEDIHPTVPNPYNLLSGLPPSHQWYTVLDLKDAFFCLRLHPTSQPLFAFEWRDPEMGISGQLTWTRLPQGFKNSPTLFNEALHRDLAGFRIQHPDLILLQYVDDLLLAATSELDCQQGTRALLQTLGDLGYRASAKKAQICQKQVKYLGYLLKEGQRWLTEARKETVMGQPIPKTPRQLREFLGKAGFCRLFIPGFAEMAAPLYPLTKPGTLFNWGPDQQKAFQEIKQALLTAPALGLPDLTKPFELFVDEKQGYAKGVLTQKLGPWRRPVAYLSKKLDPVAAGWPPCLRMVAAIAVLTKDAGKLTMGQPLVILAPHAVEALVKQPPDRWLSNARMTHYQALLLDTDRVQFGPVVALNPATLLPLPEEGLQHDCLDILAEAHGTRSDLMDQPLPDADHTWYTDGSSFLQEGQRKAGAAVTTETEVIWARALPAGTSAQRAELIALTQALKMAEGKKLNVYTDSRYAFATAHIHGEIYRRRGWLTSEGKEIKNKDEILALLKALFLPKRLSIIHCPGHQKGNSAEARGNRMADQAAREVATRETPETSTLLAGKRTADGSEFEKRTADGSEFESPKKKAKVE

SEQ ID NO: 2375 - protein, 2088 aa, synthetic construct
MPAAKRVKLDGGDKKYSIGLDIGTNSVGWAVITDEYKVPSKKFKVLGNTDRHSIKKNLIGALLFDSGETAEATRLKRTARRRYTRRKNRICYLQEIFSNEMAKVDDSFFHRLEESFLVEEDKKHERHPIFGNIVDEVAYHEKYPTIYHLRKKLVDSTDKADLRLIYLALAHMIKFRGHFLIEGDLNPDNSDVDKLFIQLVQTYNQLFEENPINASGVDAKAILSARLSKSRRLENLIAQLPGEKKNGLFGNLIALSLGLTPNFKSNFDLAEDAKLQLSKDTYDDDLDNLLAQIGDQYADLFLAAKNLSDAILLSDILRVNTEITKAPLSASMIKRYDEHHQDLTLLKALVRQQLPEKYKEIFFDQSKNGYAGYIDGGASQEEFYKFIKPILEKMDGTEELLVKLNREDLLRKQRTFDNGSIPHQIHLGELHAILRRQEDFYPFLKDNREKIEKILTFRIPYYVGPLARGNSRFAWMTRKSEETITPWNFEEVVDKGASAQSFIERMTNFDKNLPNEKVLPKHSLLYEYFTVYNELTKVKYVTEGMRKPAFLSGEQKKAIVDLLFKTNRKVTVKQLKEDYFKKIECFDSVEISGVEDRFNASLGTYHDLLKIIKDKDFLDNEENEDILEDIVLTLTLFEDREMIEERLKTYAHLFDDKVMKQLKRRRYTGWGRLSRKLINGIRDKQSGKTILDFLKSDGFANRNFMQLIHDDSLTFKEDIQKAQVSGQGDSLHEHIANLAGSPAIKKGILQTVKVVDELVKVMGRHKPENIVIEMARENQTTQKGQKNSRERMKRIEEGIKELGSQILKEHPVENTQLQNEKLYLYYLQNGRDMYVDQELDINRLSDYDVDHIVPQSFLKDDSIDNKVLTRSDKARGKSDNVPSEEVVKKMKNYWRQLLNAKLITQRKFDNLTKAERGGLSELDKAGFIKRQLVETRQITKHVAQILDSRMNTKYDENDKLIREVKVITLKSKLVSDFRKDFQFYKVREINNYHHAHDAYLNAVVGTALIKKYPKLESEFVYGDYKVYDVRKMIAKSEQEIGKATAKYFFYSNIMNFFKTEITLANGEIRKRPLIETNGETGEIVWDKGRDFATVRKVLSMPQVNIVKKTEVQTGGFSKESILPKRNSDKLIARKKDWDPKKYGGFDSPTVAYSVLVVAKVEKGKSKKLKSVKELLGITIMERSSFEKNPIDFLEAKGYKEVKKDLIIKLPKYSLFELENGRKRMLASAGELQKGNELALPSKYVNFLYLASHYEKLKGSPEDNEQKQLFVEQHKHYLDEIIEQISEFSKRVILADANLDKVLSAYNKHRDKPIREQAENIIHLFTLTNLGAPAAFKYFDTTIDRKRYTSTKEVLDATLIHQSITGLYETRIDLSQLGGDGGGGGGGTLNIEDEYRLHETSKEPDVSLGSTWLSDFPQAWAETGGMGLAVRQAPLIIPLKATSTPVSIKQYPMSQEARLGIKPHIQRLLDQGILVPCQSPWNTPLLPVKKPGTNDYRPVQDLREVNKRVEDIHPTVPNPYNLLSGLPPSHQWYTVLDLKDAFFCLRLHPTSQPLFAFEWRDPEMGISGQLTWTRLPQGFKNSPTLFNEALHRDLAGFRIQHPDLILLQYVDDLLLAATSELDCQQGTRALLQTLGDLGYRASAKKAQICQKQVKYLGYLLKEGQRWLTEARKETVMGQPIPKTPRQLREFLGKAGFCRLFIPGFAEMAAPLYPLTKPGTLFNWGPDQQKAFQEIKQALLTAPALGLPDLTKPFELFVDEKQGYAKGVLTQKLGPWRRPVAYLSKKLDPVAAGWPPCLRMVAAIAVLTKDAGKLTMGQPLVILAPHAVEALVKQPPDRWLSNARMTHYQALLLDTDRVQFGPVVALNPATLLPLPEEGLQHDCLDILAEAHGTRSDLMDQPLPDADHTWYTDGSSFLQEGQRKAGAAVTTETEVIWARALPAGTSAQRAELIALTQALKMAEGKKLNVYTDSRYAFATAHIHGEIYRRRGWLTSEGKEIKNKDEILALLKALFLPKRLSIIHCPGHQKGNSAEARGNRMADQAAREVATRETPETSTLLAGKRTADGSEFEKRTADGSEFESPKKKAKVE

SEQ ID NO: 2376 - protein, 2118 aa, synthetic construct
MPAAKRVKLDGGDKKYSIGLDIGTNSVGWAVITDEYKVPSKKFKVLGNTDRHSIKKNLIGALLFDSGETAEATRLKRTARRRYTRRKNRICYLQEIFSNEMAKVDDSFFHRLEESFLVEEDKKHERHPIFGNIVDEVAYHEKYPTIYHLRKKLVDSTDKADLRLIYLALAHMIKFRGHFLIEGDLNPDNSDVDKLFIQLVQTYNQLFEENPINASGVDAKAILSARLSKSRRLENLIAQLPGEKKNGLFGNLIALSLGLTPNFKSNFDLAEDAKLQLSKDTYDDDLDNLLAQIGDQYADLFLAAKNLSDAILLSDILRVNTEITKAPLSASMIKRYDEHHQDLTLLKALVRQQLPEKYKEIFFDQSKNGYAGYIDGGASQEEFYKFIKPILEKMDGTEELLVKLNREDLLRKQRTFDNGSIPHQIHLGELHAILRRQEDFYPFLKDNREKIEKILTFRIPYYVGPLARGNSRFAWMTRKSEETITPWNFEEVVDKGASAQSFIERMTNFDKNLPNEKVLPKHSLLYEYFTVYNELTKVKYVTEGMRKPAFLSGEQKKAIVDLLFKTNRKVTVKQLKEDYFKKIECFDSVEISGVEDRFNASLGTYHDLLKIIKDKDFLDNEENEDILEDIVLTLTLFEDREMIEERLKTYAHLFDDKVMKQLKRRRYTGWGRLSRKLINGIRDKQSGKTILDFLKSDGFANRNFMQLIHDDSLTFKEDIQKAQVSGQGDSLHEHIANLAGSPAIKKGILQTVKVVDELVKVMGRHKPENIVIEMARENQTTQKGQKNSRERMKRIEEGIKELGSQILKEHPVENTQLQNEKLYLYYLQNGRDMYVDQELDINRLSDYDVDHIVPQSFLKDDSIDNKVLTRSDKARGKSDNVPSEEVVKKMKNYWRQLLNAKLITQRKFDNLTKAERGGLSELDKAGFIKRQLVETRQITKHVAQILDSRMNTKYDENDKLIREVKVITLKSKLVSDFRKDFQFYKVREINNYHHAHDAYLNAVVGTALIKKYPKLESEFVYGDYKVYDVRKMIAKSEQEIGKATAKYFFYSNIMNFFKTEITLANGEIRKRPLIETNGETGEIVWDKGRDFATVRKVLSMPQVNIVKKTEVQTGGFSKESILPKRNSDKLIARKKDWDPKKYGGFDSPTVAYSVLVVAKVEKGKSKKLKSVKELLGITIMERSSFEKNPIDFLEAKGYKEVKKDLIIKLPKYSLFELENGRKRMLASAGELQKGNELALPSKYVNFLYLASHYEKLKGSPEDNEQKQLFVEQHKHYLDEIIEQISEFSKRVILADANLDKVLSAYNKHRDKPIREQAENIIHLFTLTNLGAPAAFKYFDTTIDRKRYTSTKEVLDATLIHQSITGLYETRIDLSQLGGDGGSGGSSGGSSGSETPGTSESATPESSGGSSGGSSGGTLNIEDEYRLHETSKEPDVSLGSTWLSDFPQAWAETGGMGLAVRQAPLIIPLKATSTPVSIKQYPMSQEARLGIKPHIQRLLDQGILVPCQSPWNTPLLPVKKPGTNDYRPVQDLREVNKRVEDIHPTVPNPYNLLSGLPPSHQWYTVLDLKDAFFCLRLHPTSQPLFAFEWRDPEMGISGQLTWTRLPQGFKNSPTLFNEALHRDLAGFRIQHPDLILLQYVDDLLLAATSELDCQQGTRALLQTLGDLGYRASAKKAQICQKQVKYLGYLLKEGQRWLTEARKETVMGQPIPKTPRQLREFLGKAGFCRLFIPGFAEMAAPLYPLTKPGTLFNWGPDQQKAFQEIKQALLTAPALGLPDLTKPFELFVDEKQGYAKGVLTQKLGPWRRPVAYLSKKLDPVAAGWPPCLRMVAAIAVLTKDAGKLTMGQPLVILAPHAVEALVKQPPDRWLSNARMTHYQALLLDTDRVQFGPVVALNPATLLPLPEEGLQHDCLDILAEAHGTRSDLMDQPLPDADHTWYTDGSSFLQEGQRKAGAAVTTETEVIWARALPAGTSAQRAELIALTQALKMAEGKKLNVYTDSRYAFATAHIHGEIYRRRGWLTSEGKEIKNKDEILALLKALFLPKRLSIIHCPGHQKGNSAEARGNRMADQAAREVATRETPETSTLLAGKRTADGSEFEKRTADGSEFESPKKKAKVE

SEQ ID NO: 2377 - protein, 2096 aa, synthetic construct
MPAAKRVKLDGGDKKYSIGLDIGTNSVGWAVITDEYKVPSKKFKVLGNTDRHSIKKNLIGALLFDSGETAEATRLKRTARRRYTRRKNRICYLQEIFSNEMAKVDDSFFHRLEESFLVEEDKKHERHPIFGNIVDEVAYHEKYPTIYHLRKKLVDSTDKADLRLIYLALAHMIKFRGHFLIEGDLNPDNSDVDKLFIQLVQTYNQLFEENPINASGVDAKAILSARLSKSRRLENLIAQLPGEKKNGLFGNLIALSLGLTPNFKSNFDLAEDAKLQLSKDTYDDDLDNLLAQIGDQYADLFLAAKNLSDAILLSDILRVNTEITKAPLSASMIKRYDEHHQDLTLLKALVRQQLPEKYKEIFFDQSKNGYAGYIDGGASQEEFYKFIKPILEKMDGTEELLVKLNREDLLRKQRTFDNGSIPHQIHLGELHAILRRQEDFYPFLKDNREKIEKILTFRIPYYVGPLARGNSRFAWMTRKSEETITPWNFEEVVDKGASAQSFIERMTNFDKNLPNEKVLPKHSLLYEYFTVYNELTKVKYVTEGMRKPAFLSGEQKKAIVDLLFKTNRKVTVKQLKEDYFKKIECFDSVEISGVEDRFNASLGTYHDLLKIIKDKDFLDNEENEDILEDIVLTLTLFEDREMIEERLKTYAHLFDDKVMKQLKRRRYTGWGRLSRKLINGIRDKQSGKTILDFLKSDGFANRNFMQLIHDDSLTFKEDIQKAQVSGQGDSLHEHIANLAGSPAIKKGILQTVKVVDELVKVMGRHKPENIVIEMARENQTTQKGQKNSRERMKRIEEGIKELGSQILKEHPVENTQLQNEKLYLYYLQNGRDMYVDQELDINRLSDYDVDHIVPQSFLKDDSIDNKVLTRSDKARGKSDNVPSEEVVKKMKNYWRQLLNAKLITQRKFDNLTKAERGGLSELDKAGFIKRQLVETRQITKHVAQILDSRMNTKYDENDKLIREVKVITLKSKLVSDFRKDFQFYKVREINNYHHAHDAYLNAVVGTALIKKYPKLESEFVYGDYKVYDVRKMIAKSEQEIGKATAKYFFYSNIMNFFKTEITLANGEIRKRPLIETNGETGEIVWDKGRDFATVRKVLSMPQVNIVKKTEVQTGGFSKESILPKRNSDKLIARKKDWDPKKYGGFDSPTVAYSVLVVAKVEKGKSKKLKSVKELLGITIMERSSFEKNPIDFLEAKGYKEVKKDLIIKLPKYSLFELENGRKRMLASAGELQKGNELALPSKYVNFLYLASHYEKLKGSPEDNEQKQLFVEQHKHYLDEIIEQISEFSKRVILADANLDKVLSAYNKHRDKPIREQAENIIHLFTLTNLGAPAAFKYFDTTIDRKRYTSTKEVLDATLIHQSITGLYETRIDLSQLGGDGGPAPGGGEAAAKGGTLNIEDEYRLHETSKEPDVSLGSTWLSDFPQAWAETGGMGLAVRQAPLIIPLKATSTPVSIKQYPMSQEARLGIKPHIQRLLDQGILVPCQSPWNTPLLPVKKPGTNDYRPVQDLREVNKRVEDIHPTVPNPYNLLSGLPPSHQWYTVLDLKDAFFCLRLHPTSQPLFAFEWRDPEMGISGQLTWTRLPQGFKNSPTLFNEALHRDLAGFRIQHPDLILLQYVDDLLLAATSELDCQQGTRALLQTLGDLGYRASAKKAQICQKQVKYLGYLLKEGQRWLTEARKETVMGQPIPKTPRQLREFLGKAGFCRLFIPGFAEMAAPLYPLTKPGTLFNWGPDQQKAFQEIKQALLTAPALGLPDLTKPFELFVDEKQGYAKGVLTQKLGPWRRPVAYLSKKLDPVAAGWPPCLRMVAAIAVLTKDAGKLTMGQPLVILAPHAVEALVKQPPDRWLSNARMTHYQALLLDTDRVQFGPVVALNPATLLPLPEEGLQHDCLDILAEAHGTRSDLMDQPLPDADHTWYTDGSSFLQEGQRKAGAAVTTETEVIWARALPAGTSAQRAELIALTQALKMAEGKKLNVYTDSRYAFATAHIHGEIYRRRGWLTSEGKEIKNKDEILALLKALFLPKRLSIIHCPGHQKGNSAEARGNRMADQAAREVATRETPETSTLLAGKRTADGSEFEKRTADGSEFESPKKKAKVE

SEQ ID NO: 2378 - protein, 2090 aa, synthetic construct
MPAAKRVKLDGGDKKYSIGLDIGTNSVGWAVITDEYKVPSKKFKVLGNTDRHSIKKNLIGALLFDSGETAEATRLKRTARRRYTRRKNRICYLQEIFSNEMAKVDDSFFHRLEESFLVEEDKKHERHPIFGNIVDEVAYHEKYPTIYHLRKKLVDSTDKADLRLIYLALAHMIKFRGHFLIEGDLNPDNSDVDKLFIQLVQTYNQLFEENPINASGVDAKAILSARLSKSRRLENLIAQLPGEKKNGLFGNLIALSLGLTPNFKSNFDLAEDAKLQLSKDTYDDDLDNLLAQIGDQYADLFLAAKNLSDAILLSDILRVNTEITKAPLSASMIKRYDEHHQDLTLLKALVRQQLPEKYKEIFFDQSKNGYAGYIDGGASQEEFYKFIKPILEKMDGTEELLVKLNREDLLRKQRTFDNGSIPHQIHLGELHAILRRQEDFYPFLKDNREKIEKILTFRIPYYVGPLARGNSRFAWMTRKSEETITPWNFEEVVDKGASAQSFIERMTNFDKNLPNEKVLPKHSLLYEYFTVYNELTKVKYVTEGMRKPAFLSGEQKKAIVDLLFKTNRKVTVKQLKEDYFKKIECFDSVEISGVEDRFNASLGTYHDLLKIIKDKDFLDNEENEDILEDIVLTLTLFEDREMIEERLKTYAHLFDDKVMKQLKRRRYTGWGRLSRKLINGIRDKQSGKTILDFLKSDGFANRNFMQLIHDDSLTFKEDIQKAQVSGQGDSLHEHIANLAGSPAIKKGILQTVKVVDELVKVMGRHKPENIVIEMARENQTTQKGQKNSRERMKRIEEGIKELGSQILKEHPVENTQLQNEKLYLYYLQNGRDMYVDQELDINRLSDYDVDHIVPQSFLKDDSIDNKVLTRSDKARGKSDNVPSEEVVKKMKNYWRQLLNAKLITQRKFDNLTKAERGGLSELDKAGFIKRQLVETRQITKHVAQILDSRMNTKYDENDKLIREVKVITLKSKLVSDFRKDFQFYKVREINNYHHAHDAYLNAVVGTALIKKYPKLESEFVYGDYKVYDVRKMIAKSEQEIGKATAKYFFYSNIMNFFKTEITLANGEIRKRPLIETNGETGEIVWDKGRDFATVRKVLSMPQVNIVKKTEVQTGGFSKESILPKRNSDKLIARKKDWDPKKYGGFDSPTVAYSVLVVAKVEKGKSKKLKSVKELLGITIMERSSFEKNPIDFLEAKGYKEVKKDLIIKLPKYSLFELENGRKRMLASAGELQKGNELALPSKYVNFLYLASHYEKLKGSPEDNEQKQLFVEQHKHYLDEIIEQISEFSKRVILADANLDKVLSAYNKHRDKPIREQAENIIHLFTLTNLGAPAAFKYFDTTIDRKRYTSTKEVLDATLIHQSITGLYETRIDLSQLGGDGGGGGGGGGTLNIEDEYRLHETSKEPDVSLGSTWLSDFPQAWAETGGMGLAVRQAPLIIPLKATSTPVSIKQYPMSQEARLGIKPHIQRLLDQGILVPCQSPWNTPLLPVKKPGTNDYRPVQDLREVNKRVEDIHPTVPNPYNLLSGLPPSHQWYTVLDLKDAFFCLRLHPTSQPLFAFEWRDPEMGISGQLTWTRLPQGFKNSPTLFNEALHRDLAGFRIQHPDLILLQYVDDLLLAATSELDCQQGTRALLQTLGDLGYRASAKKAQICQKQVKYLGYLLKEGQRWLTEARKETVMGQPIPKTPRQLREFLGKAGFCRLFIPGFAEMAAPLYPLTKPGTLFNWGPDQQKAFQEIKQALLTAPALGLPDLTKPFELFVDEKQGYAKGVLTQKLGPWRRPVAYLSKKLDPVAAGWPPCLRMVAAIAVLTKDAGKLTMGQPLVILAPHAVEALVKQPPDRWLSNARMTHYQALLLDTDRVQFGPVVALNPATLLPLPEEGLQHDCLDILAEAHGTRSDLMDQPLPDADHTWYTDGSSFLQEGQRKAGAAVTTETEVIWARALPAGTSAQRAELIALTQALKMAEGKKLNVYTDSRYAFATAHIHGEIYRRRGWLTSEGKEIKNKDEILALLKALFLPKRLSIIHCPGHQKGNSAEARGNRMADQAAREVATRETPETSTLLAGKRTADGSEFEKRTADGSEFESPKKKAKVE

SEQ ID NO: 2379 - protein, 2094 aa, synthetic construct
MPAAKRVKLDGGDKKYSIGLDIGTNSVGWAVITDEYKVPSKKFKVLGNTDRHSIKKNLIGALLFDSGETAEATRLKRTARRRYTRRKNRICYLQEIFSNEMAKVDDSFFHRLEESFLVEEDKKHERHPIFGNIVDEVAYHEKYPTIYHLRKKLVDSTDKADLRLIYLALAHMIKFRGHFLIEGDLNPDNSDVDKLFIQLVQTYNQLFEENPINASGVDAKAILSARLSKSRRLENLIAQLPGEKKNGLFGNLIALSLGLTPNFKSNFDLAEDAKLQLSKDTYDDDLDNLLAQIGDQYADLFLAAKNLSDAILLSDILRVNTEITKAPLSASMIKRYDEHHQDLTLLKALVRQQLPEKYKEIFFDQSKNGYAGYIDGGASQEEFYKFIKPILEKMDGTEELLVKLNREDLLRKQRTFDNGSIPHQIHLGELHAILRRQEDFYPFLKDNREKIEKILTFRIPYYVGPLARGNSRFAWMTRKSEETITPWNFEEVVDKGASAQSFIERMTNFDKNLPNEKVLPKHSLLYEYFTVYNELTKVKYVTEGMRKPAFLSGEQKKAIVDLLFKTNRKVTVKQLKEDYFKKIECFDSVEISGVEDRFNASLGTYHDLLKIIKDKDFLDNEENEDILEDIVLTLTLFEDREMIEERLKTYAHLFDDKVMKQLKRRRYTGWGRLSRKLINGIRDKQSGKTILDFLKSDGFANRNFMQLIHDDSLTFKEDIQKAQVSGQGDSLHEHIANLAGSPAIKKGILQTVKVVDELVKVMGRHKPENIVIEMARENQTTQKGQKNSRERMKRIEEGIKELGSQILKEHPVENTQLQNEKLYLYYLQNGRDMYVDQELDINRLSDYDVDHIVPQSFLKDDSIDNKVLTRSDKARGKSDNVPSEEVVKKMKNYWRQLLNAKLITQRKFDNLTKAERGGLSELDKAGFIKRQLVETRQITKHVAQILDSRMNTKYDENDKLIREVKVITLKSKLVSDFRKDFQFYKVREINNYHHAHDAYLNAVVGTALIKKYPKLESEFVYGDYKVYDVRKMIAKSEQEIGKATAKYFFYSNIMNFFKTEITLANGEIRKRPLIETNGETGEIVWDKGRDFATVRKVLSMPQVNIVKKTEVQTGGFSKESILPKRNSDKLIARKKDWDPKKYGGFDSPTVAYSVLVVAKVEKGKSKKLKSVKELLGITIMERSSFEKNPIDFLEAKGYKEVKKDLIIKLPKYSLFELENGRKRMLASAGELQKGNELALPSKYVNFLYLASHYEKLKGSPEDNEQKQLFVEQHKHYLDEIIEQISEFSKRVILADANLDKVLSAYNKHRDKPIREQAENIIHLFTLTNLGAPAAFKYFDTTIDRKRYTSTKEVLDATLIHQSITGLYETRIDLSQLGGDGGGSSGGSGGGGGTLNIEDEYRLHETSKEPDVSLGSTWLSDFPQAWAETGGMGLAVRQAPLIIPLKATSTPVSIKQYPMSQEARLGIKPHIQRLLDQGILVPCQSPWNTPLLPVKKPGTNDYRPVQDLREVNKRVEDIHPTVPNPYNLLSGLPPSHQWYTVLDLKDAFFCLRLHPTSQPLFAFEWRDPEMGISGQLTWTRLPQGFKNSPTLFNEALHRDLAGFRIQHPDLILLQYVDDLLLAATSELDCQQGTRALLQTLGDLGYRASAKKAQICQKQVKYLGYLLKEGQRWLTEARKETVMGQPIPKTPRQLREFLGKAGFCRLFIPGFAEMAAPLYPLTKPGTLFNWGPDQQKAFQEIKQALLTAPALGLPDLTKPFELFVDEKQGYAKGVLTQKLGPWRRPVAYLSKKLDPVAAGWPPCLRMVAAIAVLTKDAGKLTMGQPLVILAPHAVEALVKQPPDRWLSNARMTHYQALLLDTDRVQFGPVVALNPATLLPLPEEGLQHDCLDILAEAHGTRSDLMDQPLPDADHTWYTDGSSFLQEGQRKAGAAVTTETEVIWARALPAGTSAQRAELIALTQALKMAEGKKLNVYTDSRYAFATAHIHGEIYRRRGWLTSEGKEIKNKDEILALLKALFLPKRLSIIHCPGHQKGNSAEARGNRMADQAAREVATRETPETSTLLAGKRTADGSEFEKRTADGSEFESPKKKAKVE

SEQ ID NO: 2380 - protein, 2094 aa, synthetic construct
MPAAKRVKLDGGDKKYSIGLDIGTNSVGWAVITDEYKVPSKKFKVLGNTDRHSIKKNLIGALLFDSGETAEATRLKRTARRRYTRRKNRICYLQEIFSNEMAKVDDSFFHRLEESFLVEEDKKHERHPIFGNIVDEVAYHEKYPTIYHLRKKLVDSTDKADLRLIYLALAHMIKFRGHFLIEGDLNPDNSDVDKLFIQLVQTYNQLFEENPINASGVDAKAILSARLSKSRRLENLIAQLPGEKKNGLFGNLIALSLGLTPNFKSNFDLAEDAKLQLSKDTYDDDLDNLLAQIGDQYADLFLAAKNLSDAILLSDILRVNTEITKAPLSASMIKRYDEHHQDLTLLKALVRQQLPEKYKEIFFDQSKNGYAGYIDGGASQEEFYKFIKPILEKMDGTEELLVKLNREDLLRKQRTFDNGSIPHQIHLGELHAILRRQEDFYPFLKDNREKIEKILTFRIPYYVGPLARGNSRFAWMTRKSEETITPWNFEEVVDKGASAQSFIERMTNFDKNLPNEKVLPKHSLLYEYFTVYNELTKVKYVTEGMRKPAFLSGEQKKAIVDLLFKTNRKVTVKQLKEDYFKKIECFDSVEISGVEDRFNASLGTYHDLLKIIKDKDFLDNEENEDILEDIVLTLTLFEDREMIEERLKTYAHLFDDKVMKQLKRRRYTGWGRLSRKLINGIRDKQSGKTILDFLKSDGFANRNFMQLIHDDSLTFKEDIQKAQVSGQGDSLHEHIANLAGSPAIKKGILQTVKVVDELVKVMGRHKPENIVIEMARENQTTQKGQKNSRERMKRIEEGIKELGSQILKEHPVENTQLQNEKLYLYYLQNGRDMYVDQELDINRLSDYDVDHIVPQSFLKDDSIDNKVLTRSDKARGKSDNVPSEEVVKKMKNYWRQLLNAKLITQRKFDNLTKAERGGLSELDKAGFIKRQLVETRQITKHVAQILDSRMNTKYDENDKLIREVKVITLKSKLVSDFRKDFQFYKVREINNYHHAHDAYLNAVVGTALIKKYPKLESEFVYGDYKVYDVRKMIAKSEQEIGKATAKYFFYSNIMNFFKTEITLANGEIRKRPLIETNGETGEIVWDKGRDFATVRKVLSMPQVNIVKKTEVQTGGFSKESILPKRNSDKLIARKKDWDPKKYGGFDSPTVAYSVLVVAKVEKGKSKKLKSVKELLGITIMERSSFEKNPIDFLEAKGYKEVKKDLIIKLPKYSLFELENGRKRMLASAGELQKGNELALPSKYVNFLYLASHYEKLKGSPEDNEQKQLFVEQHKHYLDEIIEQISEFSKRVILADANLDKVLSAYNKHRDKPIREQAENIIHLFTLTNLGAPAAFKYFDTTIDRKRYTSTKEVLDATLIHQSITGLYETRIDLSQLGGDGGPAPGSSGGSGGTLNIEDEYRLHETSKEPDVSLGSTWLSDFPQAWAETGGMGLAVRQAPLIIPLKATSTPVSIKQYPMSQEARLGIKPHIQRLLDQGILVPCQSPWNTPLLPVKKPGTNDYRPVQDLREVNKRVEDIHPTVPNPYNLLSGLPPSHQWYTVLDLKDAFFCLRLHPTSQPLFAFEWRDPEMGISGQLTWTRLPQGFKNSPTLFNEALHRDLAGFRIQHPDLILLQYVDDLLLAATSELDCQQGTRALLQTLGDLGYRASAKKAQICQKQVKYLGYLLKEGQRWLTEARKETVMGQPIPKTPRQLREFLGKAGFCRLFIPGFAEMAAPLYPLTKPGTLFNWGPDQQKAFQEIKQALLTAPALGLPDLTKPFELFVDEKQGYAKGVLTQKLGPWRRPVAYLSKKLDPVAAGWPPCLRMVAAIAVLTKDAGKLTMGQPLVILAPHAVEALVKQPPDRWLSNARMTHYQALLLDTDRVQFGPVVALNPATLLPLPEEGLQHDCLDILAEAHGTRSDLMDQPLPDADHTWYTDGSSFLQEGQRKAGAAVTTETEVIWARALPAGTSAQRAELIALTQALKMAEGKKLNVYTDSRYAFATAHIHGEIYRRRGWLTSEGKEIKNKDEILALLKALFLPKRLSIIHCPGHQKGNSAEARGNRMADQAAREVATRETPETSTLLAGKRTADGSEFEKRTADGSEFESPKKKAKVE

SEQ ID NO: 2381 - protein, 2090 aa, synthetic construct
MPAAKRVKLDGGDKKYSIGLDIGTNSVGWAVITDEYKVPSKKFKVLGNTDRHSIKKNLIGALLFDSGETAEATRLKRTARRRYTRRKNRICYLQEIFSNEMAKVDDSFFHRLEESFLVEEDKKHERHPIFGNIVDEVAYHEKYPTIYHLRKKLVDSTDKADLRLIYLALAHMIKFRGHFLIEGDLNPDNSDVDKLFIQLVQTYNQLFEENPINASGVDAKAILSARLSKSRRLENLIAQLPGEKKNGLFGNLIALSLGLTPNFKSNFDLAEDAKLQLSKDTYDDDLDNLLAQIGDQYADLFLAAKNLSDAILLSDILRVNTEITKAPLSASMIKRYDEHHQDLTLLKALVRQQLPEKYKEIFFDQSKNGYAGYIDGGASQEEFYKFIKPILEKMDGTEELLVKLNREDLLRKQRTFDNGSIPHQIHLGELHAILRRQEDFYPFLKDNREKIEKILTFRIPYYVGPLARGNSRFAWMTRKSEETITPWNFEEVVDKGASAQSFIERMTNFDKNLPNEKVLPKHSLLYEYFTVYNELTKVKYVTEGMRKPAFLSGEQKKAIVDLLFKTNRKVTVKQLKEDYFKKIECFDSVEISGVEDRFNASLGTYHDLLKIIKDKDFLDNEENEDILEDIVLTLTLFEDREMIEERLKTYAHLFDDKVMKQLKRRRYTGWGRLSRKLINGIRDKQSGKTILDFLKSDGFANRNFMQLIHDDSLTFKEDIQKAQVSGQGDSLHEHIANLAGSPAIKKGILQTVKVVDELVKVMGRHKPENIVIEMARENQTTQKGQKNSRERMKRIEEGIKELGSQILKEHPVENTQLQNEKLYLYYLQNGRDMYVDQELDINRLSDYDVDHIVPQSFLKDDSIDNKVLTRSDKARGKSDNVPSEEVVKKMKNYWRQLLNAKLITQRKFDNLTKAERGGLSELDKAGFIKRQLVETRQITKHVAQILDSRMNTKYDENDKLIREVKVITLKSKLVSDFRKDFQFYKVREINNYHHAHDAYLNAVVGTALIKKYPKLESEFVYGDYKVYDVRKMIAKSEQEIGKATAKYFFYSNIMNFFKTEITLANGEIRKRPLIETNGETGEIVWDKGRDFATVRKVLSMPQVNIVKKTEVQTGGFSKESILPKRNSDKLIARKKDWDPKKYGGFDSPTVAYSVLVVAKVEKGKSKKLKSVKELLGITIMERSSFEKNPIDFLEAKGYKEVKKDLIIKLPKYSLFELENGRKRMLASAGELQKGNELALPSKYVNFLYLASHYEKLKGSPEDNEQKQLFVEQHKHYLDEIIEQISEFSKRVILADANLDKVLSAYNKHRDKPIREQAENIIHLFTLTNLGAPAAFKYFDTTIDRKRYTSTKEVLDATLIHQSITGLYETRIDLSQLGGDGGGGGGSGGTLNIEDEYRLHETSKEPDVSLGSTWLSDFPQAWAETGGMGLAVRQAPLIIPLKATSTPVSIKQYPMSQEARLGIKPHIQRLLDQGILVPCQSPWNTPLLPVKKPGTNDYRPVQDLREVNKRVEDIHPTVPNPYNLLSGLPPSHQWYTVLDLKDAFFCLRLHPTSQPLFAFEWRDPEMGISGQLTWTRLPQGFKNSPTLFNEALHRDLAGFRIQHPDLILLQYVDDLLLAATSELDCQQGTRALLQTLGDLGYRASAKKAQICQKQVKYLGYLLKEGQRWLTEARKETVMGQPIPKTPRQLREFLGKAGFCRLFIPGFAEMAAPLYPLTKPGTLFNWGPDQQKAFQEIKQALLTAPALGLPDLTKPFELFVDEKQGYAKGVLTQKLGPWRRPVAYLSKKLDPVAAGWPPCLRMVAAIAVLTKDAGKLTMGQPLVILAPHAVEALVKQPPDRWLSNARMTHYQALLLDTDRVQFGPVVALNPATLLPLPEEGLQHDCLDILAEAHGTRSDLMDQPLPDADHTWYTDGSSFLQEGQRKAGAAVTTETEVIWARALPAGTSAQRAELIALTQALKMAEGKKLNVYTDSRYAFATAHIHGEIYRRRGWLTSEGKEIKNKDEILALLKALFLPKRLSIIHCPGHQKGNSAEARGNRMADQAAREVATRETPETSTLLAGKRTADGSEFEKRTADGSEFESPKKKAKVE

SEQ ID NO: 2382 - protein, 2093 aa, synthetic construct
MPAAKRVKLDGGDKKYSIGLDIGTNSVGWAVITDEYKVPSKKFKVLGNTDRHSIKKNLIGALLFDSGETAEATRLKRTARRRYTRRKNRICYLQEIFSNEMAKVDDSFFHRLEESFLVEEDKKHERHPIFGNIVDEVAYHEKYPTIYHLRKKLVDSTDKADLRLIYLALAHMIKFRGHFLIEGDLNPDNSDVDKLFIQLVQTYNQLFEENPINASGVDAKAILSARLSKSRRLENLIAQLPGEKKNGLFGNLIALSLGLTPNFKSNFDLAEDAKLQLSKDTYDDDLDNLLAQIGDQYADLFLAAKNLSDAILLSDILRVNTEITKAPLSASMIKRYDEHHQDLTLLKALVRQQLPEKYKEIFFDQSKNGYAGYIDGGASQEEFYKFIKPILEKMDGTEELLVKLNREDLLRKQRTFDNGSIPHQIHLGELHAILRRQEDFYPFLKDNREKIEKILTFRIPYYVGPLARGNSRFAWMTRKSEETITPWNFEEVVDKGASAQSFIERMTNFDKNLPNEKVLPKHSLLYEYFTVYNELTKVKYVTEGMRKPAFLSGEQKKAIVDLLFKTNRKVTVKQLKEDYFKKIECFDSVEISGVEDRFNASLGTYHDLLKIIKDKDFLDNEENEDILEDIVLTLTLFEDREMIEERLKTYAHLFDDKVMKQLKRRRYTGWGRLSRKLINGIRDKQSGKTILDFLKSDGFANRNFMQLIHDDSLTFKEDIQKAQVSGQGDSLHEHIANLAGSPAIKKGILQTVKVVDELVKVMGRHKPENIVIEMARENQTTQKGQKNSRERMKRIEEGIKELGSQILKEHPVENTQLQNEKLYLYYLQNGRDMYVDQELDINRLSDYDVDHIVPQSFLKDDSIDNKVLTRSDKARGKSDNVPSEEVVKKMKNYWRQLLNAKLITQRKFDNLTKAERGGLSELDKAGFIKRQLVETRQITKHVAQILDSRMNTKYDENDKLIREVKVITLKSKLVSDFRKDFQFYKVREINNYHHAHDAYLNAVVGTALIKKYPKLESEFVYGDYKVYDVRKMIAKSEQEIGKATAKYFFYSNIMNFFKTEITLANGEIRKRPLIETNGETGEIVWDKGRDFATVRKVLSMPQVNIVKKTEVQTGGFSKESILPKRNSDKLIARKKDWDPKKYGGFDSPTVAYSVLVVAKVEKGKSKKLKSVKELLGITIMERSSFEKNPIDFLEAKGYKEVKKDLIIKLPKYSLFELENGRKRMLASAGELQKGNELALPSKYVNFLYLASHYEKLKGSPEDNEQKQLFVEQHKHYLDEIIEQISEFSKRVILADANLDKVLSAYNKHRDKPIREQAENIIHLFTLTNLGAPAAFKYFDTTIDRKRYTSTKEVLDATLIHQSITGLYETRIDLSQLGGDGGGSSEAAAKGGTLNIEDEYRLHETSKEPDVSLGSTWLSDFPQAWAETGGMGLAVRQAPLIIPLKATSTPVSIKQYPMSQEARLGIKPHIQRLLDQGILVPCQSPWNTPLLPVKKPGTNDYRPVQDLREVNKRVEDIHPTVPNPYNLLSGLPPSHQWYTVLDLKDAFFCLRLHPTSQPLFAFEWRDPEMGISGQLTWTRLPQGFKNSPTLFNEALHRDLAGFRIQHPDLILLQYVDDLLLAATSELDCQQGTRALLQTLGDLGYRASAKKAQICQKQVKYLGYLLKEGQRWLTEARKETVMGQPIPKTPRQLREFLGKAGFCRLFIPGFAEMAAPLYPLTKPGTLFNWGPDQQKAFQEIKQALLTAPALGLPDLTKPFELFVDEKQGYAKGVLTQKLGPWRRPVAYLSKKLDPVAAGWPPCLRMVAAIAVLTKDAGKLTMGQPLVILAPHAVEALVKQPPDRWLSNARMTHYQALLLDTDRVQFGPVVALNPATLLPLPEEGLQHDCLDILAEAHGTRSDLMDQPLPDADHTWYTDGSSFLQEGQRKAGAAVTTETEVIWARALPAGTSAQRAELIALTQALKMAEGKKLNVYTDSRYAFATAHIHGEIYRRRGWLTSEGKEIKNKDEILALLKALFLPKRLSIIHCPGHQKGNSAEARGNRMADQAAREVATRETPETSTLLAGKRTADGSEFEKRTADGSEFESPKKKAKVE

SEQ ID NO: 2383 - protein, 2091 aa, synthetic construct
MPAAKRVKLDGGDKKYSIGLDIGTNSVGWAVITDEYKVPSKKFKVLGNTDRHSIKKNLIGALLFDSGETAEATRLKRTARRRYTRRKNRICYLQEIFSNEMAKVDDSFFHRLEESFLVEEDKKHERHPIFGNIVDEVAYHEKYPTIYHLRKKLVDSTDKADLRLIYLALAHMIKFRGHFLIEGDLNPDNSDVDKLFIQLVQTYNQLFEENPINASGVDAKAILSARLSKSRRLENLIAQLPGEKKNGLFGNLIALSLGLTPNFKSNFDLAEDAKLQLSKDTYDDDLDNLLAQIGDQYADLFLAAKNLSDAILLSDILRVNTEITKAPLSASMIKRYDEHHQDLTLLKALVRQQLPEKYKEIFFDQSKNGYAGYIDGGASQEEFYKFIKPILEKMDGTEELLVKLNREDLLRKQRTFDNGSIPHQIHLGELHAILRRQEDFYPFLKDNREKIEKILTFRIPYYVGPLARGNSRFAWMTRKSEETITPWNFEEVVDKGASAQSFIERMTNFDKNLPNEKVLPKHSLLYEYFTVYNELTKVKYVTEGMRKPAFLSGEQKKAIVDLLFKTNRKVTVKQLKEDYFKKIECFDSVEISGVEDRFNASLGTYHDLLKIIKDKDFLDNEENEDILEDIVLTLTLFEDREMIEERLKTYAHLFDDKVMKQLKRRRYTGWGRLSRKLINGIRDKQSGKTILDFLKSDGFANRNFMQLIHDDSLTFKEDIQKAQVSGQGDSLHEHIANLAGSPAIKKGILQTVKVVDELVKVMGRHKPENIVIEMARENQTTQKGQKNSRERMKRIEEGIKELGSQILKEHPVENTQLQNEKLYLYYLQNGRDMYVDQELDINRLSDYDVDHIVPQSFLKDDSIDNKVLTRSDKARGKSDNVPSEEVVKKMKNYWRQLLNAKLITQRKFDNLTKAERGGLSELDKAGFIKRQLVETRQITKHVAQILDSRMNTKYDENDKLIREVKVITLKSKLVSDFRKDFQFYKVREINNYHHAHDAYLNAVVGTALIKKYPKLESEFVYGDYKVYDVRKMIAKSEQEIGKATAKYFFYSNIMNFFKTEITLANGEIRKRPLIETNGETGEIVWDKGRDFATVRKVLSMPQVNIVKKTEVQTGGFSKESILPKRNSDKLIARKKDWDPKKYGGFDSPTVAYSVLVVAKVEKGKSKKLKSVKELLGITIMERSSFEKNPIDFLEAKGYKEVKKDLIIKLPKYSLFELENGRKRMLASAGELQKGNELALPSKYVNFLYLASHYEKLKGSPEDNEQKQLFVEQHKHYLDEIIEQISEFSKRVILADANLDKVLSAYNKHRDKPIREQAENIIHLFTLTNLGAPAAFKYFDTTIDRKRYTSTKEVLDATLIHQSITGLYETRIDLSQLGGDGGGGGGSSGGTLNIEDEYRLHETSKEPDVSLGSTWLSDFPQAWAETGGMGLAVRQAPLIIPLKATSTPVSIKQYPMSQEARLGIKPHIQRLLDQGILVPCQSPWNTPLLPVKKPGTNDYRPVQDLREVNKRVEDIHPTVPNPYNLLSGLPPSHQWYTVLDLKDAFFCLRLHPTSQPLFAFEWRDPEMGISGQLTWTRLPQGFKNSPTLFNEALHRDLAGFRIQHPDLILLQYVDDLLLAATSELDCQQGTRALLQTLGDLGYRASAKKAQICQKQVKYLGYLLKEGQRWLTEARKETVMGQPIPKTPRQLREFLGKAGFCRLFIPGFAEMAAPLYPLTKPGTLFNWGPDQQKAFQEIKQALLTAPALGLPDLTKPFELFVDEKQGYAKGVLTQKLGPWRRPVAYLSKKLDPVAAGWPPCLRMVAAIAVLTKDAGKLTMGQPLVILAPHAVEALVKQPPDRWLSNARMTHYQALLLDTDRVQFGPVVALNPATLLPLPEEGLQHDCLDILAEAHGTRSDLMDQPLPDADHTWYTDGSSFLQEGQRKAGAAVTTETEVIWARALPAGTSAQRAELIALTQALKMAEGKKLNVYTDSRYAFATAHIHGEIYRRRGWLTSEGKEIKNKDEILALLKALFLPKRLSIIHCPGHQKGNSAEARGNRMADQAAREVATRETPETSTLLAGKRTADGSEFEKRTADGSEFESPKKKAKVE

SEQ ID NO: 2384 - protein, 2096 aa, synthetic construct
MPAAKRVKLDGGDKKYSIGLDIGTNSVGWAVITDEYKVPSKKFKVLGNTDRHSIKKNLIGALLFDSGETAEATRLKRTARRRYTRRKNRICYLQEIFSNEMAKVDDSFFHRLEESFLVEEDKKHERHPIFGNIVDEVAYHEKYPTIYHLRKKLVDSTDKADLRLIYLALAHMIKFRGHFLIEGDLNPDNSDVDKLFIQLVQTYNQLFEENPINASGVDAKAILSARLSKSRRLENLIAQLPGEKKNGLFGNLIALSLGLTPNFKSNFDLAEDAKLQLSKDTYDDDLDNLLAQIGDQYADLFLAAKNLSDAILLSDILRVNTEITKAPLSASMIKRYDEHHQDLTLLKALVRQQLPEKYKEIFFDQSKNGYAGYIDGGASQEEFYKFIKPILEKMDGTEELLVKLNREDLLRKQRTFDNGSIPHQIHLGELHAILRRQEDFYPFLKDNREKIEKILTFRIPYYVGPLARGNSRFAWMTRKSEETITPWNFEEVVDKGASAQSFIERMTNFDKNLPNEKVLPKHSLLYEYFTVYNELTKVKYVTEGMRKPAFLSGEQKKAIVDLLFKTNRKVTVKQLKEDYFKKIECFDSVEISGVEDRFNASLGTYHDLLKIIKDKDFLDNEENEDILEDIVLTLTLFEDREMIEERLKTYAHLFDDKVMKQLKRRRYTGWGRLSRKLINGIRDKQSGKTILDFLKSDGFANRNFMQLIHDDSLTFKEDIQKAQVSGQGDSLHEHIANLAGSPAIKKGILQTVKVVDELVKVMGRHKPENIVIEMARENQTTQKGQKNSRERMKRIEEGIKELGSQILKEHPVENTQLQNEKLYLYYLQNGRDMYVDQELDINRLSDYDVDHIVPQSFLKDDSIDNKVLTRSDKARGKSDNVPSEEVVKKMKNYWRQLLNAKLITQRKFDNLTKAERGGLSELDKAGFIKRQLVETRQITKHVAQILDSRMNTKYDENDKLIREVKVITLKSKLVSDFRKDFQFYKVREINNYHHAHDAYLNAVVGTALIKKYPKLESEFVYGDYKVYDVRKMIAKSEQEIGKATAKYFFYSNIMNFFKTEITLANGEIRKRPLIETNGETGEIVWDKGRDFATVRKVLSMPQVNIVKKTEVQTGGFSKESILPKRNSDKLIARKKDWDPKKYGGFDSPTVAYSVLVVAKVEKGKSKKLKSVKELLGITIMERSSFEKNPIDFLEAKGYKEVKKDLIIKLPKYSLFELENGRKRMLASAGELQKGNELALPSKYVNFLYLASHYEKLKGSPEDNEQKQLFVEQHKHYLDEIIEQISEFSKRVILADANLDKVLSAYNKHRDKPIREQAENIIHLFTLTNLGAPAAFKYFDTTIDRKRYTSTKEVLDATLIHQSITGLYETRIDLSQLGGDGGGSSEAAAKGGGGGTLNIEDEYRLHETSKEPDVSLGSTWLSDFPQAWAETGGMGLAVRQAPLIIPLKATSTPVSIKQYPMSQEARLGIKPHIQRLLDQGILVPCQSPWNTPLLPVKKPGTNDYRPVQDLREVNKRVEDIHPTVPNPYNLLSGLPPSHQWYTVLDLKDAFFCLRLHPTSQPLFAFEWRDPEMGISGQLTWTRLPQGFKNSPTLFNEALHRDLAGFRIQHPDLILLQYVDDLLLAATSELDCQQGTRALLQTLGDLGYRASAKKAQICQKQVKYLGYLLKEGQRWLTEARKETVMGQPIPKTPRQLREFLGKAGFCRLFIPGFAEMAAPLYPLTKPGTLFNWGPDQQKAFQEIKQALLTAPALGLPDLTKPFELFVDEKQGYAKGVLTQKLGPWRRPVAYLSKKLDPVAAGWPPCLRMVAAIAVLTKDAGKLTMGQPLVILAPHAVEALVKQPPDRWLSNARMTHYQALLLDTDRVQFGPVVALNPATLLPLPEEGLQHDCLDILAEAHGTRSDLMDQPLPDADHTWYTDGSSFLQEGQRKAGAAVTTETEVIWARALPAGTSAQRAELIALTQALKMAEGKKLNVYTDSRYAFATAHIHGEIYRRRGWLTSEGKEIKNKDEILALLKALFLPKRLSIIHCPGHQKGNSAEARGNRMADQAAREVATRETPETSTLLAGKRTADGSEFEKRTADGSEFESPKKKAKVE

SEQ ID NO: 2385 - protein, 2096 aa, synthetic construct
MPAAKRVKLDGGDKKYSIGLDIGTNSVGWAVITDEYKVPSKKFKVLGNTDRHSIKKNLIGALLFDSGETAEATRLKRTARRRYTRRKNRICYLQEIFSNEMAKVDDSFFHRLEESFLVEEDKKHERHPIFGNIVDEVAYHEKYPTIYHLRKKLVDSTDKADLRLIYLALAHMIKFRGHFLIEGDLNPDNSDVDKLFIQLVQTYNQLFEENPINASGVDAKAILSARLSKSRRLENLIAQLPGEKKNGLFGNLIALSLGLTPNFKSNFDLAEDAKLQLSKDTYDDDLDNLLAQIGDQYADLFLAAKNLSDAILLSDILRVNTEITKAPLSASMIKRYDEHHQDLTLLKALVRQQLPEKYKEIFFDQSKNGYAGYIDGGASQEEFYKFIKPILEKMDGTEELLVKLNREDLLRKQRTFDNGSIPHQIHLGELHAILRRQEDFYPFLKDNREKIEKILTFRIPYYVGPLARGNSRFAWMTRKSEETITPWNFEEVVDKGASAQSFIERMTNFDKNLPNEKVLPKHSLLYEYFTVYNELTKVKYVTEGMRKPAFLSGEQKKAIVDLLFKTNRKVTVKQLKEDYFKKIECFDSVEISGVEDRFNASLGTYHDLLKIIKDKDFLDNEENEDILEDIVLTLTLFEDREMIEERLKTYAHLFDDKVMKQLKRRRYTGWGRLSRKLINGIRDKQSGKTILDFLKSDGFANRNFMQLIHDDSLTFKEDIQKAQVSGQGDSLHEHIANLAGSPAIKKGILQTVKVVDELVKVMGRHKPENIVIEMARENQTTQKGQKNSRERMKRIEEGIKELGSQILKEHPVENTQLQNEKLYLYYLQNGRDMYVDQELDINRLSDYDVDHIVPQSFLKDDSIDNKVLTRSDKARGKSDNVPSEEVVKKMKNYWRQLLNAKLITQRKFDNLTKAERGGLSELDKAGFIKRQLVETRQITKHVAQILDSRMNTKYDENDKLIREVKVITLKSKLVSDFRKDFQFYKVREINNYHHAHDAYLNAVVGTALIKKYPKLESEFVYGDYKVYDVRKMIAKSEQEIGKATAKYFFYSNIMNFFKTEITLANGEIRKRPLIETNGETGEIVWDKGRDFATVRKVLSMPQVNIVKKTEVQTGGFSKESILPKRNSDKLIARKKDWDPKKYGGFDSPTVAYSVLVVAKVEKGKSKKLKSVKELLGITIMERSSFEKNPIDFLEAKGYKEVKKDLIIKLPKYSLFELENGRKRMLASAGELQKGNELALPSKYVNFLYLASHYEKLKGSPEDNEQKQLFVEQHKHYLDEIIEQISEFSKRVILADANLDKVLSAYNKHRDKPIREQAENIIHLFTLTNLGAPAAFKYFDTTIDRKRYTSTKEVLDATLIHQSITGLYETRIDLSQLGGDGGGGGEAAAKPAPGGTLNIEDEYRLHETSKEPDVSLGSTWLSDFPQAWAETGGMGLAVRQAPLIIPLKATSTPVSIKQYPMSQEARLGIKPHIQRLLDQGILVPCQSPWNTPLLPVKKPGTNDYRPVQDLREVNKRVEDIHPTVPNPYNLLSGLPPSHQWYTVLDLKDAFFCLRLHPTSQPLFAFEWRDPEMGISGQLTWTRLPQGFKNSPTLFNEALHRDLAGFRIQHPDLILLQYVDDLLLAATSELDCQQGTRALLQTLGDLGYRASAKKAQICQKQVKYLGYLLKEGQRWLTEARKETVMGQPIPKTPRQLREFLGKAGFCRLFIPGFAEMAAPLYPLTKPGTLFNWGPDQQKAFQEIKQALLTAPALGLPDLTKPFELFVDEKQGYAKGVLTQKLGPWRRPVAYLSKKLDPVAAGWPPCLRMVAAIAVLTKDAGKLTMGQPLVILAPHAVEALVKQPPDRWLSNARMTHYQALLLDTDRVQFGPVVALNPATLLPLPEEGLQHDCLDILAEAHGTRSDLMDQPLPDADHTWYTDGSSFLQEGQRKAGAAVTTETEVIWARALPAGTSAQRAELIALTQALKMAEGKKLNVYTDSRYAFATAHIHGEIYRRRGWLTSEGKEIKNKDEILALLKALFLPKRLSIIHCPGHQKGNSAEARGNRMADQAAREVATRETPETSTLLAGKRTADGSEFEKRTADGSEFESPKKKAKVE

SEQ ID NO: 2386 - protein, 2096 aa, synthetic construct
MPAAKRVKLDGGDKKYSIGLDIGTNSVGWAVITDEYKVPSKKFKVLGNTDRHSIKKNLIGALLFDSGETAEATRLKRTARRRYTRRKNRICYLQEIFSNEMAKVDDSFFHRLEESFLVEEDKKHERHPIFGNIVDEVAYHEKYPTIYHLRKKLVDSTDKADLRLIYLALAHMIKFRGHFLIEGDLNPDNSDVDKLFIQLVQTYNQLFEENPINASGVDAKAILSARLSKSRRLENLIAQLPGEKKNGLFGNLIALSLGLTPNFKSNFDLAEDAKLQLSKDTYDDDLDNLLAQIGDQYADLFLAAKNLSDAILLSDILRVNTEITKAPLSASMIKRYDEHHQDLTLLKALVRQQLPEKYKEIFFDQSKNGYAGYIDGGASQEEFYKFIKPILEKMDGTEELLVKLNREDLLRKQRTFDNGSIPHQIHLGELHAILRRQEDFYPFLKDNREKIEKILTFRIPYYVGPLARGNSRFAWMTRKSEETITPWNFEEVVDKGASAQSFIERMTNFDKNLPNEKVLPKHSLLYEYFTVYNELTKVKYVTEGMRKPAFLSGEQKKAIVDLLFKTNRKVTVKQLKEDYFKKIECFDSVEISGVEDRFNASLGTYHDLLKIIKDKDFLDNEENEDILEDIVLTLTLFEDREMIEERLKTYAHLFDDKVMKQLKRRRYTGWGRLSRKLINGIRDKQSGKTILDFLKSDGFANRNFMQLIHDDSLTFKEDIQKAQVSGQGDSLHEHIANLAGSPAIKKGILQTVKVVDELVKVMGRHKPENIVIEMARENQTTQKGQKNSRERMKRIEEGIKELGSQILKEHPVENTQLQNEKLYLYYLQNGRDMYVDQELDINRLSDYDVDHIVPQSFLKDDSIDNKVLTRSDKARGKSDNVPSEEVVKKMKNYWRQLLNAKLITQRKFDNLTKAERGGLSELDKAGFIKRQLVETRQITKHVAQILDSRMNTKYDENDKLIREVKVITLKSKLVSDFRKDFQFYKVREINNYHHAHDAYLNAVVGTALIKKYPKLESEFVYGDYKVYDVRKMIAKSEQEIGKATAKYFFYSNIMNFFKTEITLANGEIRKRPLIETNGETGEIVWDKGRDFATVRKVLSMPQVNIVKKTEVQTGGFSKESILPKRNSDKLIARKKDWDPKKYGGFDSPTVAYSVLVVAKVEKGKSKKLKSVKELLGITIMERSSFEKNPIDFLEAKGYKEVKKDLIIKLPKYSLFELENGRKRMLASAGELQKGNELALPSKYVNFLYLASHYEKLKGSPEDNEQKQLFVEQHKHYLDEIIEQISEFSKRVILADANLDKVLSAYNKHRDKPIREQAENIIHLFTLTNLGAPAAFKYFDTTIDRKRYTSTKEVLDATLIHQSITGLYETRIDLSQLGGDGGGSSGGSEAAAKGGTLNIEDEYRLHETSKEPDVSLGSTWLSDFPQAWAETGGMGLAVRQAPLIIPLKATSTPVSIKQYPMSQEARLGIKPHIQRLLDQGILVPCQSPWNTPLLPVKKPGTNDYRPVQDLREVNKRVEDIHPTVPNPYNLLSGLPPSHQWYTVLDLKDAFFCLRLHPTSQPLFAFEWRDPEMGISGQLTWTRLPQGFKNSPTLFNEALHRDLAGFRIQHPDLILLQYVDDLLLAATSELDCQQGTRALLQTLGDLGYRASAKKAQICQKQVKYLGYLLKEGQRWLTEARKETVMGQPIPKTPRQLREFLGKAGFCRLFIPGFAEMAAPLYPLTKPGTLFNWGPDQQKAFQEIKQALLTAPALGLPDLTKPFELFVDEKQGYAKGVLTQKLGPWRRPVAYLSKKLDPVAAGWPPCLRMVAAIAVLTKDAGKLTMGQPLVILAPHAVEALVKQPPDRWLSNARMTHYQALLLDTDRVQFGPVVALNPATLLPLPEEGLQHDCLDILAEAHGTRSDLMDQPLPDADHTWYTDGSSFLQEGQRKAGAAVTTETEVIWARALPAGTSAQRAELIALTQALKMAEGKKLNVYTDSRYAFATAHIHGEIYRRRGWLTSEGKEIKNKDEILALLKALFLPKRLSIIHCPGHQKGNSAEARGNRMADQAAREVATRETPETSTLLAGKRTADGSEFEKRTADGSEFESPKKKAKVE

SEQ ID NO: 2387 - protein, 2094 aa, synthetic construct
MPAAKRVKLDGGDKKYSIGLDIGTNSVGWAVITDEYKVPSKKFKVLGNTDRHSIKKNLIGALLFDSGETAEATRLKRTARRRYTRRKNRICYLQEIFSNEMAKVDDSFFHRLEESFLVEEDKKHERHPIFGNIVDEVAYHEKYPTIYHLRKKLVDSTDKADLRLIYLALAHMIKFRGHFLIEGDLNPDNSDVDKLFIQLVQTYNQLFEENPINASGVDAKAILSARLSKSRRLENLIAQLPGEKKNGLFGNLIALSLGLTPNFKSNFDLAEDAKLQLSKDTYDDDLDNLLAQIGDQYADLFLAAKNLSDAILLSDILRVNTEITKAPLSASMIKRYDEHHQDLTLLKALVRQQLPEKYKEIFFDQSKNGYAGYIDGGASQEEFYKFIKPILEKMDGTEELLVKLNREDLLRKQRTFDNGSIPHQIHLGELHAILRRQEDFYPFLKDNREKIEKILTFRIPYYVGPLARGNSRFAWMTRKSEETITPWNFEEVVDKGASAQSFIERMTNFDKNLPNEKVLPKHSLLYEYFTVYNELTKVKYVTEGMRKPAFLSGEQKKAIVDLLFKTNRKVTVKQLKEDYFKKIECFDSVEISGVEDRFNASLGTYHDLLKIIKDKDFLDNEENEDILEDIVLTLTLFEDREMIEERLKTYAHLFDDKVMKQLKRRRYTGWGRLSRKLINGIRDKQSGKTILDFLKSDGFANRNFMQLIHDDSLTFKEDIQKAQVSGQGDSLHEHIANLAGSPAIKKGILQTVKVVDELVKVMGRHKPENIVIEMARENQTTQKGQKNSRERMKRIEEGIKELGSQILKEHPVENTQLQNEKLYLYYLQNGRDMYVDQELDINRLSDYDVDHIVPQSFLKDDSIDNKVLTRSDKARGKSDNVPSEEVVKKMKNYWRQLLNAKLITQRKFDNLTKAERGGLSELDKAGFIKRQLVETRQITKHVAQILDSRMNTKYDENDKLIREVKVITLKSKLVSDFRKDFQFYKVREINNYHHAHDAYLNAVVGTALIKKYPKLESEFVYGDYKVYDVRKMIAKSEQEIGKATAKYFFYSNIMNFFKTEITLANGEIRKRPLIETNGETGEIVWDKGRDFATVRKVLSMPQVNIVKKTEVQTGGFSKESILPKRNSDKLIARKKDWDPKKYGGFDSPTVAYSVLVVAKVEKGKSKKLKSVKELLGITIMERSSFEKNPIDFLEAKGYKEVKKDLIIKLPKYSLFELENGRKRMLASAGELQKGNELALPSKYVNFLYLASHYEKLKGSPEDNEQKQLFVEQHKHYLDEIIEQISEFSKRVILADANLDKVLSAYNKHRDKPIREQAENIIHLFTLTNLGAPAAFKYFDTTIDRKRYTSTKEVLDATLIHQSITGLYETRIDLSQLGGDGGGGSPAPGSSGGTLNIEDEYRLHETSKEPDVSLGSTWLSDFPQAWAETGGMGLAVRQAPLIIPLKATSTPVSIKQYPMSQEARLGIKPHIQRLLDQGILVPCQSPWNTPLLPVKKPGTNDYRPVQDLREVNKRVEDIHPTVPNPYNLLSGLPPSHQWYTVLDLKDAFFCLRLHPTSQPLFAFEWRDPEMGISGQLTWTRLPQGFKNSPTLFNEALHRDLAGFRIQHPDLILLQYVDDLLLAATSELDCQQGTRALLQTLGDLGYRASAKKAQICQKQVKYLGYLLKEGQRWLTEARKETVMGQPIPKTPRQLREFLGKAGFCRLFIPGFAEMAAPLYPLTKPGTLFNWGPDQQKAFQEIKQALLTAPALGLPDLTKPFELFVDEKQGYAKGVLTQKLGPWRRPVAYLSKKLDPVAAGWPPCLRMVAAIAVLTKDAGKLTMGQPLVILAPHAVEALVKQPPDRWLSNARMTHYQALLLDTDRVQFGPVVALNPATLLPLPEEGLQHDCLDILAEAHGTRSDLMDQPLPDADHTWYTDGSSFLQEGQRKAGAAVTTETEVIWARALPAGTSAQRAELIALTQALKMAEGKKLNVYTDSRYAFATAHIHGEIYRRRGWLTSEGKEIKNKDEILALLKALFLPKRLSIIHCPGHQKGNSAEARGNRMADQAAREVATRETPETSTLLAGKRTADGSEFEKRTADGSEFESPKKKAKVE

SEQ ID NO: 2388 - protein, 2101 aa, synthetic construct
MPAAKRVKLDGGDKKYSIGLDIGTNSVGWAVITDEYKVPSKKFKVLGNTDRHSIKKNLIGALLFDSGETAEATRLKRTARRRYTRRKNRICYLQEIFSNEMAKVDDSFFHRLEESFLVEEDKKHERHPIFGNIVDEVAYHEKYPTIYHLRKKLVDSTDKADLRLIYLALAHMIKFRGHFLIEGDLNPDNSDVDKLFIQLVQTYNQLFEENPINASGVDAKAILSARLSKSRRLENLIAQLPGEKKNGLFGNLIALSLGLTPNFKSNFDLAEDAKLQLSKDTYDDDLDNLLAQIGDQYADLFLAAKNLSDAILLSDILRVNTEITKAPLSASMIKRYDEHHQDLTLLKALVRQQLPEKYKEIFFDQSKNGYAGYIDGGASQEEFYKFIKPILEKMDGTEELLVKLNREDLLRKQRTFDNGSIPHQIHLGELHAILRRQEDFYPFLKDNREKIEKILTFRIPYYVGPLARGNSRFAWMTRKSEETITPWNFEEVVDKGASAQSFIERMTNFDKNLPNEKVLPKHSLLYEYFTVYNELTKVKYVTEGMRKPAFLSGEQKKAIVDLLFKTNRKVTVKQLKEDYFKKIECFDSVEISGVEDRFNASLGTYHDLLKIIKDKDFLDNEENEDILEDIVLTLTLFEDREMIEERLKTYAHLFDDKVMKQLKRRRYTGWGRLSRKLINGIRDKQSGKTILDFLKSDGFANRNFMQLIHDDSLTFKEDIQKAQVSGQGDSLHEHIANLAGSPAIKKGILQTVKVVDELVKVMGRHKPENIVIEMARENQTTQKGQKNSRERMKRIEEGIKELGSQILKEHPVENTQLQNEKLYLYYLQNGRDMYVDQELDINRLSDYDVDHIVPQSFLKDDSIDNKVLTRSDKARGKSDNVPSEEVVKKMKNYWRQLLNAKLITQRKFDNLTKAERGGLSELDKAGFIKRQLVETRQITKHVAQILDSRMNTKYDENDKLIREVKVITLKSKLVSDFRKDFQFYKVREINNYHHAHDAYLNAVVGTALIKKYPKLESEFVYGDYKVYDVRKMIAKSEQEIGKATAKYFFYSNIMNFFKTEITLANGEIRKRPLIETNGETGEIVWDKGRDFATVRKVLSMPQVNIVKKTEVQTGGFSKESILPKRNSDKLIARKKDWDPKKYGGFDSPTVAYSVLVVAKVEKGKSKKLKSVKELLGITIMERSSFEKNPIDFLEAKGYKEVKKDLIIKLPKYSLFELENGRKRMLASAGELQKGNELALPSKYVNFLYLASHYEKLKGSPEDNEQKQLFVEQHKHYLDEIIEQISEFSKRVILADANLDKVLSAYNKHRDKPIREQAENIIHLFTLTNLGAPAAFKYFDTTIDRKRYTSTKEVLDATLIHQSITGLYETRIDLSQLGGDGGSGSETPGTSESATPESGGTLNIEDEYRLHETSKEPDVSLGSTWLSDFPQAWAETGGMGLAVRQAPLIIPLKATSTPVSIKQYPMSQEARLGIKPHIQRLLDQGILVPCQSPWNTPLLPVKKPGTNDYRPVQDLREVNKRVEDIHPTVPNPYNLLSGLPPSHQWYTVLDLKDAFFCLRLHPTSQPLFAFEWRDPEMGISGQLTWTRLPQGFKNSPTLFNEALHRDLAGFRIQHPDLILLQYVDDLLLAATSELDCQQGTRALLQTLGDLGYRASAKKAQICQKQVKYLGYLLKEGQRWLTEARKETVMGQPIPKTPRQLREFLGKAGFCRLFIPGFAEMAAPLYPLTKPGTLFNWGPDQQKAFQEIKQALLTAPALGLPDLTKPFELFVDEKQGYAKGVLTQKLGPWRRPVAYLSKKLDPVAAGWPPCLRMVAAIAVLTKDAGKLTMGQPLVILAPHAVEALVKQPPDRWLSNARMTHYQALLLDTDRVQFGPVVALNPATLLPLPEEGLQHDCLDILAEAHGTRSDLMDQPLPDADHTWYTDGSSFLQEGQRKAGAAVTTETEVIWARALPAGTSAQRAELIALTQALKMAEGKKLNVYTDSRYAFATAHIHGEIYRRRGWLTSEGKEIKNKDEILALLKALFLPKRLSIIHCPGHQKGNSAEARGNRMADQAAREVATRETPETSTLLAGKRTADGSEFEKRTADGSEFESPKKKAKVE

SEQ ID NO: 2389 - protein, 2091 aa, synthetic construct
MPAAKRVKLDGGDKKYSIGLDIGTNSVGWAVITDEYKVPSKKFKVLGNTDRHSIKKNLIGALLFDSGETAEATRLKRTARRRYTRRKNRICYLQEIFSNEMAKVDDSFFHRLEESFLVEEDKKHERHPIFGNIVDEVAYHEKYPTIYHLRKKLVDSTDKADLRLIYLALAHMIKFRGHFLIEGDLNPDNSDVDKLFIQLVQTYNQLFEENPINASGVDAKAILSARLSKSRRLENLIAQLPGEKKNGLFGNLIALSLGLTPNFKSNFDLAEDAKLQLSKDTYDDDLDNLLAQIGDQYADLFLAAKNLSDAILLSDILRVNTEITKAPLSASMIKRYDEHHQDLTLLKALVRQQLPEKYKEIFFDQSKNGYAGYIDGGASQEEFYKFIKPILEKMDGTEELLVKLNREDLLRKQRTFDNGSIPHQIHLGELHAILRRQEDFYPFLKDNREKIEKILTFRIPYYVGPLARGNSRFAWMTRKSEETITPWNFEEVVDKGASAQSFIERMTNFDKNLPNEKVLPKHSLLYEYFTVYNELTKVKYVTEGMRKPAFLSGEQKKAIVDLLFKTNRKVTVKQLKEDYFKKIECFDSVEISGVEDRFNASLGTYHDLLKIIKDKDFLDNEENEDILEDIVLTLTLFEDREMIEERLKTYAHLFDDKVMKQLKRRRYTGWGRLSRKLINGIRDKQSGKTILDFLKSDGFANRNFMQLIHDDSLTFKEDIQKAQVSGQGDSLHEHIANLAGSPAIKKGILQTVKVVDELVKVMGRHKPENIVIEMARENQTTQKGQKNSRERMKRIEEGIKELGSQILKEHPVENTQLQNEKLYLYYLQNGRDMYVDQELDINRLSDYDVDHIVPQSFLKDDSIDNKVLTRSDKARGKSDNVPSEEVVKKMKNYWRQLLNAKLITQRKFDNLTKAERGGLSELDKAGFIKRQLVETRQITKHVAQILDSRMNTKYDENDKLIREVKVITLKSKLVSDFRKDFQFYKVREINNYHHAHDAYLNAVVGTALIKKYPKLESEFVYGDYKVYDVRKMIAKSEQEIGKATAKYFFYSNIMNFFKTEITLANGEIRKRPLIETNGETGEIVWDKGRDFATVRKVLSMPQVNIVKKTEVQTGGFSKESILPKRNSDKLIARKKDWDPKKYGGFDSPTVAYSVLVVAKVEKGKSKKLKSVKELLGITIMERSSFEKNPIDFLEAKGYKEVKKDLIIKLPKYSLFELENGRKRMLASAGELQKGNELALPSKYVNFLYLASHYEKLKGSPEDNEQKQLFVEQHKHYLDEIIEQISEFSKRVILADANLDKVLSAYNKHRDKPIREQAENIIHLFTLTNLGAPAAFKYFDTTIDRKRYTSTKEVLDATLIHQSITGLYETRIDLSQLGGDGGGGSPAPGGTLNIEDEYRLHETSKEPDVSLGSTWLSDFPQAWAETGGMGLAVRQAPLIIPLKATSTPVSIKQYPMSQEARLGIKPHIQRLLDQGILVPCQSPWNTPLLPVKKPGTNDYRPVQDLREVNKRVEDIHPTVPNPYNLLSGLPPSHQWYTVLDLKDAFFCLRLHPTSQPLFAFEWRDPEMGISGQLTWTRLPQGFKNSPTLFNEALHRDLAGFRIQHPDLILLQYVDDLLLAATSELDCQQGTRALLQTLGDLGYRASAKKAQICQKQVKYLGYLLKEGQRWLTEARKETVMGQPIPKTPRQLREFLGKAGFCRLFIPGFAEMAAPLYPLTKPGTLFNWGPDQQKAFQEIKQALLTAPALGLPDLTKPFELFVDEKQGYAKGVLTQKLGPWRRPVAYLSKKLDPVAAGWPPCLRMVAAIAVLTKDAGKLTMGQPLVILAPHAVEALVKQPPDRWLSNARMTHYQALLLDTDRVQFGPVVALNPATLLPLPEEGLQHDCLDILAEAHGTRSDLMDQPLPDADHTWYTDGSSFLQEGQRKAGAAVTTETEVIWARALPAGTSAQRAELIALTQALKMAEGKKLNVYTDSRYAFATAHIHGEIYRRRGWLTSEGKEIKNKDEILALLKALFLPKRLSIIHCPGHQKGNSAEARGNRMADQAAREVATRETPETSTLLAGKRTADGSEFEKRTADGSEFESPKKKAKVE

SEQ ID NO: 2390 - protein, 2096 aa, synthetic construct
MPAAKRVKLDGGDKKYSIGLDIGTNSVGWAVITDEYKVPSKKFKVLGNTDRHSIKKNLIGALLFDSGETAEATRLKRTARRRYTRRKNRICYLQEIFSNEMAKVDDSFFHRLEESFLVEEDKKHERHPIFGNIVDEVAYHEKYPTIYHLRKKLVDSTDKADLRLIYLALAHMIKFRGHFLIEGDLNPDNSDVDKLFIQLVQTYNQLFEENPINASGVDAKAILSARLSKSRRLENLIAQLPGEKKNGLFGNLIALSLGLTPNFKSNFDLAEDAKLQLSKDTYDDDLDNLLAQIGDQYADLFLAAKNLSDAILLSDILRVNTEITKAPLSASMIKRYDEHHQDLTLLKALVRQQLPEKYKEIFFDQSKNGYAGYIDGGASQEEFYKFIKPILEKMDGTEELLVKLNREDLLRKQRTFDNGSIPHQIHLGELHAILRRQEDFYPFLKDNREKIEKILTFRIPYYVGPLARGNSRFAWMTRKSEETITPWNFEEVVDKGASAQSFIERMTNFDKNLPNEKVLPKHSLLYEYFTVYNELTKVKYVTEGMRKPAFLSGEQKKAIVDLLFKTNRKVTVKQLKEDYFKKIECFDSVEISGVEDRFNASLGTYHDLLKIIKDKDFLDNEENEDILEDIVLTLTLFEDREMIEERLKTYAHLFDDKVMKQLKRRRYTGWGRLSRKLINGIRDKQSGKTILDFLKSDGFANRNFMQLIHDDSLTFKEDIQKAQVSGQGDSLHEHIANLAGSPAIKKGILQTVKVVDELVKVMGRHKPENIVIEMARENQTTQKGQKNSRERMKRIEEGIKELGSQILKEHPVENTQLQNEKLYLYYLQNGRDMYVDQELDINRLSDYDVDHIVPQSFLKDDSIDNKVLTRSDKARGKSDNVPSEEVVKKMKNYWRQLLNAKLITQRKFDNLTKAERGGLSELDKAGFIKRQLVETRQITKHVAQILDSRMNTKYDENDKLIREVKVITLKSKLVSDFRKDFQFYKVREINNYHHAHDAYLNAVVGTALIKKYPKLESEFVYGDYKVYDVRKMIAKSEQEIGKATAKYFFYSNIMNFFKTEITLANGEIRKRPLIETNGETGEIVWDKGRDFATVRKVLSMPQVNIVKKTEVQTGGFSKESILPKRNSDKLIARKKDWDPKKYGGFDSPTVAYSVLVVAKVEKGKSKKLKSVKELLGITIMERSSFEKNPIDFLEAKGYKEVKKDLIIKLPKYSLFELENGRKRMLASAGELQKGNELALPSKYVNFLYLASHYEKLKGSPEDNEQKQLFVEQHKHYLDEIIEQISEFSKRVILADANLDKVLSAYNKHRDKPIREQAENIIHLFTLTNLGAPAAFKYFDTTIDRKRYTSTKEVLDATLIHQSITGLYETRIDLSQLGGDGGGSSGGGEAAAKGGTLNIEDEYRLHETSKEPDVSLGSTWLSDFPQAWAETGGMGLAVRQAPLIIPLKATSTPVSIKQYPMSQEARLGIKPHIQRLLDQGILVPCQSPWNTPLLPVKKPGTNDYRPVQDLREVNKRVEDIHPTVPNPYNLLSGLPPSHQWYTVLDLKDAFFCLRLHPTSQPLFAFEWRDPEMGISGQLTWTRLPQGFKNSPTLFNEALHRDLAGFRIQHPDLILLQYVDDLLLAATSELDCQQGTRALLQTLGDLGYRASAKKAQICQKQVKYLGYLLKEGQRWLTEARKETVMGQPIPKTPRQLREFLGKAGFCRLFIPGFAEMAAPLYPLTKPGTLFNWGPDQQKAFQEIKQALLTAPALGLPDLTKPFELFVDEKQGYAKGVLTQKLGPWRRPVAYLSKKLDPVAAGWPPCLRMVAAIAVLTKDAGKLTMGQPLVILAPHAVEALVKQPPDRWLSNARMTHYQALLLDTDRVQFGPVVALNPATLLPLPEEGLQHDCLDILAEAHGTRSDLMDQPLPDADHTWYTDGSSFLQEGQRKAGAAVTTETEVIWARALPAGTSAQRAELIALTQALKMAEGKKLNVYTDSRYAFATAHIHGEIYRRRGWLTSEGKEIKNKDEILALLKALFLPKRLSIIHCPGHQKGNSAEARGNRMADQAAREVATRETPETSTLLAGKRTADGSEFEKRTADGSEFESPKKKAKVE

SEQ ID NO: 2391 - protein, 2096 aa, synthetic construct
MPAAKRVKLDGGDKKYSIGLDIGTNSVGWAVITDEYKVPSKKFKVLGNTDRHSIKKNLIGALLFDSGETAEATRLKRTARRRYTRRKNRICYLQEIFSNEMAKVDDSFFHRLEESFLVEEDKKHERHPIFGNIVDEVAYHEKYPTIYHLRKKLVDSTDKADLRLIYLALAHMIKFRGHFLIEGDLNPDNSDVDKLFIQLVQTYNQLFEENPINASGVDAKAILSARLSKSRRLENLIAQLPGEKKNGLFGNLIALSLGLTPNFKSNFDLAEDAKLQLSKDTYDDDLDNLLAQIGDQYADLFLAAKNLSDAILLSDILRVNTEITKAPLSASMIKRYDEHHQDLTLLKALVRQQLPEKYKEIFFDQSKNGYAGYIDGGASQEEFYKFIKPILEKMDGTEELLVKLNREDLLRKQRTFDNGSIPHQIHLGELHAILRRQEDFYPFLKDNREKIEKILTFRIPYYVGPLARGNSRFAWMTRKSEETITPWNFEEVVDKGASAQSFIERMTNFDKNLPNEKVLPKHSLLYEYFTVYNELTKVKYVTEGMRKPAFLSGEQKKAIVDLLFKTNRKVTVKQLKEDYFKKIECFDSVEISGVEDRFNASLGTYHDLLKIIKDKDFLDNEENEDILEDIVLTLTLFEDREMIEERLKTYAHLFDDKVMKQLKRRRYTGWGRLSRKLINGIRDKQSGKTILDFLKSDGFANRNFMQLIHDDSLTFKEDIQKAQVSGQGDSLHEHIANLAGSPAIKKGILQTVKVVDELVKVMGRHKPENIVIEMARENQTTQKGQKNSRERMKRIEEGIKELGSQILKEHPVENTQLQNEKLYLYYLQNGRDMYVDQELDINRLSDYDVDHIVPQSFLKDDSIDNKVLTRSDKARGKSDNVPSEEVVKKMKNYWRQLLNAKLITQRKFDNLTKAERGGLSELDKAGFIKRQLVETRQITKHVAQILDSRMNTKYDENDKLIREVKVITLKSKLVSDFRKDFQFYKVREINNYHHAHDAYLNAVVGTALIKKYPKLESEFVYGDYKVYDVRKMIAKSEQEIGKATAKYFFYSNIMNFFKTEITLANGEIRKRPLIETNGETGEIVWDKGRDFATVRKVLSMPQVNIVKKTEVQTGGFSKESILPKRNSDKLIARKKDWDPKKYGGFDSPTVAYSVLVVAKVEKGKSKKLKSVKELLGITIMERSSFEKNPIDFLEAKGYKEVKKDLIIKLPKYSLFELENGRKRMLASAGELQKGNELALPSKYVNFLYLASHYEKLKGSPEDNEQKQLFVEQHKHYLDEIIEQISEFSKRVILADANLDKVLSAYNKHRDKPIREQAENIIHLFTLTNLGAPAAFKYFDTTIDRKRYTSTKEVLDATLIHQSITGLYETRIDLSQLGGDGGEAAAKGGGPAPGGTLNIEDEYRLHETSKEPDVSLGSTWLSDFPQAWAETGGMGLAVRQAPLIIPLKATSTPVSIKQYPMSQEARLGIKPHIQRLLDQGILVPCQSPWNTPLLPVKKPGTNDYRPVQDLREVNKRVEDIHPTVPNPYNLLSGLPPSHQWYTVLDLKDAFFCLRLHPTSQPLFAFEWRDPEMGISGQLTWTRLPQGFKNSPTLFNEALHRDLAGFRIQHPDLILLQYVDDLLLAATSELDCQQGTRALLQTLGDLGYRASAKKAQICQKQVKYLGYLLKEGQRWLTEARKETVMGQPIPKTPRQLREFLGKAGFCRLFIPGFAEMAAPLYPLTKPGTLFNWGPDQQKAFQEIKQALLTAPALGLPDLTKPFELFVDEKQGYAKGVLTQKLGPWRRPVAYLSKKLDPVAAGWPPCLRMVAAIAVLTKDAGKLTMGQPLVILAPHAVEALVKQPPDRWLSNARMTHYQALLLDTDRVQFGPVVALNPATLLPLPEEGLQHDCLDILAEAHGTRSDLMDQPLPDADHTWYTDGSSFLQEGQRKAGAAVTTETEVIWARALPAGTSAQRAELIALTQALKMAEGKKLNVYTDSRYAFATAHIHGEIYRRRGWLTSEGKEIKNKDEILALLKALFLPKRLSIIHCPGHQKGNSAEARGNRMADQAAREVATRETPETSTLLAGKRTADGSEFEKRTADGSEFESPKKKAKVE

SEQ ID NO: 2392 - protein, 2096 aa, synthetic construct
MPAAKRVKLDGGDKKYSIGLDIGTNSVGWAVITDEYKVPSKKFKVLGNTDRHSIKKNLIGALLFDSGETAEATRLKRTARRRYTRRKNRICYLQEIFSNEMAKVDDSFFHRLEESFLVEEDKKHERHPIFGNIVDEVAYHEKYPTIYHLRKKLVDSTDKADLRLIYLALAHMIKFRGHFLIEGDLNPDNSDVDKLFIQLVQTYNQLFEENPINASGVDAKAILSARLSKSRRLENLIAQLPGEKKNGLFGNLIALSLGLTPNFKSNFDLAEDAKLQLSKDTYDDDLDNLLAQIGDQYADLFLAAKNLSDAILLSDILRVNTEITKAPLSASMIKRYDEHHQDLTLLKALVRQQLPEKYKEIFFDQSKNGYAGYIDGGASQEEFYKFIKPILEKMDGTEELLVKLNREDLLRKQRTFDNGSIPHQIHLGELHAILRRQEDFYPFLKDNREKIEKILTFRIPYYVGPLARGNSRFAWMTRKSEETITPWNFEEVVDKGASAQSFIERMTNFDKNLPNEKVLPKHSLLYEYFTVYNELTKVKYVTEGMRKPAFLSGEQKKAIVDLLFKTNRKVTVKQLKEDYFKKIECFDSVEISGVEDRFNASLGTYHDLLKIIKDKDFLDNEENEDILEDIVLTLTLFEDREMIEERLKTYAHLFDDKVMKQLKRRRYTGWGRLSRKLINGIRDKQSGKTILDFLKSDGFANRNFMQLIHDDSLTFKEDIQKAQVSGQGDSLHEHIANLAGSPAIKKGILQTVKVVDELVKVMGRHKPENIVIEMARENQTTQKGQKNSRERMKRIEEGIKELGSQILKEHPVENTQLQNEKLYLYYLQNGRDMYVDQELDINRLSDYDVDHIVPQSFLKDDSIDNKVLTRSDKARGKSDNVPSEEVVKKMKNYWRQLLNAKLITQRKFDNLTKAERGGLSELDKAGFIKRQLVETRQITKHVAQILDSRMNTKYDENDKLIREVKVITLKSKLVSDFRKDFQFYKVREINNYHHAHDAYLNAVVGTALIKKYPKLESEFVYGDYKVYDVRKMIAKSEQEIGKATAKYFFYSNIMNFFKTEITLANGEIRKRPLIETNGETGEIVWDKGRDFATVRKVLSMPQVNIVKKTEVQTGGFSKESILPKRNSDKLIARKKDWDPKKYGGFDSPTVAYSVLVVAKVEKGKSKKLKSVKELLGITIMERSSFEKNPIDFLEAKGYKEVKKDLIIKLPKYSLFELENGRKRMLASAGELQKGNELALPSKYVNFLYLASHYEKLKGSPEDNEQKQLFVEQHKHYLDEIIEQISEFSKRVILADANLDKVLSAYNKHRDKPIREQAENIIHLFTLTNLGAPAAFKYFDTTIDRKRYTSTKEVLDATLIHQSITGLYETRIDLSQLGGDGGGGGPAPEAAAKGGTLNIEDEYRLHETSKEPDVSLGSTWLSDFPQAWAETGGMGLAVRQAPLIIPLKATSTPVSIKQYPMSQEARLGIKPHIQRLLDQGILVPCQSPWNTPLLPVKKPGTNDYRPVQDLREVNKRVEDIHPTVPNPYNLLSGLPPSHQWYTVLDLKDAFFCLRLHPTSQPLFAFEWRDPEMGISGQLTWTRLPQGFKNSPTLFNEALHRDLAGFRIQHPDLILLQYVDDLLLAATSELDCQQGTRALLQTLGDLGYRASAKKAQICQKQVKYLGYLLKEGQRWLTEARKETVMGQPIPKTPRQLREFLGKAGFCRLFIPGFAEMAAPLYPLTKPGTLFNWGPDQQKAFQEIKQALLTAPALGLPDLTKPFELFVDEKQGYAKGVLTQKLGPWRRPVAYLSKKLDPVAAGWPPCLRMVAAIAVLTKDAGKLTMGQPLVILAPHAVEALVKQPPDRWLSNARMTHYQALLLDTDRVQFGPVVALNPATLLPLPEEGLQHDCLDILAEAHGTRSDLMDQPLPDADHTWYTDGSSFLQEGQRKAGAAVTTETEVIWARALPAGTSAQRAELIALTQALKMAEGKKLNVYTDSRYAFATAHIHGEIYRRRGWLTSEGKEIKNKDEILALLKALFLPKRLSIIHCPGHQKGNSAEARGNRMADQAAREVATRETPETSTLLAGKRTADGSEFEKRTADGSEFESPKKKAKVE

SEQ ID NO: 2393 - protein, 2094 aa, synthetic construct
MPAAKRVKLDGGDKKYSIGLDIGTNSVGWAVITDEYKVPSKKFKVLGNTDRHSIKKNLIGALLFDSGETAEATRLKRTARRRYTRRKNRICYLQEIFSNEMAKVDDSFFHRLEESFLVEEDKKHERHPIFGNIVDEVAYHEKYPTIYHLRKKLVDSTDKADLRLIYLALAHMIKFRGHFLIEGDLNPDNSDVDKLFIQLVQTYNQLFEENPINASGVDAKAILSARLSKSRRLENLIAQLPGEKKNGLFGNLIALSLGLTPNFKSNFDLAEDAKLQLSKDTYDDDLDNLLAQIGDQYADLFLAAKNLSDAILLSDILRVNTEITKAPLSASMIKRYDEHHQDLTLLKALVRQQLPEKYKEIFFDQSKNGYAGYIDGGASQEEFYKFIKPILEKMDGTEELLVKLNREDLLRKQRTFDNGSIPHQIHLGELHAILRRQEDFYPFLKDNREKIEKILTFRIPYYVGPLARGNSRFAWMTRKSEETITPWNFEEVVDKGASAQSFIERMTNFDKNLPNEKVLPKHSLLYEYFTVYNELTKVKYVTEGMRKPAFLSGEQKKAIVDLLFKTNRKVTVKQLKEDYFKKIECFDSVEISGVEDRFNASLGTYHDLLKIIKDKDFLDNEENEDILEDIVLTLTLFEDREMIEERLKTYAHLFDDKVMKQLKRRRYTGWGRLSRKLINGIRDKQSGKTILDFLKSDGFANRNFMQLIHDDSLTFKEDIQKAQVSGQGDSLHEHIANLAGSPAIKKGILQTVKVVDELVKVMGRHKPENIVIEMARENQTTQKGQKNSRERMKRIEEGIKELGSQILKEHPVENTQLQNEKLYLYYLQNGRDMYVDQELDINRLSDYDVDHIVPQSFLKDDSIDNKVLTRSDKARGKSDNVPSEEVVKKMKNYWRQLLNAKLITQRKFDNLTKAERGGLSELDKAGFIKRQLVETRQITKHVAQILDSRMNTKYDENDKLIREVKVITLKSKLVSDFRKDFQFYKVREINNYHHAHDAYLNAVVGTALIKKYPKLESEFVYGDYKVYDVRKMIAKSEQEIGKATAKYFFYSNIMNFFKTEITLANGEIRKRPLIETNGETGEIVWDKGRDFATVRKVLSMPQVNIVKKTEVQTGGFSKESILPKRNSDKLIARKKDWDPKKYGGFDSPTVAYSVLVVAKVEKGKSKKLKSVKELLGITIMERSSFEKNPIDFLEAKGYKEVKKDLIIKLPKYSLFELENGRKRMLASAGELQKGNELALPSKYVNFLYLASHYEKLKGSPEDNEQKQLFVEQHKHYLDEIIEQISEFSKRVILADANLDKVLSAYNKHRDKPIREQAENIIHLFTLTNLGAPAAFKYFDTTIDRKRYTSTKEVLDATLIHQSITGLYETRIDLSQLGGDGGGSSGSSGSSGGTLNIEDEYRLHETSKEPDVSLGSTWLSDFPQAWAETGGMGLAVRQAPLIIPLKATSTPVSIKQYPMSQEARLGIKPHIQRLLDQGILVPCQSPWNTPLLPVKKPGTNDYRPVQDLREVNKRVEDIHPTVPNPYNLLSGLPPSHQWYTVLDLKDAFFCLRLHPTSQPLFAFEWRDPEMGISGQLTWTRLPQGFKNSPTLFNEALHRDLAGFRIQHPDLILLQYVDDLLLAATSELDCQQGTRALLQTLGDLGYRASAKKAQICQKQVKYLGYLLKEGQRWLTEARKETVMGQPIPKTPRQLREFLGKAGFCRLFIPGFAEMAAPLYPLTKPGTLFNWGPDQQKAFQEIKQALLTAPALGLPDLTKPFELFVDEKQGYAKGVLTQKLGPWRRPVAYLSKKLDPVAAGWPPCLRMVAAIAVLTKDAGKLTMGQPLVILAPHAVEALVKQPPDRWLSNARMTHYQALLLDTDRVQFGPVVALNPATLLPLPEEGLQHDCLDILAEAHGTRSDLMDQPLPDADHTWYTDGSSFLQEGQRKAGAAVTTETEVIWARALPAGTSAQRAELIALTQALKMAEGKKLNVYTDSRYAFATAHIHGEIYRRRGWLTSEGKEIKNKDEILALLKALFLPKRLSIIHCPGHQKGNSAEARGNRMADQAAREVATRETPETSTLLAGKRTADGSEFEKRTADGSEFESPKKKAKVE

SEQ ID NO: 2394 - protein, 2092 aa, synthetic construct
MPAAKRVKLDGGDKKYSIGLDIGTNSVGWAVITDEYKVPSKKFKVLGNTDRHSIKKNLIGALLFDSGETAEATRLKRTARRRYTRRKNRICYLQEIFSNEMAKVDDSFFHRLEESFLVEEDKKHERHPIFGNIVDEVAYHEKYPTIYHLRKKLVDSTDKADLRLIYLALAHMIKFRGHFLIEGDLNPDNSDVDKLFIQLVQTYNQLFEENPINASGVDAKAILSARLSKSRRLENLIAQLPGEKKNGLFGNLIALSLGLTPNFKSNFDLAEDAKLQLSKDTYDDDLDNLLAQIGDQYADLFLAAKNLSDAILLSDILRVNTEITKAPLSASMIKRYDEHHQDLTLLKALVRQQLPEKYKEIFFDQSKNGYAGYIDGGASQEEFYKFIKPILEKMDGTEELLVKLNREDLLRKQRTFDNGSIPHQIHLGELHAILRRQEDFYPFLKDNREKIEKILTFRIPYYVGPLARGNSRFAWMTRKSEETITPWNFEEVVDKGASAQSFIERMTNFDKNLPNEKVLPKHSLLYEYFTVYNELTKVKYVTEGMRKPAFLSGEQKKAIVDLLFKTNRKVTVKQLKEDYFKKIECFDSVEISGVEDRFNASLGTYHDLLKIIKDKDFLDNEENEDILEDIVLTLTLFEDREMIEERLKTYAHLFDDKVMKQLKRRRYTGWGRLSRKLINGIRDKQSGKTILDFLKSDGFANRNFMQLIHDDSLTFKEDIQKAQVSGQGDSLHEHIANLAGSPAIKKGILQTVKVVDELVKVMGRHKPENIVIEMARENQTTQKGQKNSRERMKRIEEGIKELGSQILKEHPVENTQLQNEKLYLYYLQNGRDMYVDQELDINRLSDYDVDHIVPQSFLKDDSIDNKVLTRSDKARGKSDNVPSEEVVKKMKNYWRQLLNAKLITQRKFDNLTKAERGGLSELDKAGFIKRQLVETRQITKHVAQILDSRMNTKYDENDKLIREVKVITLKSKLVSDFRKDFQFYKVREINNYHHAHDAYLNAVVGTALIKKYPKLESEFVYGDYKVYDVRKMIAKSEQEIGKATAKYFFYSNIMNFFKTEITLANGEIRKRPLIETNGETGEIVWDKGRDFATVRKVLSMPQVNIVKKTEVQTGGFSKESILPKRNSDKLIARKKDWDPKKYGGFDSPTVAYSVLVVAKVEKGKSKKLKSVKELLGITIMERSSFEKNPIDFLEAKGYKEVKKDLIIKLPKYSLFELENGRKRMLASAGELQKGNELALPSKYVNFLYLASHYEKLKGSPEDNEQKQLFVEQHKHYLDEIIEQISEFSKRVILADANLDKVLSAYNKHRDKPIREQAENIIHLFTLTNLGAPAAFKYFDTTIDRKRYTSTKEVLDATLIHQSITGLYETRIDLSQLGGDGGPAPAPAPGGTLNIEDEYRLHETSKEPDVSLGSTWLSDFPQAWAETGGMGLAVRQAPLIIPLKATSTPVSIKQYPMSQEARLGIKPHIQRLLDQGILVPCQSPWNTPLLPVKKPGTNDYRPVQDLREVNKRVEDIHPTVPNPYNLLSGLPPSHQWYTVLDLKDAFFCLRLHPTSQPLFAFEWRDPEMGISGQLTWTRLPQGFKNSPTLFNEALHRDLAGFRIQHPDLILLQYVDDLLLAATSELDCQQGTRALLQTLGDLGYRASAKKAQICQKQVKYLGYLLKEGQRWLTEARKETVMGQPIPKTPRQLREFLGKAGFCRLFIPGFAEMAAPLYPLTKPGTLFNWGPDQQKAFQEIKQALLTAPALGLPDLTKPFELFVDEKQGYAKGVLTQKLGPWRRPVAYLSKKLDPVAAGWPPCLRMVAAIAVLTKDAGKLTMGQPLVILAPHAVEALVKQPPDRWLSNARMTHYQALLLDTDRVQFGPVVALNPATLLPLPEEGLQHDCLDILAEAHGTRSDLMDQPLPDADHTWYTDGSSFLQEGQRKAGAAVTTETEVIWARALPAGTSAQRAELIALTQALKMAEGKKLNVYTDSRYAFATAHIHGEIYRRRGWLTSEGKEIKNKDEILALLKALFLPKRLSIIHCPGHQKGNSAEARGNRMADQAAREVATRETPETSTLLAGKRTADGSEFEKRTADGSEFESPKKKAKVE

SEQ ID NO: 2395 - protein, 2091 aa, synthetic construct
MPAAKRVKLDGGDKKYSIGLDIGTNSVGWAVITDEYKVPSKKFKVLGNTDRHSIKKNLIGALLFDSGETAEATRLKRTARRRYTRRKNRICYLQEIFSNEMAKVDDSFFHRLEESFLVEEDKKHERHPIFGNIVDEVAYHEKYPTIYHLRKKLVDSTDKADLRLIYLALAHMIKFRGHFLIEGDLNPDNSDVDKLFIQLVQTYNQLFEENPINASGVDAKAILSARLSKSRRLENLIAQLPGEKKNGLFGNLIALSLGLTPNFKSNFDLAEDAKLQLSKDTYDDDLDNLLAQIGDQYADLFLAAKNLSDAILLSDILRVNTEITKAPLSASMIKRYDEHHQDLTLLKALVRQQLPEKYKEIFFDQSKNGYAGYIDGGASQEEFYKFIKPILEKMDGTEELLVKLNREDLLRKQRTFDNGSIPHQIHLGELHAILRRQEDFYPFLKDNREKIEKILTFRIPYYVGPLARGNSRFAWMTRKSEETITPWNFEEVVDKGASAQSFIERMTNFDKNLPNEKVLPKHSLLYEYFTVYNELTKVKYVTEGMRKPAFLSGEQKKAIVDLLFKTNRKVTVKQLKEDYFKKIECFDSVEISGVEDRFNASLGTYHDLLKIIKDKDFLDNEENEDILEDIVLTLTLFEDREMIEERLKTYAHLFDDKVMKQLKRRRYTGWGRLSRKLINGIRDKQSGKTILDFLKSDGFANRNFMQLIHDDSLTFKEDIQKAQVSGQGDSLHEHIANLAGSPAIKKGILQTVKVVDELVKVMGRHKPENIVIEMARENQTTQKGQKNSRERMKRIEEGIKELGSQILKEHPVENTQLQNEKLYLYYLQNGRDMYVDQELDINRLSDYDVDHIVPQSFLKDDSIDNKVLTRSDKARGKSDNVPSEEVVKKMKNYWRQLLNAKLITQRKFDNLTKAERGGLSELDKAGFIKRQLVETRQITKHVAQILDSRMNTKYDENDKLIREVKVITLKSKLVSDFRKDFQFYKVREINNYHHAHDAYLNAVVGTALIKKYPKLESEFVYGDYKVYDVRKMIAKSEQEIGKATAKYFFYSNIMNFFKTEITLANGEIRKRPLIETNGETGEIVWDKGRDFATVRKVLSMPQVNIVKKTEVQTGGFSKESILPKRNSDKLIARKKDWDPKKYGGFDSPTVAYSVLVVAKVEKGKSKKLKSVKELLGITIMERSSFEKNPIDFLEAKGYKEVKKDLIIKLPKYSLFELENGRKRMLASAGELQKGNELALPSKYVNFLYLASHYEKLKGSPEDNEQKQLFVEQHKHYLDEIIEQISEFSKRVILADANLDKVLSAYNKHRDKPIREQAENIIHLFTLTNLGAPAAFKYFDTTIDRKRYTSTKEVLDATLIHQSITGLYETRIDLSQLGGDGGPAPGGGGGTLNIEDEYRLHETSKEPDVSLGSTWLSDFPQAWAETGGMGLAVRQAPLIIPLKATSTPVSIKQYPMSQEARLGIKPHIQRLLDQGILVPCQSPWNTPLLPVKKPGTNDYRPVQDLREVNKRVEDIHPTVPNPYNLLSGLPPSHQWYTVLDLKDAFFCLRLHPTSQPLFAFEWRDPEMGISGQLTWTRLPQGFKNSPTLFNEALHRDLAGFRIQHPDLILLQYVDDLLLAATSELDCQQGTRALLQTLGDLGYRASAKKAQICQKQVKYLGYLLKEGQRWLTEARKETVMGQPIPKTPRQLREFLGKAGFCRLFIPGFAEMAAPLYPLTKPGTLFNWGPDQQKAFQEIKQALLTAPALGLPDLTKPFELFVDEKQGYAKGVLTQKLGPWRRPVAYLSKKLDPVAAGWPPCLRMVAAIAVLTKDAGKLTMGQPLVILAPHAVEALVKQPPDRWLSNARMTHYQALLLDTDRVQFGPVVALNPATLLPLPEEGLQHDCLDILAEAHGTRSDLMDQPLPDADHTWYTDGSSFLQEGQRKAGAAVTTETEVIWARALPAGTSAQRAELIALTQALKMAEGKKLNVYTDSRYAFATAHIHGEIYRRRGWLTSEGKEIKNKDEILALLKALFLPKRLSIIHCPGHQKGNSAEARGNRMADQAAREVATRETPETSTLLAGKRTADGSEFEKRTADGSEFESPKKKAKVE

SEQ ID NO: 2396 - protein, 2097 aa, synthetic construct
MPAAKRVKLDGGDKKYSIGLDIGTNSVGWAVITDEYKVPSKKFKVLGNTDRHSIKKNLIGALLFDSGETAEATRLKRTARRRYTRRKNRICYLQEIFSNEMAKVDDSFFHRLEESFLVEEDKKHERHPIFGNIVDEVAYHEKYPTIYHLRKKLVDSTDKADLRLIYLALAHMIKFRGHFLIEGDLNPDNSDVDKLFIQLVQTYNQLFEENPINASGVDAKAILSARLSKSRRLENLIAQLPGEKKNGLFGNLIALSLGLTPNFKSNFDLAEDAKLQLSKDTYDDDLDNLLAQIGDQYADLFLAAKNLSDAILLSDILRVNTEITKAPLSASMIKRYDEHHQDLTLLKALVRQQLPEKYKEIFFDQSKNGYAGYIDGGASQEEFYKFIKPILEKMDGTEELLVKLNREDLLRKQRTFDNGSIPHQIHLGELHAILRRQEDFYPFLKDNREKIEKILTFRIPYYVGPLARGNSRFAWMTRKSEETITPWNFEEVVDKGASAQSFIERMTNFDKNLPNEKVLPKHSLLYEYFTVYNELTKVKYVTEGMRKPAFLSGEQKKAIVDLLFKTNRKVTVKQLKEDYFKKIECFDSVEISGVEDRFNASLGTYHDLLKIIKDKDFLDNEENEDILEDIVLTLTLFEDREMIEERLKTYAHLFDDKVMKQLKRRRYTGWGRLSRKLINGIRDKQSGKTILDFLKSDGFANRNFMQLIHDDSLTFKEDIQKAQVSGQGDSLHEHIANLAGSPAIKKGILQTVKVVDELVKVMGRHKPENIVIEMARENQTTQKGQKNSRERMKRIEEGIKELGSQILKEHPVENTQLQNEKLYLYYLQNGRDMYVDQELDINRLSDYDVDHIVPQSFLKDDSIDNKVLTRSDKARGKSDNVPSEEVVKKMKNYWRQLLNAKLITQRKFDNLTKAERGGLSELDKAGFIKRQLVETRQITKHVAQILDSRMNTKYDENDKLIREVKVITLKSKLVSDFRKDFQFYKVREINNYHHAHDAYLNAVVGTALIKKYPKLESEFVYGDYKVYDVRKMIAKSEQEIGKATAKYFFYSNIMNFFKTEITLANGEIRKRPLIETNGETGEIVWDKGRDFATVRKVLSMPQVNIVKKTEVQTGGFSKESILPKRNSDKLIARKKDWDPKKYGGFDSPTVAYSVLVVAKVEKGKSKKLKSVKELLGITIMERSSFEKNPIDFLEAKGYKEVKKDLIIKLPKYSLFELENGRKRMLASAGELQKGNELALPSKYVNFLYLASHYEKLKGSPEDNEQKQLFVEQHKHYLDEIIEQISEFSKRVILADANLDKVLSAYNKHRDKPIREQAENIIHLFTLTNLGAPAAFKYFDTTIDRKRYTSTKEVLDATLIHQSITGLYETRIDLSQLGGDGGGSSGSSGSSGSSGGTLNIEDEYRLHETSKEPDVSLGSTWLSDFPQAWAETGGMGLAVRQAPLIIPLKATSTPVSIKQYPMSQEARLGIKPHIQRLLDQGILVPCQSPWNTPLLPVKKPGTNDYRPVQDLREVNKRVEDIHPTVPNPYNLLSGLPPSHQWYTVLDLKDAFFCLRLHPTSQPLFAFEWRDPEMGISGQLTWTRLPQGFKNSPTLFNEALHRDLAGFRIQHPDLILLQYVDDLLLAATSELDCQQGTRALLQTLGDLGYRASAKKAQICQKQVKYLGYLLKEGQRWLTEARKETVMGQPIPKTPRQLREFLGKAGFCRLFIPGFAEMAAPLYPLTKPGTLFNWGPDQQKAFQEIKQALLTAPALGLPDLTKPFELFVDEKQGYAKGVLTQKLGPWRRPVAYLSKKLDPVAAGWPPCLRMVAAIAVLTKDAGKLTMGQPLVILAPHAVEALVKQPPDRWLSNARMTHYQALLLDTDRVQFGPVVALNPATLLPLPEEGLQHDCLDILAEAHGTRSDLMDQPLPDADHTWYTDGSSFLQEGQRKAGAAVTTETEVIWARALPAGTSAQRAELIALTQALKMAEGKKLNVYTDSRYAFATAHIHGEIYRRRGWLTSEGKEIKNKDEILALLKALFLPKRLSIIHCPGHQKGNSAEARGNRMADQAAREVATRETPETSTLLAGKRTADGSEFEKRTADGSEFESPKKKAKVE

SEQ ID NO: 2397 - protein, 2091 aa, synthetic construct
MPAAKRVKLDGGDKKYSIGLDIGTNSVGWAVITDEYKVPSKKFKVLGNTDRHSIKKNLIGALLFDSGETAEATRLKRTARRRYTRRKNRICYLQEIFSNEMAKVDDSFFHRLEESFLVEEDKKHERHPIFGNIVDEVAYHEKYPTIYHLRKKLVDSTDKADLRLIYLALAHMIKFRGHFLIEGDLNPDNSDVDKLFIQLVQTYNQLFEENPINASGVDAKAILSARLSKSRRLENLIAQLPGEKKNGLFGNLIALSLGLTPNFKSNFDLAEDAKLQLSKDTYDDDLDNLLAQIGDQYADLFLAAKNLSDAILLSDILRVNTEITKAPLSASMIKRYDEHHQDLTLLKALVRQQLPEKYKEIFFDQSKNGYAGYIDGGASQEEFYKFIKPILEKMDGTEELLVKLNREDLLRKQRTFDNGSIPHQIHLGELHAILRRQEDFYPFLKDNREKIEKILTFRIPYYVGPLARGNSRFAWMTRKSEETITPWNFEEVVDKGASAQSFIERMTNFDKNLPNEKVLPKHSLLYEYFTVYNELTKVKYVTEGMRKPAFLSGEQKKAIVDLLFKTNRKVTVKQLKEDYFKKIECFDSVEISGVEDRFNASLGTYHDLLKIIKDKDFLDNEENEDILEDIVLTLTLFEDREMIEERLKTYAHLFDDKVMKQLKRRRYTGWGRLSRKLINGIRDKQSGKTILDFLKSDGFANRNFMQLIHDDSLTFKEDIQKAQVSGQGDSLHEHIANLAGSPAIKKGILQTVKVVDELVKVMGRHKPENIVIEMARENQTTQKGQKNSRERMKRIEEGIKELGSQILKEHPVENTQLQNEKLYLYYLQNGRDMYVDQELDINRLSDYDVDHIVPQSFLKDDSIDNKVLTRSDKARGKSDNVPSEEVVKKMKNYWRQLLNAKLITQRKFDNLTKAERGGLSELDKAGFIKRQLVETRQITKHVAQILDSRMNTKYDENDKLIREVKVITLKSKLVSDFRKDFQFYKVREINNYHHAHDAYLNAVVGTALIKKYPKLESEFVYGDYKVYDVRKMIAKSEQEIGKATAKYFFYSNIMNFFKTEITLANGEIRKRPLIETNGETGEIVWDKGRDFATVRKVLSMPQVNIVKKTEVQTGGFSKESILPKRNSDKLIARKKDWDPKKYGGFDSPTVAYSVLVVAKVEKGKSKKLKSVKELLGITIMERSSFEKNPIDFLEAKGYKEVKKDLIIKLPKYSLFELENGRKRMLASAGELQKGNELALPSKYVNFLYLASHYEKLKGSPEDNEQKQLFVEQHKHYLDEIIEQISEFSKRVILADANLDKVLSAYNKHRDKPIREQAENIIHLFTLTNLGAPAAFKYFDTTIDRKRYTSTKEVLDATLIHQSITGLYETRIDLSQLGGDGGGGGGGSGGTLNIEDEYRLHETSKEPDVSLGSTWLSDFPQAWAETGGMGLAVRQAPLIIPLKATSTPVSIKQYPMSQEARLGIKPHIQRLLDQGILVPCQSPWNTPLLPVKKPGTNDYRPVQDLREVNKRVEDIHPTVPNPYNLLSGLPPSHQWYTVLDLKDAFFCLRLHPTSQPLFAFEWRDPEMGISGQLTWTRLPQGFKNSPTLFNEALHRDLAGFRIQHPDLILLQYVDDLLLAATSELDCQQGTRALLQTLGDLGYRASAKKAQICQKQVKYLGYLLKEGQRWLTEARKETVMGQPIPKTPRQLREFLGKAGFCRLFIPGFAEMAAPLYPLTKPGTLFNWGPDQQKAFQEIKQALLTAPALGLPDLTKPFELFVDEKQGYAKGVLTQKLGPWRRPVAYLSKKLDPVAAGWPPCLRMVAAIAVLTKDAGKLTMGQPLVILAPHAVEALVKQPPDRWLSNARMTHYQALLLDTDRVQFGPVVALNPATLLPLPEEGLQHDCLDILAEAHGTRSDLMDQPLPDADHTWYTDGSSFLQEGQRKAGAAVTTETEVIWARALPAGTSAQRAELIALTQALKMAEGKKLNVYTDSRYAFATAHIHGEIYRRRGWLTSEGKEIKNKDEILALLKALFLPKRLSIIHCPGHQKGNSAEARGNRMADQAAREVATRETPETSTLLAGKRTADGSEFEKRTADGSEFESPKKKAKVE

SEQ ID NO: 2398 - protein, 2091 aa, synthetic construct
MPAAKRVKLDGGDKKYSIGLDIGTNSVGWAVITDEYKVPSKKFKVLGNTDRHSIKKNLIGALLFDSGETAEATRLKRTARRRYTRRKNRICYLQEIFSNEMAKVDDSFFHRLEESFLVEEDKKHERHPIFGNIVDEVAYHEKYPTIYHLRKKLVDSTDKADLRLIYLALAHMIKFRGHFLIEGDLNPDNSDVDKLFIQLVQTYNQLFEENPINASGVDAKAILSARLSKSRRLENLIAQLPGEKKNGLFGNLIALSLGLTPNFKSNFDLAEDAKLQLSKDTYDDDLDNLLAQIGDQYADLFLAAKNLSDAILLSDILRVNTEITKAPLSASMIKRYDEHHQDLTLLKALVRQQLPEKYKEIFFDQSKNGYAGYIDGGASQEEFYKFIKPILEKMDGTEELLVKLNREDLLRKQRTFDNGSIPHQIHLGELHAILRRQEDFYPFLKDNREKIEKILTFRIPYYVGPLARGNSRFAWMTRKSEETITPWNFEEVVDKGASAQSFIERMTNFDKNLPNEKVLPKHSLLYEYFTVYNELTKVKYVTEGMRKPAFLSGEQKKAIVDLLFKTNRKVTVKQLKEDYFKKIECFDSVEISGVEDRFNASLGTYHDLLKIIKDKDFLDNEENEDILEDIVLTLTLFEDREMIEERLKTYAHLFDDKVMKQLKRRRYTGWGRLSRKLINGIRDKQSGKTILDFLKSDGFANRNFMQLIHDDSLTFKEDIQKAQVSGQGDSLHEHIANLAGSPAIKKGILQTVKVVDELVKVMGRHKPENIVIEMARENQTTQKGQKNSRERMKRIEEGIKELGSQILKEHPVENTQLQNEKLYLYYLQNGRDMYVDQELDINRLSDYDVDHIVPQSFLKDDSIDNKVLTRSDKARGKSDNVPSEEVVKKMKNYWRQLLNAKLITQRKFDNLTKAERGGLSELDKAGFIKRQLVETRQITKHVAQILDSRMNTKYDENDKLIREVKVITLKSKLVSDFRKDFQFYKVREINNYHHAHDAYLNAVVGTALIKKYPKLESEFVYGDYKVYDVRKMIAKSEQEIGKATAKYFFYSNIMNFFKTEITLANGEIRKRPLIETNGETGEIVWDKGRDFATVRKVLSMPQVNIVKKTEVQTGGFSKESILPKRNSDKLIARKKDWDPKKYGGFDSPTVAYSVLVVAKVEKGKSKKLKSVKELLGITIMERSSFEKNPIDFLEAKGYKEVKKDLIIKLPKYSLFELENGRKRMLASAGELQKGNELALPSKYVNFLYLASHYEKLKGSPEDNEQKQLFVEQHKHYLDEIIEQISEFSKRVILADANLDKVLSAYNKHRDKPIREQAENIIHLFTLTNLGAPAAFKYFDTTIDRKRYTSTKEVLDATLIHQSITGLYETRIDLSQLGGDGGGGSGGSGGTLNIEDEYRLHETSKEPDVSLGSTWLSDFPQAWAETGGMGLAVRQAPLIIPLKATSTPVSIKQYPMSQEARLGIKPHIQRLLDQGILVPCQSPWNTPLLPVKKPGTNDYRPVQDLREVNKRVEDIHPTVPNPYNLLSGLPPSHQWYTVLDLKDAFFCLRLHPTSQPLFAFEWRDPEMGISGQLTWTRLPQGFKNSPTLFNEALHRDLAGFRIQHPDLILLQYVDDLLLAATSELDCQQGTRALLQTLGDLGYRASAKKAQICQKQVKYLGYLLKEGQRWLTEARKETVMGQPIPKTPRQLREFLGKAGFCRLFIPGFAEMAAPLYPLTKPGTLFNWGPDQQKAFQEIKQALLTAPALGLPDLTKPFELFVDEKQGYAKGVLTQKLGPWRRPVAYLSKKLDPVAAGWPPCLRMVAAIAVLTKDAGKLTMGQPLVILAPHAVEALVKQPPDRWLSNARMTHYQALLLDTDRVQFGPVVALNPATLLPLPEEGLQHDCLDILAEAHGTRSDLMDQPLPDADHTWYTDGSSFLQEGQRKAGAAVTTETEVIWARALPAGTSAQRAELIALTQALKMAEGKKLNVYTDSRYAFATAHIHGEIYRRRGWLTSEGKEIKNKDEILALLKALFLPKRLSIIHCPGHQKGNSAEARGNRMADQAAREVATRETPETSTLLAGKRTADGSEFEKRTADGSEFESPKKKAKVE

SEQ ID NO: 2399 - protein, 2094 aa, synthetic construct
MPAAKRVKLDGGDKKYSIGLDIGTNSVGWAVITDEYKVPSKKFKVLGNTDRHSIKKNLIGALLFDSGETAEATRLKRTARRRYTRRKNRICYLQEIFSNEMAKVDDSFFHRLEESFLVEEDKKHERHPIFGNIVDEVAYHEKYPTIYHLRKKLVDSTDKADLRLIYLALAHMIKFRGHFLIEGDLNPDNSDVDKLFIQLVQTYNQLFEENPINASGVDAKAILSARLSKSRRLENLIAQLPGEKKNGLFGNLIALSLGLTPNFKSNFDLAEDAKLQLSKDTYDDDLDNLLAQIGDQYADLFLAAKNLSDAILLSDILRVNTEITKAPLSASMIKRYDEHHQDLTLLKALVRQQLPEKYKEIFFDQSKNGYAGYIDGGASQEEFYKFIKPILEKMDGTEELLVKLNREDLLRKQRTFDNGSIPHQIHLGELHAILRRQEDFYPFLKDNREKIEKILTFRIPYYVGPLARGNSRFAWMTRKSEETITPWNFEEVVDKGASAQSFIERMTNFDKNLPNEKVLPKHSLLYEYFTVYNELTKVKYVTEGMRKPAFLSGEQKKAIVDLLFKTNRKVTVKQLKEDYFKKIECFDSVEISGVEDRFNASLGTYHDLLKIIKDKDFLDNEENEDILEDIVLTLTLFEDREMIEERLKTYAHLFDDKVMKQLKRRRYTGWGRLSRKLINGIRDKQSGKTILDFLKSDGFANRNFMQLIHDDSLTFKEDIQKAQVSGQGDSLHEHIANLAGSPAIKKGILQTVKVVDELVKVMGRHKPENIVIEMARENQTTQKGQKNSRERMKRIEEGIKELGSQILKEHPVENTQLQNEKLYLYYLQNGRDMYVDQELDINRLSDYDVDHIVPQSFLKDDSIDNKVLTRSDKARGKSDNVPSEEVVKKMKNYWRQLLNAKLITQRKFDNLTKAERGGLSELDKAGFIKRQLVETRQITKHVAQILDSRMNTKYDENDKLIREVKVITLKSKLVSDFRKDFQFYKVREINNYHHAHDAYLNAVVGTALIKKYPKLESEFVYGDYKVYDVRKMIAKSEQEIGKATAKYFFYSNIMNFFKTEITLANGEIRKRPLIETNGETGEIVWDKGRDFATVRKVLSMPQVNIVKKTEVQTGGFSKESILPKRNSDKLIARKKDWDPKKYGGFDSPTVAYSVLVVAKVEKGKSKKLKSVKELLGITIMERSSFEKNPIDFLEAKGYKEVKKDLIIKLPKYSLFELENGRKRMLASAGELQKGNELALPSKYVNFLYLASHYEKLKGSPEDNEQKQLFVEQHKHYLDEIIEQISEFSKRVILADANLDKVLSAYNKHRDKPIREQAENIIHLFTLTNLGAPAAFKYFDTTIDRKRYTSTKEVLDATLIHQSITGLYETRIDLSQLGGDGGGSSGGSPAPGGTLNIEDEYRLHETSKEPDVSLGSTWLSDFPQAWAETGGMGLAVRQAPLIIPLKATSTPVSIKQYPMSQEARLGIKPHIQRLLDQGILVPCQSPWNTPLLPVKKPGTNDYRPVQDLREVNKRVEDIHPTVPNPYNLLSGLPPSHQWYTVLDLKDAFFCLRLHPTSQPLFAFEWRDPEMGISGQLTWTRLPQGFKNSPTLFNEALHRDLAGFRIQHPDLILLQYVDDLLLAATSELDCQQGTRALLQTLGDLGYRASAKKAQICQKQVKYLGYLLKEGQRWLTEARKETVMGQPIPKTPRQLREFLGKAGFCRLFIPGFAEMAAPLYPLTKPGTLFNWGPDQQKAFQEIKQALLTAPALGLPDLTKPFELFVDEKQGYAKGVLTQKLGPWRRPVAYLSKKLDPVAAGWPPCLRMVAAIAVLTKDAGKLTMGQPLVILAPHAVEALVKQPPDRWLSNARMTHYQALLLDTDRVQFGPVVALNPATLLPLPEEGLQHDCLDILAEAHGTRSDLMDQPLPDADHTWYTDGSSFLQEGQRKAGAAVTTETEVIWARALPAGTSAQRAELIALTQALKMAEGKKLNVYTDSRYAFATAHIHGEIYRRRGWLTSEGKEIKNKDEILALLKALFLPKRLSIIHCPGHQKGNSAEARGNRMADQAAREVATRETPETSTLLAGKRTADGSEFEKRTADGSEFESPKKKAKVE

SEQ ID NO: 2400 - protein, 2096 aa, synthetic construct
MPAAKRVKLDGGDKKYSIGLDIGTNSVGWAVITDEYKVPSKKFKVLGNTDRHSIKKNLIGALLFDSGETAEATRLKRTARRRYTRRKNRICYLQEIFSNEMAKVDDSFFHRLEESFLVEEDKKHERHPIFGNIVDEVAYHEKYPTIYHLRKKLVDSTDKADLRLIYLALAHMIKFRGHFLIEGDLNPDNSDVDKLFIQLVQTYNQLFEENPINASGVDAKAILSARLSKSRRLENLIAQLPGEKKNGLFGNLIALSLGLTPNFKSNFDLAEDAKLQLSKDTYDDDLDNLLAQIGDQYADLFLAAKNLSDAILLSDILRVNTEITKAPLSASMIKRYDEHHQDLTLLKALVRQQLPEKYKEIFFDQSKNGYAGYIDGGASQEEFYKFIKPILEKMDGTEELLVKLNREDLLRKQRTFDNGSIPHQIHLGELHAILRRQEDFYPFLKDNREKIEKILTFRIPYYVGPLARGNSRFAWMTRKSEETITPWNFEEVVDKGASAQSFIERMTNFDKNLPNEKVLPKHSLLYEYFTVYNELTKVKYVTEGMRKPAFLSGEQKKAIVDLLFKTNRKVTVKQLKEDYFKKIECFDSVEISGVEDRFNASLGTYHDLLKIIKDKDFLDNEENEDILEDIVLTLTLFEDREMIEERLKTYAHLFDDKVMKQLKRRRYTGWGRLSRKLINGIRDKQSGKTILDFLKSDGFANRNFMQLIHDDSLTFKEDIQKAQVSGQGDSLHEHIANLAGSPAIKKGILQTVKVVDELVKVMGRHKPENIVIEMARENQTTQKGQKNSRERMKRIEEGIKELGSQILKEHPVENTQLQNEKLYLYYLQNGRDMYVDQELDINRLSDYDVDHIVPQSFLKDDSIDNKVLTRSDKARGKSDNVPSEEVVKKMKNYWRQLLNAKLITQRKFDNLTKAERGGLSELDKAGFIKRQLVETRQITKHVAQILDSRMNTKYDENDKLIREVKVITLKSKLVSDFRKDFQFYKVREINNYHHAHDAYLNAVVGTALIKKYPKLESEFVYGDYKVYDVRKMIAKSEQEIGKATAKYFFYSNIMNFFKTEITLANGEIRKRPLIETNGETGEIVWDKGRDFATVRKVLSMPQVNIVKKTEVQTGGFSKESILPKRNSDKLIARKKDWDPKKYGGFDSPTVAYSVLVVAKVEKGKSKKLKSVKELLGITIMERSSFEKNPIDFLEAKGYKEVKKDLIIKLPKYSLFELENGRKRMLASAGELQKGNELALPSKYVNFLYLASHYEKLKGSPEDNEQKQLFVEQHKHYLDEIIEQISEFSKRVILADANLDKVLSAYNKHRDKPIREQAENIIHLFTLTNLGAPAAFKYFDTTIDRKRYTSTKEVLDATLIHQSITGLYETRIDLSQLGGDGGPAPEAAAKGGGGGTLNIEDEYRLHETSKEPDVSLGSTWLSDFPQAWAETGGMGLAVRQAPLIIPLKATSTPVSIKQYPMSQEARLGIKPHIQRLLDQGILVPCQSPWNTPLLPVKKPGTNDYRPVQDLREVNKRVEDIHPTVPNPYNLLSGLPPSHQWYTVLDLKDAFFCLRLHPTSQPLFAFEWRDPEMGISGQLTWTRLPQGFKNSPTLFNEALHRDLAGFRIQHPDLILLQYVDDLLLAATSELDCQQGTRALLQTLGDLGYRASAKKAQICQKQVKYLGYLLKEGQRWLTEARKETVMGQPIPKTPRQLREFLGKAGFCRLFIPGFAEMAAPLYPLTKPGTLFNWGPDQQKAFQEIKQALLTAPALGLPDLTKPFELFVDEKQGYAKGVLTQKLGPWRRPVAYLSKKLDPVAAGWPPCLRMVAAIAVLTKDAGKLTMGQPLVILAPHAVEALVKQPPDRWLSNARMTHYQALLLDTDRVQFGPVVALNPATLLPLPEEGLQHDCLDILAEAHGTRSDLMDQPLPDADHTWYTDGSSFLQEGQRKAGAAVTTETEVIWARALPAGTSAQRAELIALTQALKMAEGKKLNVYTDSRYAFATAHIHGEIYRRRGWLTSEGKEIKNKDEILALLKALFLPKRLSIIHCPGHQKGNSAEARGNRMADQAAREVATRETPETSTLLAGKRTADGSEFEKRTADGSEFESPKKKAKVE

SEQ ID NO: 2401 - protein, 2094 aa, synthetic construct
MPAAKRVKLDGGDKKYSIGLDIGTNSVGWAVITDEYKVPSKKFKVLGNTDRHSIKKNLIGALLFDSGETAEATRLKRTARRRYTRRKNRICYLQEIFSNEMAKVDDSFFHRLEESFLVEEDKKHERHPIFGNIVDEVAYHEKYPTIYHLRKKLVDSTDKADLRLIYLALAHMIKFRGHFLIEGDLNPDNSDVDKLFIQLVQTYNQLFEENPINASGVDAKAILSARLSKSRRLENLIAQLPGEKKNGLFGNLIALSLGLTPNFKSNFDLAEDAKLQLSKDTYDDDLDNLLAQIGDQYADLFLAAKNLSDAILLSDILRVNTEITKAPLSASMIKRYDEHHQDLTLLKALVRQQLPEKYKEIFFDQSKNGYAGYIDGGASQEEFYKFIKPILEKMDGTEELLVKLNREDLLRKQRTFDNGSIPHQIHLGELHAILRRQEDFYPFLKDNREKIEKILTFRIPYYVGPLARGNSRFAWMTRKSEETITPWNFEEVVDKGASAQSFIERMTNFDKNLPNEKVLPKHSLLYEYFTVYNELTKVKYVTEGMRKPAFLSGEQKKAIVDLLFKTNRKVTVKQLKEDYFKKIECFDSVEISGVEDRFNASLGTYHDLLKIIKDKDFLDNEENEDILEDIVLTLTLFEDREMIEERLKTYAHLFDDKVMKQLKRRRYTGWGRLSRKLINGIRDKQSGKTILDFLKSDGFANRNFMQLIHDDSLTFKEDIQKAQVSGQGDSLHEHIANLAGSPAIKKGILQTVKVVDELVKVMGRHKPENIVIEMARENQTTQKGQKNSRERMKRIEEGIKELGSQILKEHPVENTQLQNEKLYLYYLQNGRDMYVDQELDINRLSDYDVDHIVPQSFLKDDSIDNKVLTRSDKARGKSDNVPSEEVVKKMKNYWRQLLNAKLITQRKFDNLTKAERGGLSELDKAGFIKRQLVETRQITKHVAQILDSRMNTKYDENDKLIREVKVITLKSKLVSDFRKDFQFYKVREINNYHHAHDAYLNAVVGTALIKKYPKLESEFVYGDYKVYDVRKMIAKSEQEIGKATAKYFFYSNIMNFFKTEITLANGEIRKRPLIETNGETGEIVWDKGRDFATVRKVLSMPQVNIVKKTEVQTGGFSKESILPKRNSDKLIARKKDWDPKKYGGFDSPTVAYSVLVVAKVEKGKSKKLKSVKELLGITIMERSSFEKNPIDFLEAKGYKEVKKDLIIKLPKYSLFELENGRKRMLASAGELQKGNELALPSKYVNFLYLASHYEKLKGSPEDNEQKQLFVEQHKHYLDEIIEQISEFSKRVILADANLDKVLSAYNKHRDKPIREQAENIIHLFTLTNLGAPAAFKYFDTTIDRKRYTSTKEVLDATLIHQSITGLYETRIDLSQLGGDGGPAPGGGGGSGGTLNIEDEYRLHETSKEPDVSLGSTWLSDFPQAWAETGGMGLAVRQAPLIIPLKATSTPVSIKQYPMSQEARLGIKPHIQRLLDQGILVPCQSPWNTPLLPVKKPGTNDYRPVQDLREVNKRVEDIHPTVPNPYNLLSGLPPSHQWYTVLDLKDAFFCLRLHPTSQPLFAFEWRDPEMGISGQLTWTRLPQGFKNSPTLFNEALHRDLAGFRIQHPDLILLQYVDDLLLAATSELDCQQGTRALLQTLGDLGYRASAKKAQICQKQVKYLGYLLKEGQRWLTEARKETVMGQPIPKTPRQLREFLGKAGFCRLFIPGFAEMAAPLYPLTKPGTLFNWGPDQQKAFQEIKQALLTAPALGLPDLTKPFELFVDEKQGYAKGVLTQKLGPWRRPVAYLSKKLDPVAAGWPPCLRMVAAIAVLTKDAGKLTMGQPLVILAPHAVEALVKQPPDRWLSNARMTHYQALLLDTDRVQFGPVVALNPATLLPLPEEGLQHDCLDILAEAHGTRSDLMDQPLPDADHTWYTDGSSFLQEGQRKAGAAVTTETEVIWARALPAGTSAQRAELIALTQALKMAEGKKLNVYTDSRYAFATAHIHGEIYRRRGWLTSEGKEIKNKDEILALLKALFLPKRLSIIHCPGHQKGNSAEARGNRMADQAAREVATRETPETSTLLAGKRTADGSEFEKRTADGSEFESPKKKAKVE

SEQ ID NO: 2402 - protein, 2094 aa, synthetic construct
MPAAKRVKLDGGDKKYSIGLDIGTNSVGWAVITDEYKVPSKKFKVLGNTDRHSIKKNLIGALLFDSGETAEATRLKRTARRRYTRRKNRICYLQEIFSNEMAKVDDSFFHRLEESFLVEEDKKHERHPIFGNIVDEVAYHEKYPTIYHLRKKLVDSTDKADLRLIYLALAHMIKFRGHFLIEGDLNPDNSDVDKLFIQLVQTYNQLFEENPINASGVDAKAILSARLSKSRRLENLIAQLPGEKKNGLFGNLIALSLGLTPNFKSNFDLAEDAKLQLSKDTYDDDLDNLLAQIGDQYADLFLAAKNLSDAILLSDILRVNTEITKAPLSASMIKRYDEHHQDLTLLKALVRQQLPEKYKEIFFDQSKNGYAGYIDGGASQEEFYKFIKPILEKMDGTEELLVKLNREDLLRKQRTFDNGSIPHQIHLGELHAILRRQEDFYPFLKDNREKIEKILTFRIPYYVGPLARGNSRFAWMTRKSEETITPWNFEEVVDKGASAQSFIERMTNFDKNLPNEKVLPKHSLLYEYFTVYNELTKVKYVTEGMRKPAFLSGEQKKAIVDLLFKTNRKVTVKQLKEDYFKKIECFDSVEISGVEDRFNASLGTYHDLLKIIKDKDFLDNEENEDILEDIVLTLTLFEDREMIEERLKTYAHLFDDKVMKQLKRRRYTGWGRLSRKLINGIRDKQSGKTILDFLKSDGFANRNFMQLIHDDSLTFKEDIQKAQVSGQGDSLHEHIANLAGSPAIKKGILQTVKVVDELVKVMGRHKPENIVIEMARENQTTQKGQKNSRERMKRIEEGIKELGSQILKEHPVENTQLQNEKLYLYYLQNGRDMYVDQELDINRLSDYDVDHIVPQSFLKDDSIDNKVLTRSDKARGKSDNVPSEEVVKKMKNYWRQLLNAKLITQRKFDNLTKAERGGLSELDKAGFIKRQLVETRQITKHVAQILDSRMNTKYDENDKLIREVKVITLKSKLVSDFRKDFQFYKVREINNYHHAHDAYLNAVVGTALIKKYPKLESEFVYGDYKVYDVRKMIAKSEQEIGKATAKYFFYSNIMNFFKTEITLANGEIRKRPLIETNGETGEIVWDKGRDFATVRKVLSMPQVNIVKKTEVQTGGFSKESILPKRNSDKLIARKKDWDPKKYGGFDSPTVAYSVLVVAKVEKGKSKKLKSVKELLGITIMERSSFEKNPIDFLEAKGYKEVKKDLIIKLPKYSLFELENGRKRMLASAGELQKGNELALPSKYVNFLYLASHYEKLKGSPEDNEQKQLFVEQHKHYLDEIIEQISEFSKRVILADANLDKVLSAYNKHRDKPIREQAENIIHLFTLTNLGAPAAFKYFDTTIDRKRYTSTKEVLDATLIHQSITGLYETRIDLSQLGGDGGGSSGGGPAPGGTLNIEDEYRLHETSKEPDVSLGSTWLSDFPQAWAETGGMGLAVRQAPLIIPLKATSTPVSIKQYPMSQEARLGIKPHIQRLLDQGILVPCQSPWNTPLLPVKKPGTNDYRPVQDLREVNKRVEDIHPTVPNPYNLLSGLPPSHQWYTVLDLKDAFFCLRLHPTSQPLFAFEWRDPEMGISGQLTWTRLPQGFKNSPTLFNEALHRDLAGFRIQHPDLILLQYVDDLLLAATSELDCQQGTRALLQTLGDLGYRASAKKAQICQKQVKYLGYLLKEGQRWLTEARKETVMGQPIPKTPRQLREFLGKAGFCRLFIPGFAEMAAPLYPLTKPGTLFNWGPDQQKAFQEIKQALLTAPALGLPDLTKPFELFVDEKQGYAKGVLTQKLGPWRRPVAYLSKKLDPVAAGWPPCLRMVAAIAVLTKDAGKLTMGQPLVILAPHAVEALVKQPPDRWLSNARMTHYQALLLDTDRVQFGPVVALNPATLLPLPEEGLQHDCLDILAEAHGTRSDLMDQPLPDADHTWYTDGSSFLQEGQRKAGAAVTTETEVIWARALPAGTSAQRAELIALTQALKMAEGKKLNVYTDSRYAFATAHIHGEIYRRRGWLTSEGKEIKNKDEILALLKALFLPKRLSIIHCPGHQKGNSAEARGNRMADQAAREVATRETPETSTLLAGKRTADGSEFEKRTADGSEFESPKKKAKVE

SEQ ID NO: 2403 - protein, 2094 aa, synthetic construct
MPAAKRVKLDGGDKKYSIGLDIGTNSVGWAVITDEYKVPSKKFKVLGNTDRHSIKKNLIGALLFDSGETAEATRLKRTARRRYTRRKNRICYLQEIFSNEMAKVDDSFFHRLEESFLVEEDKKHERHPIFGNIVDEVAYHEKYPTIYHLRKKLVDSTDKADLRLIYLALAHMIKFRGHFLIEGDLNPDNSDVDKLFIQLVQTYNQLFEENPINASGVDAKAILSARLSKSRRLENLIAQLPGEKKNGLFGNLIALSLGLTPNFKSNFDLAEDAKLQLSKDTYDDDLDNLLAQIGDQYADLFLAAKNLSDAILLSDILRVNTEITKAPLSASMIKRYDEHHQDLTLLKALVRQQLPEKYKEIFFDQSKNGYAGYIDGGASQEEFYKFIKPILEKMDGTEELLVKLNREDLLRKQRTFDNGSIPHQIHLGELHAILRRQEDFYPFLKDNREKIEKILTFRIPYYVGPLARGNSRFAWMTRKSEETITPWNFEEVVDKGASAQSFIERMTNFDKNLPNEKVLPKHSLLYEYFTVYNELTKVKYVTEGMRKPAFLSGEQKKAIVDLLFKTNRKVTVKQLKEDYFKKIECFDSVEISGVEDRFNASLGTYHDLLKIIKDKDFLDNEENEDILEDIVLTLTLFEDREMIEERLKTYAHLFDDKVMKQLKRRRYTGWGRLSRKLINGIRDKQSGKTILDFLKSDGFANRNFMQLIHDDSLTFKEDIQKAQVSGQGDSLHEHIANLAGSPAIKKGILQTVKVVDELVKVMGRHKPENIVIEMARENQTTQKGQKNSRERMKRIEEGIKELGSQILKEHPVENTQLQNEKLYLYYLQNGRDMYVDQELDINRLSDYDVDHIVPQSFLKDDSIDNKVLTRSDKARGKSDNVPSEEVVKKMKNYWRQLLNAKLITQRKFDNLTKAERGGLSELDKAGFIKRQLVETRQITKHVAQILDSRMNTKYDENDKLIREVKVITLKSKLVSDFRKDFQFYKVREINNYHHAHDAYLNAVVGTALIKKYPKLESEFVYGDYKVYDVRKMIAKSEQEIGKATAKYFFYSNIMNFFKTEITLANGEIRKRPLIETNGETGEIVWDKGRDFATVRKVLSMPQVNIVKKTEVQTGGFSKESILPKRNSDKLIARKKDWDPKKYGGFDSPTVAYSVLVVAKVEKGKSKKLKSVKELLGITIMERSSFEKNPIDFLEAKGYKEVKKDLIIKLPKYSLFELENGRKRMLASAGELQKGNELALPSKYVNFLYLASHYEKLKGSPEDNEQKQLFVEQHKHYLDEIIEQISEFSKRVILADANLDKVLSAYNKHRDKPIREQAENIIHLFTLTNLGAPAAFKYFDTTIDRKRYTSTKEVLDATLIHQSITGLYETRIDLSQLGGDGGPAPGGSGGGGGTLNIEDEYRLHETSKEPDVSLGSTWLSDFPQAWAETGGMGLAVRQAPLIIPLKATSTPVSIKQYPMSQEARLGIKPHIQRLLDQGILVPCQSPWNTPLLPVKKPGTNDYRPVQDLREVNKRVEDIHPTVPNPYNLLSGLPPSHQWYTVLDLKDAFFCLRLHPTSQPLFAFEWRDPEMGISGQLTWTRLPQGFKNSPTLFNEALHRDLAGFRIQHPDLILLQYVDDLLLAATSELDCQQGTRALLQTLGDLGYRASAKKAQICQKQVKYLGYLLKEGQRWLTEARKETVMGQPIPKTPRQLREFLGKAGFCRLFIPGFAEMAAPLYPLTKPGTLFNWGPDQQKAFQEIKQALLTAPALGLPDLTKPFELFVDEKQGYAKGVLTQKLGPWRRPVAYLSKKLDPVAAGWPPCLRMVAAIAVLTKDAGKLTMGQPLVILAPHAVEALVKQPPDRWLSNARMTHYQALLLDTDRVQFGPVVALNPATLLPLPEEGLQHDCLDILAEAHGTRSDLMDQPLPDADHTWYTDGSSFLQEGQRKAGAAVTTETEVIWARALPAGTSAQRAELIALTQALKMAEGKKLNVYTDSRYAFATAHIHGEIYRRRGWLTSEGKEIKNKDEILALLKALFLPKRLSIIHCPGHQKGNSAEARGNRMADQAAREVATRETPETSTLLAGKRTADGSEFEKRTADGSEFESPKKKAKVE

SEQ ID NO: 2404 - protein, 2096 aa, synthetic construct
MPAAKRVKLDGGDKKYSIGLDIGTNSVGWAVITDEYKVPSKKFKVLGNTDRHSIKKNLIGALLFDSGETAEATRLKRTARRRYTRRKNRICYLQEIFSNEMAKVDDSFFHRLEESFLVEEDKKHERHPIFGNIVDEVAYHEKYPTIYHLRKKLVDSTDKADLRLIYLALAHMIKFRGHFLIEGDLNPDNSDVDKLFIQLVQTYNQLFEENPINASGVDAKAILSARLSKSRRLENLIAQLPGEKKNGLFGNLIALSLGLTPNFKSNFDLAEDAKLQLSKDTYDDDLDNLLAQIGDQYADLFLAAKNLSDAILLSDILRVNTEITKAPLSASMIKRYDEHHQDLTLLKALVRQQLPEKYKEIFFDQSKNGYAGYIDGGASQEEFYKFIKPILEKMDGTEELLVKLNREDLLRKQRTFDNGSIPHQIHLGELHAILRRQEDFYPFLKDNREKIEKILTFRIPYYVGPLARGNSRFAWMTRKSEETITPWNFEEVVDKGASAQSFIERMTNFDKNLPNEKVLPKHSLLYEYFTVYNELTKVKYVTEGMRKPAFLSGEQKKAIVDLLFKTNRKVTVKQLKEDYFKKIECFDSVEISGVEDRFNASLGTYHDLLKIIKDKDFLDNEENEDILEDIVLTLTLFEDREMIEERLKTYAHLFDDKVMKQLKRRRYTGWGRLSRKLINGIRDKQSGKTILDFLKSDGFANRNFMQLIHDDSLTFKEDIQKAQVSGQGDSLHEHIANLAGSPAIKKGILQTVKVVDELVKVMGRHKPENIVIEMARENQTTQKGQKNSRERMKRIEEGIKELGSQILKEHPVENTQLQNEKLYLYYLQNGRDMYVDQELDINRLSDYDVDHIVPQSFLKDDSIDNKVLTRSDKARGKSDNVPSEEVVKKMKNYWRQLLNAKLITQRKFDNLTKAERGGLSELDKAGFIKRQLVETRQITKHVAQILDSRMNTKYDENDKLIREVKVITLKSKLVSDFRKDFQFYKVREINNYHHAHDAYLNAVVGTALIKKYPKLESEFVYGDYKVYDVRKMIAKSEQEIGKATAKYFFYSNIMNFFKTEITLANGEIRKRPLIETNGETGEIVWDKGRDFATVRKVLSMPQVNIVKKTEVQTGGFSKESILPKRNSDKLIARKKDWDPKKYGGFDSPTVAYSVLVVAKVEKGKSKKLKSVKELLGITIMERSSFEKNPIDFLEAKGYKEVKKDLIIKLPKYSLFELENGRKRMLASAGELQKGNELALPSKYVNFLYLASHYEKLKGSPEDNEQKQLFVEQHKHYLDEIIEQISEFSKRVILADANLDKVLSAYNKHRDKPIREQAENIIHLFTLTNLGAPAAFKYFDTTIDRKRYTSTKEVLDATLIHQSITGLYETRIDLSQLGGDGGGGSGSSEAAAKGGTLNIEDEYRLHETSKEPDVSLGSTWLSDFPQAWAETGGMGLAVRQAPLIIPLKATSTPVSIKQYPMSQEARLGIKPHIQRLLDQGILVPCQSPWNTPLLPVKKPGTNDYRPVQDLREVNKRVEDIHPTVPNPYNLLSGLPPSHQWYTVLDLKDAFFCLRLHPTSQPLFAFEWRDPEMGISGQLTWTRLPQGFKNSPTLFNEALHRDLAGFRIQHPDLILLQYVDDLLLAATSELDCQQGTRALLQTLGDLGYRASAKKAQICQKQVKYLGYLLKEGQRWLTEARKETVMGQPIPKTPRQLREFLGKAGFCRLFIPGFAEMAAPLYPLTKPGTLFNWGPDQQKAFQEIKQALLTAPALGLPDLTKPFELFVDEKQGYAKGVLTQKLGPWRRPVAYLSKKLDPVAAGWPPCLRMVAAIAVLTKDAGKLTMGQPLVILAPHAVEALVKQPPDRWLSNARMTHYQALLLDTDRVQFGPVVALNPATLLPLPEEGLQHDCLDILAEAHGTRSDLMDQPLPDADHTWYTDGSSFLQEGQRKAGAAVTTETEVIWARALPAGTSAQRAELIALTQALKMAEGKKLNVYTDSRYAFATAHIHGEIYRRRGWLTSEGKEIKNKDEILALLKALFLPKRLSIIHCPGHQKGNSAEARGNRMADQAAREVATRETPETSTLLAGKRTADGSEFEKRTADGSEFESPKKKAKVE

SEQ ID NO: 2405 - protein, 2100 aa, synthetic construct
MPAAKRVKLDGGDKKYSIGLDIGTNSVGWAVITDEYKVPSKKFKVLGNTDRHSIKKNLIGALLFDSGETAEATRLKRTARRRYTRRKNRICYLQEIFSNEMAKVDDSFFHRLEESFLVEEDKKHERHPIFGNIVDEVAYHEKYPTIYHLRKKLVDSTDKADLRLIYLALAHMIKFRGHFLIEGDLNPDNSDVDKLFIQLVQTYNQLFEENPINASGVDAKAILSARLSKSRRLENLIAQLPGEKKNGLFGNLIALSLGLTPNFKSNFDLAEDAKLQLSKDTYDDDLDNLLAQIGDQYADLFLAAKNLSDAILLSDILRVNTEITKAPLSASMIKRYDEHHQDLTLLKALVRQQLPEKYKEIFFDQSKNGYAGYIDGGASQEEFYKFIKPILEKMDGTEELLVKLNREDLLRKQRTFDNGSIPHQIHLGELHAILRRQEDFYPFLKDNREKIEKILTFRIPYYVGPLARGNSRFAWMTRKSEETITPWNFEEVVDKGASAQSFIERMTNFDKNLPNEKVLPKHSLLYEYFTVYNELTKVKYVTEGMRKPAFLSGEQKKAIVDLLFKTNRKVTVKQLKEDYFKKIECFDSVEISGVEDRFNASLGTYHDLLKIIKDKDFLDNEENEDILEDIVLTLTLFEDREMIEERLKTYAHLFDDKVMKQLKRRRYTGWGRLSRKLINGIRDKQSGKTILDFLKSDGFANRNFMQLIHDDSLTFKEDIQKAQVSGQGDSLHEHIANLAGSPAIKKGILQTVKVVDELVKVMGRHKPENIVIEMARENQTTQKGQKNSRERMKRIEEGIKELGSQILKEHPVENTQLQNEKLYLYYLQNGRDMYVDQELDINRLSDYDVDHIVPQSFLKDDSIDNKVLTRSDKARGKSDNVPSEEVVKKMKNYWRQLLNAKLITQRKFDNLTKAERGGLSELDKAGFIKRQLVETRQITKHVAQILDSRMNTKYDENDKLIREVKVITLKSKLVSDFRKDFQFYKVREINNYHHAHDAYLNAVVGTALIKKYPKLESEFVYGDYKVYDVRKMIAKSEQEIGKATAKYFFYSNIMNFFKTEITLANGEIRKRPLIETNGETGEIVWDKGRDFATVRKVLSMPQVNIVKKTEVQTGGFSKESILPKRNSDKLIARKKDWDPKKYGGFDSPTVAYSVLVVAKVEKGKSKKLKSVKELLGITIMERSSFEKNPIDFLEAKGYKEVKKDLIIKLPKYSLFELENGRKRMLASAGELQKGNELALPSKYVNFLYLASHYEKLKGSPEDNEQKQLFVEQHKHYLDEIIEQISEFSKRVILADANLDKVLSAYNKHRDKPIREQAENIIHLFTLTNLGAPAAFKYFDTTIDRKRYTSTKEVLDATLIHQSITGLYETRIDLSQLGGDGGGSSGSSGSSGSSGSSGGTLNIEDEYRLHETSKEPDVSLGSTWLSDFPQAWAETGGMGLAVRQAPLIIPLKATSTPVSIKQYPMSQEARLGIKPHIQRLLDQGILVPCQSPWNTPLLPVKKPGTNDYRPVQDLREVNKRVEDIHPTVPNPYNLLSGLPPSHQWYTVLDLKDAFFCLRLHPTSQPLFAFEWRDPEMGISGQLTWTRLPQGFKNSPTLFNEALHRDLAGFRIQHPDLILLQYVDDLLLAATSELDCQQGTRALLQTLGDLGYRASAKKAQICQKQVKYLGYLLKEGQRWLTEARKETVMGQPIPKTPRQLREFLGKAGFCRLFIPGFAEMAAPLYPLTKPGTLFNWGPDQQKAFQEIKQALLTAPALGLPDLTKPFELFVDEKQGYAKGVLTQKLGPWRRPVAYLSKKLDPVAAGWPPCLRMVAAIAVLTKDAGKLTMGQPLVILAPHAVEALVKQPPDRWLSNARMTHYQALLLDTDRVQFGPVVALNPATLLPLPEEGLQHDCLDILAEAHGTRSDLMDQPLPDADHTWYTDGSSFLQEGQRKAGAAVTTETEVIWARALPAGTSAQRAELIALTQALKMAEGKKLNVYTDSRYAFATAHIHGEIYRRRGWLTSEGKEIKNKDEILALLKALFLPKRLSIIHCPGHQKGNSAEARGNRMADQAAREVATRETPETSTLLAGKRTADGSEFEKRTADGSEFESPKKKAKVE

SEQ ID NO: 2406 - protein, 2091 aa, synthetic construct
MPAAKRVKLDGGDKKYSIGLDIGTNSVGWAVITDEYKVPSKKFKVLGNTDRHSIKKNLIGALLFDSGETAEATRLKRTARRRYTRRKNRICYLQEIFSNEMAKVDDSFFHRLEESFLVEEDKKHERHPIFGNIVDEVAYHEKYPTIYHLRKKLVDSTDKADLRLIYLALAHMIKFRGHFLIEGDLNPDNSDVDKLFIQLVQTYNQLFEENPINASGVDAKAILSARLSKSRRLENLIAQLPGEKKNGLFGNLIALSLGLTPNFKSNFDLAEDAKLQLSKDTYDDDLDNLLAQIGDQYADLFLAAKNLSDAILLSDILRVNTEITKAPLSASMIKRYDEHHQDLTLLKALVRQQLPEKYKEIFFDQSKNGYAGYIDGGASQEEFYKFIKPILEKMDGTEELLVKLNREDLLRKQRTFDNGSIPHQIHLGELHAILRRQEDFYPFLKDNREKIEKILTFRIPYYVGPLARGNSRFAWMTRKSEETITPWNFEEVVDKGASAQSFIERMTNFDKNLPNEKVLPKHSLLYEYFTVYNELTKVKYVTEGMRKPAFLSGEQKKAIVDLLFKTNRKVTVKQLKEDYFKKIECFDSVEISGVEDRFNASLGTYHDLLKIIKDKDFLDNEENEDILEDIVLTLTLFEDREMIEERLKTYAHLFDDKVMKQLKRRRYTGWGRLSRKLINGIRDKQSGKTILDFLKSDGFANRNFMQLIHDDSLTFKEDIQKAQVSGQGDSLHEHIANLAGSPAIKKGILQTVKVVDELVKVMGRHKPENIVIEMARENQTTQKGQKNSRERMKRIEEGIKELGSQILKEHPVENTQLQNEKLYLYYLQNGRDMYVDQELDINRLSDYDVDHIVPQSFLKDDSIDNKVLTRSDKARGKSDNVPSEEVVKKMKNYWRQLLNAKLITQRKFDNLTKAERGGLSELDKAGFIKRQLVETRQITKHVAQILDSRMNTKYDENDKLIREVKVITLKSKLVSDFRKDFQFYKVREINNYHHAHDAYLNAVVGTALIKKYPKLESEFVYGDYKVYDVRKMIAKSEQEIGKATAKYFFYSNIMNFFKTEITLANGEIRKRPLIETNGETGEIVWDKGRDFATVRKVLSMPQVNIVKKTEVQTGGFSKESILPKRNSDKLIARKKDWDPKKYGGFDSPTVAYSVLVVAKVEKGKSKKLKSVKELLGITIMERSSFEKNPIDFLEAKGYKEVKKDLIIKLPKYSLFELENGRKRMLASAGELQKGNELALPSKYVNFLYLASHYEKLKGSPEDNEQKQLFVEQHKHYLDEIIEQISEFSKRVILADANLDKVLSAYNKHRDKPIREQAENIIHLFTLTNLGAPAAFKYFDTTIDRKRYTSTKEVLDATLIHQSITGLYETRIDLSQLGGDGGGSSGGSGGTLNIEDEYRLHETSKEPDVSLGSTWLSDFPQAWAETGGMGLAVRQAPLIIPLKATSTPVSIKQYPMSQEARLGIKPHIQRLLDQGILVPCQSPWNTPLLPVKKPGTNDYRPVQDLREVNKRVEDIHPTVPNPYNLLSGLPPSHQWYTVLDLKDAFFCLRLHPTSQPLFAFEWRDPEMGISGQLTWTRLPQGFKNSPTLFNEALHRDLAGFRIQHPDLILLQYVDDLLLAATSELDCQQGTRALLQTLGDLGYRASAKKAQICQKQVKYLGYLLKEGQRWLTEARKETVMGQPIPKTPRQLREFLGKAGFCRLFIPGFAEMAAPLYPLTKPGTLFNWGPDQQKAFQEIKQALLTAPALGLPDLTKPFELFVDEKQGYAKGVLTQKLGPWRRPVAYLSKKLDPVAAGWPPCLRMVAAIAVLTKDAGKLTMGQPLVILAPHAVEALVKQPPDRWLSNARMTHYQALLLDTDRVQFGPVVALNPATLLPLPEEGLQHDCLDILAEAHGTRSDLMDQPLPDADHTWYTDGSSFLQEGQRKAGAAVTTETEVIWARALPAGTSAQRAELIALTQALKMAEGKKLNVYTDSRYAFATAHIHGEIYRRRGWLTSEGKEIKNKDEILALLKALFLPKRLSIIHCPGHQKGNSAEARGNRMADQAAREVATRETPETSTLLAGKRTADGSEFEKRTADGSEFESPKKKAKVE

SEQ ID NO: 2407 - protein, 2094 aa, synthetic construct
MPAAKRVKLDGGDKKYSIGLDIGTNSVGWAVITDEYKVPSKKFKVLGNTDRHSIKKNLIGALLFDSGETAEATRLKRTARRRYTRRKNRICYLQEIFSNEMAKVDDSFFHRLEESFLVEEDKKHERHPIFGNIVDEVAYHEKYPTIYHLRKKLVDSTDKADLRLIYLALAHMIKFRGHFLIEGDLNPDNSDVDKLFIQLVQTYNQLFEENPINASGVDAKAILSARLSKSRRLENLIAQLPGEKKNGLFGNLIALSLGLTPNFKSNFDLAEDAKLQLSKDTYDDDLDNLLAQIGDQYADLFLAAKNLSDAILLSDILRVNTEITKAPLSASMIKRYDEHHQDLTLLKALVRQQLPEKYKEIFFDQSKNGYAGYIDGGASQEEFYKFIKPILEKMDGTEELLVKLNREDLLRKQRTFDNGSIPHQIHLGELHAILRRQEDFYPFLKDNREKIEKILTFRIPYYVGPLARGNSRFAWMTRKSEETITPWNFEEVVDKGASAQSFIERMTNFDKNLPNEKVLPKHSLLYEYFTVYNELTKVKYVTEGMRKPAFLSGEQKKAIVDLLFKTNRKVTVKQLKEDYFKKIECFDSVEISGVEDRFNASLGTYHDLLKIIKDKDFLDNEENEDILEDIVLTLTLFEDREMIEERLKTYAHLFDDKVMKQLKRRRYTGWGRLSRKLINGIRDKQSGKTILDFLKSDGFANRNFMQLIHDDSLTFKEDIQKAQVSGQGDSLHEHIANLAGSPAIKKGILQTVKVVDELVKVMGRHKPENIVIEMARENQTTQKGQKNSRERMKRIEEGIKELGSQILKEHPVENTQLQNEKLYLYYLQNGRDMYVDQELDINRLSDYDVDHIVPQSFLKDDSIDNKVLTRSDKARGKSDNVPSEEVVKKMKNYWRQLLNAKLITQRKFDNLTKAERGGLSELDKAGFIKRQLVETRQITKHVAQILDSRMNTKYDENDKLIREVKVITLKSKLVSDFRKDFQFYKVREINNYHHAHDAYLNAVVGTALIKKYPKLESEFVYGDYKVYDVRKMIAKSEQEIGKATAKYFFYSNIMNFFKTEITLANGEIRKRPLIETNGETGEIVWDKGRDFATVRKVLSMPQVNIVKKTEVQTGGFSKESILPKRNSDKLIARKKDWDPKKYGGFDSPTVAYSVLVVAKVEKGKSKKLKSVKELLGITIMERSSFEKNPIDFLEAKGYKEVKKDLIIKLPKYSLFELENGRKRMLASAGELQKGNELALPSKYVNFLYLASHYEKLKGSPEDNEQKQLFVEQHKHYLDEIIEQISEFSKRVILADANLDKVLSAYNKHRDKPIREQAENIIHLFTLTNLGAPAAFKYFDTTIDRKRYTSTKEVLDATLIHQSITGLYETRIDLSQLGGDGGGSSPAPGGSGGTLNIEDEYRLHETSKEPDVSLGSTWLSDFPQAWAETGGMGLAVRQAPLIIPLKATSTPVSIKQYPMSQEARLGIKPHIQRLLDQGILVPCQSPWNTPLLPVKKPGTNDYRPVQDLREVNKRVEDIHPTVPNPYNLLSGLPPSHQWYTVLDLKDAFFCLRLHPTSQPLFAFEWRDPEMGISGQLTWTRLPQGFKNSPTLFNEALHRDLAGFRIQHPDLILLQYVDDLLLAATSELDCQQGTRALLQTLGDLGYRASAKKAQICQKQVKYLGYLLKEGQRWLTEARKETVMGQPIPKTPRQLREFLGKAGFCRLFIPGFAEMAAPLYPLTKPGTLFNWGPDQQKAFQEIKQALLTAPALGLPDLTKPFELFVDEKQGYAKGVLTQKLGPWRRPVAYLSKKLDPVAAGWPPCLRMVAAIAVLTKDAGKLTMGQPLVILAPHAVEALVKQPPDRWLSNARMTHYQALLLDTDRVQFGPVVALNPATLLPLPEEGLQHDCLDILAEAHGTRSDLMDQPLPDADHTWYTDGSSFLQEGQRKAGAAVTTETEVIWARALPAGTSAQRAELIALTQALKMAEGKKLNVYTDSRYAFATAHIHGEIYRRRGWLTSEGKEIKNKDEILALLKALFLPKRLSIIHCPGHQKGNSAEARGNRMADQAAREVATRETPETSTLLAGKRTADGSEFEKRTADGSEFESPKKKAKVE

SEQ ID NO: 2408 - protein, 2096 aa, synthetic construct
MPAAKRVKLDGGDKKYSIGLDIGTNSVGWAVITDEYKVPSKKFKVLGNTDRHSIKKNLIGALLFDSGETAEATRLKRTARRRYTRRKNRICYLQEIFSNEMAKVDDSFFHRLEESFLVEEDKKHERHPIFGNIVDEVAYHEKYPTIYHLRKKLVDSTDKADLRLIYLALAHMIKFRGHFLIEGDLNPDNSDVDKLFIQLVQTYNQLFEENPINASGVDAKAILSARLSKSRRLENLIAQLPGEKKNGLFGNLIALSLGLTPNFKSNFDLAEDAKLQLSKDTYDDDLDNLLAQIGDQYADLFLAAKNLSDAILLSDILRVNTEITKAPLSASMIKRYDEHHQDLTLLKALVRQQLPEKYKEIFFDQSKNGYAGYIDGGASQEEFYKFIKPILEKMDGTEELLVKLNREDLLRKQRTFDNGSIPHQIHLGELHAILRRQEDFYPFLKDNREKIEKILTFRIPYYVGPLARGNSRFAWMTRKSEETITPWNFEEVVDKGASAQSFIERMTNFDKNLPNEKVLPKHSLLYEYFTVYNELTKVKYVTEGMRKPAFLSGEQKKAIVDLLFKTNRKVTVKQLKEDYFKKIECFDSVEISGVEDRFNASLGTYHDLLKIIKDKDFLDNEENEDILEDIVLTLTLFEDREMIEERLKTYAHLFDDKVMKQLKRRRYTGWGRLSRKLINGIRDKQSGKTILDFLKSDGFANRNFMQLIHDDSLTFKEDIQKAQVSGQGDSLHEHIANLAGSPAIKKGILQTVKVVDELVKVMGRHKPENIVIEMARENQTTQKGQKNSRERMKRIEEGIKELGSQILKEHPVENTQLQNEKLYLYYLQNGRDMYVDQELDINRLSDYDVDHIVPQSFLKDDSIDNKVLTRSDKARGKSDNVPSEEVVKKMKNYWRQLLNAKLITQRKFDNLTKAERGGLSELDKAGFIKRQLVETRQITKHVAQILDSRMNTKYDENDKLIREVKVITLKSKLVSDFRKDFQFYKVREINNYHHAHDAYLNAVVGTALIKKYPKLESEFVYGDYKVYDVRKMIAKSEQEIGKATAKYFFYSNIMNFFKTEITLANGEIRKRPLIETNGETGEIVWDKGRDFATVRKVLSMPQVNIVKKTEVQTGGFSKESILPKRNSDKLIARKKDWDPKKYGGFDSPTVAYSVLVVAKVEKGKSKKLKSVKELLGITIMERSSFEKNPIDFLEAKGYKEVKKDLIIKLPKYSLFELENGRKRMLASAGELQKGNELALPSKYVNFLYLASHYEKLKGSPEDNEQKQLFVEQHKHYLDEIIEQISEFSKRVILADANLDKVLSAYNKHRDKPIREQAENIIHLFTLTNLGAPAAFKYFDTTIDRKRYTSTKEVLDATLIHQSITGLYETRIDLSQLGGDGGGGSEAAAKGSSGGTLNIEDEYRLHETSKEPDVSLGSTWLSDFPQAWAETGGMGLAVRQAPLIIPLKATSTPVSIKQYPMSQEARLGIKPHIQRLLDQGILVPCQSPWNTPLLPVKKPGTNDYRPVQDLREVNKRVEDIHPTVPNPYNLLSGLPPSHQWYTVLDLKDAFFCLRLHPTSQPLFAFEWRDPEMGISGQLTWTRLPQGFKNSPTLFNEALHRDLAGFRIQHPDLILLQYVDDLLLAATSELDCQQGTRALLQTLGDLGYRASAKKAQICQKQVKYLGYLLKEGQRWLTEARKETVMGQPIPKTPRQLREFLGKAGFCRLFIPGFAEMAAPLYPLTKPGTLFNWGPDQQKAFQEIKQALLTAPALGLPDLTKPFELFVDEKQGYAKGVLTQKLGPWRRPVAYLSKKLDPVAAGWPPCLRMVAAIAVLTKDAGKLTMGQPLVILAPHAVEALVKQPPDRWLSNARMTHYQALLLDTDRVQFGPVVALNPATLLPLPEEGLQHDCLDILAEAHGTRSDLMDQPLPDADHTWYTDGSSFLQEGQRKAGAAVTTETEVIWARALPAGTSAQRAELIALTQALKMAEGKKLNVYTDSRYAFATAHIHGEIYRRRGWLTSEGKEIKNKDEILALLKALFLPKRLSIIHCPGHQKGNSAEARGNRMADQAAREVATRETPETSTLLAGKRTADGSEFEKRTADGSEFESPKKKAKVE

SEQ ID NO: 2409 - protein, 2094 aa, synthetic construct
MPAAKRVKLDGGDKKYSIGLDIGTNSVGWAVITDEYKVPSKKFKVLGNTDRHSIKKNLIGALLFDSGETAEATRLKRTARRRYTRRKNRICYLQEIFSNEMAKVDDSFFHRLEESFLVEEDKKHERHPIFGNIVDEVAYHEKYPTIYHLRKKLVDSTDKADLRLIYLALAHMIKFRGHFLIEGDLNPDNSDVDKLFIQLVQTYNQLFEENPINASGVDAKAILSARLSKSRRLENLIAQLPGEKKNGLFGNLIALSLGLTPNFKSNFDLAEDAKLQLSKDTYDDDLDNLLAQIGDQYADLFLAAKNLSDAILLSDILRVNTEITKAPLSASMIKRYDEHHQDLTLLKALVRQQLPEKYKEIFFDQSKNGYAGYIDGGASQEEFYKFIKPILEKMDGTEELLVKLNREDLLRKQRTFDNGSIPHQIHLGELHAILRRQEDFYPFLKDNREKIEKILTFRIPYYVGPLARGNSRFAWMTRKSEETITPWNFEEVVDKGASAQSFIERMTNFDKNLPNEKVLPKHSLLYEYFTVYNELTKVKYVTEGMRKPAFLSGEQKKAIVDLLFKTNRKVTVKQLKEDYFKKIECFDSVEISGVEDRFNASLGTYHDLLKIIKDKDFLDNEENEDILEDIVLTLTLFEDREMIEERLKTYAHLFDDKVMKQLKRRRYTGWGRLSRKLINGIRDKQSGKTILDFLKSDGFANRNFMQLIHDDSLTFKEDIQKAQVSGQGDSLHEHIANLAGSPAIKKGILQTVKVVDELVKVMGRHKPENIVIEMARENQTTQKGQKNSRERMKRIEEGIKELGSQILKEHPVENTQLQNEKLYLYYLQNGRDMYVDQELDINRLSDYDVDHIVPQSFLKDDSIDNKVLTRSDKARGKSDNVPSEEVVKKMKNYWRQLLNAKLITQRKFDNLTKAERGGLSELDKAGFIKRQLVETRQITKHVAQILDSRMNTKYDENDKLIREVKVITLKSKLVSDFRKDFQFYKVREINNYHHAHDAYLNAVVGTALIKKYPKLESEFVYGDYKVYDVRKMIAKSEQEIGKATAKYFFYSNIMNFFKTEITLANGEIRKRPLIETNGETGEIVWDKGRDFATVRKVLSMPQVNIVKKTEVQTGGFSKESILPKRNSDKLIARKKDWDPKKYGGFDSPTVAYSVLVVAKVEKGKSKKLKSVKELLGITIMERSSFEKNPIDFLEAKGYKEVKKDLIIKLPKYSLFELENGRKRMLASAGELQKGNELALPSKYVNFLYLASHYEKLKGSPEDNEQKQLFVEQHKHYLDEIIEQISEFSKRVILADANLDKVLSAYNKHRDKPIREQAENIIHLFTLTNLGAPAAFKYFDTTIDRKRYTSTKEVLDATLIHQSITGLYETRIDLSQLGGDGGGGGGSSGGSGGTLNIEDEYRLHETSKEPDVSLGSTWLSDFPQAWAETGGMGLAVRQAPLIIPLKATSTPVSIKQYPMSQEARLGIKPHIQRLLDQGILVPCQSPWNTPLLPVKKPGTNDYRPVQDLREVNKRVEDIHPTVPNPYNLLSGLPPSHQWYTVLDLKDAFFCLRLHPTSQPLFAFEWRDPEMGISGQLTWTRLPQGFKNSPTLFNEALHRDLAGFRIQHPDLILLQYVDDLLLAATSELDCQQGTRALLQTLGDLGYRASAKKAQICQKQVKYLGYLLKEGQRWLTEARKETVMGQPIPKTPRQLREFLGKAGFCRLFIPGFAEMAAPLYPLTKPGTLFNWGPDQQKAFQEIKQALLTAPALGLPDLTKPFELFVDEKQGYAKGVLTQKLGPWRRPVAYLSKKLDPVAAGWPPCLRMVAAIAVLTKDAGKLTMGQPLVILAPHAVEALVKQPPDRWLSNARMTHYQALLLDTDRVQFGPVVALNPATLLPLPEEGLQHDCLDILAEAHGTRSDLMDQPLPDADHTWYTDGSSFLQEGQRKAGAAVTTETEVIWARALPAGTSAQRAELIALTQALKMAEGKKLNVYTDSRYAFATAHIHGEIYRRRGWLTSEGKEIKNKDEILALLKALFLPKRLSIIHCPGHQKGNSAEARGNRMADQAAREVATRETPETSTLLAGKRTADGSEFEKRTADGSEFESPKKKAKVE

SEQ ID NO: 2410 - protein, 2110 aa, synthetic construct
MPAAKRVKLDGGDKKYSIGLDIGTNSVGWAVITDEYKVPSKKFKVLGNTDRHSIKKNLIGALLFDSGETAEATRLKRTARRRYTRRKNRICYLQEIFSNEMAKVDDSFFHRLEESFLVEEDKKHERHPIFGNIVDEVAYHEKYPTIYHLRKKLVDSTDKADLRLIYLALAHMIKFRGHFLIEGDLNPDNSDVDKLFIQLVQTYNQLFEENPINASGVDAKAILSARLSKSRRLENLIAQLPGEKKNGLFGNLIALSLGLTPNFKSNFDLAEDAKLQLSKDTYDDDLDNLLAQIGDQYADLFLAAKNLSDAILLSDILRVNTEITKAPLSASMIKRYDEHHQDLTLLKALVRQQLPEKYKEIFFDQSKNGYAGYIDGGASQEEFYKFIKPILEKMDGTEELLVKLNREDLLRKQRTFDNGSIPHQIHLGELHAILRRQEDFYPFLKDNREKIEKILTFRIPYYVGPLARGNSRFAWMTRKSEETITPWNFEEVVDKGASAQSFIERMTNFDKNLPNEKVLPKHSLLYEYFTVYNELTKVKYVTEGMRKPAFLSGEQKKAIVDLLFKTNRKVTVKQLKEDYFKKIECFDSVEISGVEDRFNASLGTYHDLLKIIKDKDFLDNEENEDILEDIVLTLTLFEDREMIEERLKTYAHLFDDKVMKQLKRRRYTGWGRLSRKLINGIRDKQSGKTILDFLKSDGFANRNFMQLIHDDSLTFKEDIQKAQVSGQGDSLHEHIANLAGSPAIKKGILQTVKVVDELVKVMGRHKPENIVIEMARENQTTQKGQKNSRERMKRIEEGIKELGSQILKEHPVENTQLQNEKLYLYYLQNGRDMYVDQELDINRLSDYDVDHIVPQSFLKDDSIDNKVLTRSDKARGKSDNVPSEEVVKKMKNYWRQLLNAKLITQRKFDNLTKAERGGLSELDKAGFIKRQLVETRQITKHVAQILDSRMNTKYDENDKLIREVKVITLKSKLVSDFRKDFQFYKVREINNYHHAHDAYLNAVVGTALIKKYPKLESEFVYGDYKVYDVRKMIAKSEQEIGKATAKYFFYSNIMNFFKTEITLANGEIRKRPLIETNGETGEIVWDKGRDFATVRKVLSMPQVNIVKKTEVQTGGFSKESILPKRNSDKLIARKKDWDPKKYGGFDSPTVAYSVLVVAKVEKGKSKKLKSVKELLGITIMERSSFEKNPIDFLEAKGYKEVKKDLIIKLPKYSLFELENGRKRMLASAGELQKGNELALPSKYVNFLYLASHYEKLKGSPEDNEQKQLFVEQHKHYLDEIIEQISEFSKRVILADANLDKVLSAYNKHRDKPIREQAENIIHLFTLTNLGAPAAFKYFDTTIDRKRYTSTKEVLDATLIHQSITGLYETRIDLSQLGGDGGGGGGSGGGGSGGGGSGGGGSGGGGSGGTLNIEDEYRLHETSKEPDVSLGSTWLSDFPQAWAETGGMGLAVRQAPLIIPLKATSTPVSIKQYPMSQEARLGIKPHIQRLLDQGILVPCQSPWNTPLLPVKKPGTNDYRPVQDLREVNKRVEDIHPTVPNPYNLLSGLPPSHQWYTVLDLKDAFFCLRLHPTSQPLFAFEWRDPEMGISGQLTWTRLPQGFKNSPTLFNEALHRDLAGFRIQHPDLILLQYVDDLLLAATSELDCQQGTRALLQTLGDLGYRASAKKAQICQKQVKYLGYLLKEGQRWLTEARKETVMGQPIPKTPRQLREFLGKAGFCRLFIPGFAEMAAPLYPLTKPGTLFNWGPDQQKAFQEIKQALLTAPALGLPDLTKPFELFVDEKQGYAKGVLTQKLGPWRRPVAYLSKKLDPVAAGWPPCLRMVAAIAVLTKDAGKLTMGQPLVILAPHAVEALVKQPPDRWLSNARMTHYQALLLDTDRVQFGPVVALNPATLLPLPEEGLQHDCLDILAEAHGTRSDLMDQPLPDADHTWYTDGSSFLQEGQRKAGAAVTTETEVIWARALPAGTSAQRAELIALTQALKMAEGKKLNVYTDSRYAFATAHIHGEIYRRRGWLTSEGKEIKNKDEILALLKALFLPKRLSIIHCPGHQKGNSAEARGNRMADQAAREVATRETPETSTLLAGKRTADGSEFEKRTADGSEFESPKKKAKVE

SEQ ID NO: 2411 - protein, 2091 aa, synthetic construct
MPAAKRVKLDGGDKKYSIGLDIGTNSVGWAVITDEYKVPSKKFKVLGNTDRHSIKKNLIGALLFDSGETAEATRLKRTARRRYTRRKNRICYLQEIFSNEMAKVDDSFFHRLEESFLVEEDKKHERHPIFGNIVDEVAYHEKYPTIYHLRKKLVDSTDKADLRLIYLALAHMIKFRGHFLIEGDLNPDNSDVDKLFIQLVQTYNQLFEENPINASGVDAKAILSARLSKSRRLENLIAQLPGEKKNGLFGNLIALSLGLTPNFKSNFDLAEDAKLQLSKDTYDDDLDNLLAQIGDQYADLFLAAKNLSDAILLSDILRVNTEITKAPLSASMIKRYDEHHQDLTLLKALVRQQLPEKYKEIFFDQSKNGYAGYIDGGASQEEFYKFIKPILEKMDGTEELLVKLNREDLLRKQRTFDNGSIPHQIHLGELHAILRRQEDFYPFLKDNREKIEKILTFRIPYYVGPLARGNSRFAWMTRKSEETITPWNFEEVVDKGASAQSFIERMTNFDKNLPNEKVLPKHSLLYEYFTVYNELTKVKYVTEGMRKPAFLSGEQKKAIVDLLFKTNRKVTVKQLKEDYFKKIECFDSVEISGVEDRFNASLGTYHDLLKIIKDKDFLDNEENEDILEDIVLTLTLFEDREMIEERLKTYAHLFDDKVMKQLKRRRYTGWGRLSRKLINGIRDKQSGKTILDFLKSDGFANRNFMQLIHDDSLTFKEDIQKAQVSGQGDSLHEHIANLAGSPAIKKGILQTVKVVDELVKVMGRHKPENIVIEMARENQTTQKGQKNSRERMKRIEEGIKELGSQILKEHPVENTQLQNEKLYLYYLQNGRDMYVDQELDINRLSDYDVDHIVPQSFLKDDSIDNKVLTRSDKARGKSDNVPSEEVVKKMKNYWRQLLNAKLITQRKFDNLTKAERGGLSELDKAGFIKRQLVETRQITKHVAQILDSRMNTKYDENDKLIREVKVITLKSKLVSDFRKDFQFYKVREINNYHHAHDAYLNAVVGTALIKKYPKLESEFVYGDYKVYDVRKMIAKSEQEIGKATAKYFFYSNIMNFFKTEITLANGEIRKRPLIETNGETGEIVWDKGRDFATVRKVLSMPQVNIVKKTEVQTGGFSKESILPKRNSDKLIARKKDWDPKKYGGFDSPTVAYSVLVVAKVEKGKSKKLKSVKELLGITIMERSSFEKNPIDFLEAKGYKEVKKDLIIKLPKYSLFELENGRKRMLASAGELQKGNELALPSKYVNFLYLASHYEKLKGSPEDNEQKQLFVEQHKHYLDEIIEQISEFSKRVILADANLDKVLSAYNKHRDKPIREQAENIIHLFTLTNLGAPAAFKYFDTTIDRKRYTSTKEVLDATLIHQSITGLYETRIDLSQLGGDGGGSSGSSGGTLNIEDEYRLHETSKEPDVSLGSTWLSDFPQAWAETGGMGLAVRQAPLIIPLKATSTPVSIKQYPMSQEARLGIKPHIQRLLDQGILVPCQSPWNTPLLPVKKPGTNDYRPVQDLREVNKRVEDIHPTVPNPYNLLSGLPPSHQWYTVLDLKDAFFCLRLHPTSQPLFAFEWRDPEMGISGQLTWTRLPQGFKNSPTLFNEALHRDLAGFRIQHPDLILLQYVDDLLLAATSELDCQQGTRALLQTLGDLGYRASAKKAQICQKQVKYLGYLLKEGQRWLTEARKETVMGQPIPKTPRQLREFLGKAGFCRLFIPGFAEMAAPLYPLTKPGTLFNWGPDQQKAFQEIKQALLTAPALGLPDLTKPFELFVDEKQGYAKGVLTQKLGPWRRPVAYLSKKLDPVAAGWPPCLRMVAAIAVLTKDAGKLTMGQPLVILAPHAVEALVKQPPDRWLSNARMTHYQALLLDTDRVQFGPVVALNPATLLPLPEEGLQHDCLDILAEAHGTRSDLMDQPLPDADHTWYTDGSSFLQEGQRKAGAAVTTETEVIWARALPAGTSAQRAELIALTQALKMAEGKKLNVYTDSRYAFATAHIHGEIYRRRGWLTSEGKEIKNKDEILALLKALFLPKRLSIIHCPGHQKGNSAEARGNRMADQAAREVATRETPETSTLLAGKRTADGSEFEKRTADGSEFESPKKKAKVE

SEQ ID NO: 2412 - protein, 2096 aa, synthetic construct
MPAAKRVKLDGGDKKYSIGLDIGTNSVGWAVITDEYKVPSKKFKVLGNTDRHSIKKNLIGALLFDSGETAEATRLKRTARRRYTRRKNRICYLQEIFSNEMAKVDDSFFHRLEESFLVEEDKKHERHPIFGNIVDEVAYHEKYPTIYHLRKKLVDSTDKADLRLIYLALAHMIKFRGHFLIEGDLNPDNSDVDKLFIQLVQTYNQLFEENPINASGVDAKAILSARLSKSRRLENLIAQLPGEKKNGLFGNLIALSLGLTPNFKSNFDLAEDAKLQLSKDTYDDDLDNLLAQIGDQYADLFLAAKNLSDAILLSDILRVNTEITKAPLSASMIKRYDEHHQDLTLLKALVRQQLPEKYKEIFFDQSKNGYAGYIDGGASQEEFYKFIKPILEKMDGTEELLVKLNREDLLRKQRTFDNGSIPHQIHLGELHAILRRQEDFYPFLKDNREKIEKILTFRIPYYVGPLARGNSRFAWMTRKSEETITPWNFEEVVDKGASAQSFIERMTNFDKNLPNEKVLPKHSLLYEYFTVYNELTKVKYVTEGMRKPAFLSGEQKKAIVDLLFKTNRKVTVKQLKEDYFKKIECFDSVEISGVEDRFNASLGTYHDLLKIIKDKDFLDNEENEDILEDIVLTLTLFEDREMIEERLKTYAHLFDDKVMKQLKRRRYTGWGRLSRKLINGIRDKQSGKTILDFLKSDGFANRNFMQLIHDDSLTFKEDIQKAQVSGQGDSLHEHIANLAGSPAIKKGILQTVKVVDELVKVMGRHKPENIVIEMARENQTTQKGQKNSRERMKRIEEGIKELGSQILKEHPVENTQLQNEKLYLYYLQNGRDMYVDQELDINRLSDYDVDHIVPQSFLKDDSIDNKVLTRSDKARGKSDNVPSEEVVKKMKNYWRQLLNAKLITQRKFDNLTKAERGGLSELDKAGFIKRQLVETRQITKHVAQILDSRMNTKYDENDKLIREVKVITLKSKLVSDFRKDFQFYKVREINNYHHAHDAYLNAVVGTALIKKYPKLESEFVYGDYKVYDVRKMIAKSEQEIGKATAKYFFYSNIMNFFKTEITLANGEIRKRPLIETNGETGEIVWDKGRDFATVRKVLSMPQVNIVKKTEVQTGGFSKESILPKRNSDKLIARKKDWDPKKYGGFDSPTVAYSVLVVAKVEKGKSKKLKSVKELLGITIMERSSFEKNPIDFLEAKGYKEVKKDLIIKLPKYSLFELENGRKRMLASAGELQKGNELALPSKYVNFLYLASHYEKLKGSPEDNEQKQLFVEQHKHYLDEIIEQISEFSKRVILADANLDKVLSAYNKHRDKPIREQAENIIHLFTLTNLGAPAAFKYFDTTIDRKRYTSTKEVLDATLIHQSITGLYETRIDLSQLGGDGGEAAAKGGGGSSGGTLNIEDEYRLHETSKEPDVSLGSTWLSDFPQAWAETGGMGLAVRQAPLIIPLKATSTPVSIKQYPMSQEARLGIKPHIQRLLDQGILVPCQSPWNTPLLPVKKPGTNDYRPVQDLREVNKRVEDIHPTVPNPYNLLSGLPPSHQWYTVLDLKDAFFCLRLHPTSQPLFAFEWRDPEMGISGQLTWTRLPQGFKNSPTLFNEALHRDLAGFRIQHPDLILLQYVDDLLLAATSELDCQQGTRALLQTLGDLGYRASAKKAQICQKQVKYLGYLLKEGQRWLTEARKETVMGQPIPKTPRQLREFLGKAGFCRLFIPGFAEMAAPLYPLTKPGTLFNWGPDQQKAFQEIKQALLTAPALGLPDLTKPFELFVDEKQGYAKGVLTQKLGPWRRPVAYLSKKLDPVAAGWPPCLRMVAAIAVLTKDAGKLTMGQPLVILAPHAVEALVKQPPDRWLSNARMTHYQALLLDTDRVQFGPVVALNPATLLPLPEEGLQHDCLDILAEAHGTRSDLMDQPLPDADHTWYTDGSSFLQEGQRKAGAAVTTETEVIWARALPAGTSAQRAELIALTQALKMAEGKKLNVYTDSRYAFATAHIHGEIYRRRGWLTSEGKEIKNKDEILALLKALFLPKRLSIIHCPGHQKGNSAEARGNRMADQAAREVATRETPETSTLLAGKRTADGSEFEKRTADGSEFESPKKKAKVE

SEQ ID NO: 2413 - protein, 2096 aa, synthetic construct
MPAAKRVKLDGGDKKYSIGLDIGTNSVGWAVITDEYKVPSKKFKVLGNTDRHSIKKNLIGALLFDSGETAEATRLKRTARRRYTRRKNRICYLQEIFSNEMAKVDDSFFHRLEESFLVEEDKKHERHPIFGNIVDEVAYHEKYPTIYHLRKKLVDSTDKADLRLIYLALAHMIKFRGHFLIEGDLNPDNSDVDKLFIQLVQTYNQLFEENPINASGVDAKAILSARLSKSRRLENLIAQLPGEKKNGLFGNLIALSLGLTPNFKSNFDLAEDAKLQLSKDTYDDDLDNLLAQIGDQYADLFLAAKNLSDAILLSDILRVNTEITKAPLSASMIKRYDEHHQDLTLLKALVRQQLPEKYKEIFFDQSKNGYAGYIDGGASQEEFYKFIKPILEKMDGTEELLVKLNREDLLRKQRTFDNGSIPHQIHLGELHAILRRQEDFYPFLKDNREKIEKILTFRIPYYVGPLARGNSRFAWMTRKSEETITPWNFEEVVDKGASAQSFIERMTNFDKNLPNEKVLPKHSLLYEYFTVYNELTKVKYVTEGMRKPAFLSGEQKKAIVDLLFKTNRKVTVKQLKEDYFKKIECFDSVEISGVEDRFNASLGTYHDLLKIIKDKDFLDNEENEDILEDIVLTLTLFEDREMIEERLKTYAHLFDDKVMKQLKRRRYTGWGRLSRKLINGIRDKQSGKTILDFLKSDGFANRNFMQLIHDDSLTFKEDIQKAQVSGQGDSLHEHIANLAGSPAIKKGILQTVKVVDELVKVMGRHKPENIVIEMARENQTTQKGQKNSRERMKRIEEGIKELGSQILKEHPVENTQLQNEKLYLYYLQNGRDMYVDQELDINRLSDYDVDHIVPQSFLKDDSIDNKVLTRSDKARGKSDNVPSEEVVKKMKNYWRQLLNAKLITQRKFDNLTKAERGGLSELDKAGFIKRQLVETRQITKHVAQILDSRMNTKYDENDKLIREVKVITLKSKLVSDFRKDFQFYKVREINNYHHAHDAYLNAVVGTALIKKYPKLESEFVYGDYKVYDVRKMIAKSEQEIGKATAKYFFYSNIMNFFKTEITLANGEIRKRPLIETNGETGEIVWDKGRDFATVRKVLSMPQVNIVKKTEVQTGGFSKESILPKRNSDKLIARKKDWDPKKYGGFDSPTVAYSVLVVAKVEKGKSKKLKSVKELLGITIMERSSFEKNPIDFLEAKGYKEVKKDLIIKLPKYSLFELENGRKRMLASAGELQKGNELALPSKYVNFLYLASHYEKLKGSPEDNEQKQLFVEQHKHYLDEIIEQISEFSKRVILADANLDKVLSAYNKHRDKPIREQAENIIHLFTLTNLGAPAAFKYFDTTIDRKRYTSTKEVLDATLIHQSITGLYETRIDLSQLGGDGGGGSGGGEAAAKGGTLNIEDEYRLHETSKEPDVSLGSTWLSDFPQAWAETGGMGLAVRQAPLIIPLKATSTPVSIKQYPMSQEARLGIKPHIQRLLDQGILVPCQSPWNTPLLPVKKPGTNDYRPVQDLREVNKRVEDIHPTVPNPYNLLSGLPPSHQWYTVLDLKDAFFCLRLHPTSQPLFAFEWRDPEMGISGQLTWTRLPQGFKNSPTLFNEALHRDLAGFRIQHPDLILLQYVDDLLLAATSELDCQQGTRALLQTLGDLGYRASAKKAQICQKQVKYLGYLLKEGQRWLTEARKETVMGQPIPKTPRQLREFLGKAGFCRLFIPGFAEMAAPLYPLTKPGTLFNWGPDQQKAFQEIKQALLTAPALGLPDLTKPFELFVDEKQGYAKGVLTQKLGPWRRPVAYLSKKLDPVAAGWPPCLRMVAAIAVLTKDAGKLTMGQPLVILAPHAVEALVKQPPDRWLSNARMTHYQALLLDTDRVQFGPVVALNPATLLPLPEEGLQHDCLDILAEAHGTRSDLMDQPLPDADHTWYTDGSSFLQEGQRKAGAAVTTETEVIWARALPAGTSAQRAELIALTQALKMAEGKKLNVYTDSRYAFATAHIHGEIYRRRGWLTSEGKEIKNKDEILALLKALFLPKRLSIIHCPGHQKGNSAEARGNRMADQAAREVATRETPETSTLLAGKRTADGSEFEKRTADGSEFESPKKKAKVE

SEQ ID NO: 2414 - protein, 2094 aa, synthetic construct
MPAAKRVKLDGGDKKYSIGLDIGTNSVGWAVITDEYKVPSKKFKVLGNTDRHSIKKNLIGALLFDSGETAEATRLKRTARRRYTRRKNRICYLQEIFSNEMAKVDDSFFHRLEESFLVEEDKKHERHPIFGNIVDEVAYHEKYPTIYHLRKKLVDSTDKADLRLIYLALAHMIKFRGHFLIEGDLNPDNSDVDKLFIQLVQTYNQLFEENPINASGVDAKAILSARLSKSRRLENLIAQLPGEKKNGLFGNLIALSLGLTPNFKSNFDLAEDAKLQLSKDTYDDDLDNLLAQIGDQYADLFLAAKNLSDAILLSDILRVNTEITKAPLSASMIKRYDEHHQDLTLLKALVRQQLPEKYKEIFFDQSKNGYAGYIDGGASQEEFYKFIKPILEKMDGTEELLVKLNREDLLRKQRTFDNGSIPHQIHLGELHAILRRQEDFYPFLKDNREKIEKILTFRIPYYVGPLARGNSRFAWMTRKSEETITPWNFEEVVDKGASAQSFIERMTNFDKNLPNEKVLPKHSLLYEYFTVYNELTKVKYVTEGMRKPAFLSGEQKKAIVDLLFKTNRKVTVKQLKEDYFKKIECFDSVEISGVEDRFNASLGTYHDLLKIIKDKDFLDNEENEDILEDIVLTLTLFEDREMIEERLKTYAHLFDDKVMKQLKRRRYTGWGRLSRKLINGIRDKQSGKTILDFLKSDGFANRNFMQLIHDDSLTFKEDIQKAQVSGQGDSLHEHIANLAGSPAIKKGILQTVKVVDELVKVMGRHKPENIVIEMARENQTTQKGQKNSRERMKRIEEGIKELGSQILKEHPVENTQLQNEKLYLYYLQNGRDMYVDQELDINRLSDYDVDHIVPQSFLKDDSIDNKVLTRSDKARGKSDNVPSEEVVKKMKNYWRQLLNAKLITQRKFDNLTKAERGGLSELDKAGFIKRQLVETRQITKHVAQILDSRMNTKYDENDKLIREVKVITLKSKLVSDFRKDFQFYKVREINNYHHAHDAYLNAVVGTALIKKYPKLESEFVYGDYKVYDVRKMIAKSEQEIGKATAKYFFYSNIMNFFKTEITLANGEIRKRPLIETNGETGEIVWDKGRDFATVRKVLSMPQVNIVKKTEVQTGGFSKESILPKRNSDKLIARKKDWDPKKYGGFDSPTVAYSVLVVAKVEKGKSKKLKSVKELLGITIMERSSFEKNPIDFLEAKGYKEVKKDLIIKLPKYSLFELENGRKRMLASAGELQKGNELALPSKYVNFLYLASHYEKLKGSPEDNEQKQLFVEQHKHYLDEIIEQISEFSKRVILADANLDKVLSAYNKHRDKPIREQAENIIHLFTLTNLGAPAAFKYFDTTIDRKRYTSTKEVLDATLIHQSITGLYETRIDLSQLGGDGGPAPGSSGGGGGTLNIEDEYRLHETSKEPDVSLGSTWLSDFPQAWAETGGMGLAVRQAPLIIPLKATSTPVSIKQYPMSQEARLGIKPHIQRLLDQGILVPCQSPWNTPLLPVKKPGTNDYRPVQDLREVNKRVEDIHPTVPNPYNLLSGLPPSHQWYTVLDLKDAFFCLRLHPTSQPLFAFEWRDPEMGISGQLTWTRLPQGFKNSPTLFNEALHRDLAGFRIQHPDLILLQYVDDLLLAATSELDCQQGTRALLQTLGDLGYRASAKKAQICQKQVKYLGYLLKEGQRWLTEARKETVMGQPIPKTPRQLREFLGKAGFCRLFIPGFAEMAAPLYPLTKPGTLFNWGPDQQKAFQEIKQALLTAPALGLPDLTKPFELFVDEKQGYAKGVLTQKLGPWRRPVAYLSKKLDPVAAGWPPCLRMVAAIAVLTKDAGKLTMGQPLVILAPHAVEALVKQPPDRWLSNARMTHYQALLLDTDRVQFGPVVALNPATLLPLPEEGLQHDCLDILAEAHGTRSDLMDQPLPDADHTWYTDGSSFLQEGQRKAGAAVTTETEVIWARALPAGTSAQRAELIALTQALKMAEGKKLNVYTDSRYAFATAHIHGEIYRRRGWLTSEGKEIKNKDEILALLKALFLPKRLSIIHCPGHQKGNSAEARGNRMADQAAREVATRETPETSTLLAGKRTADGSEFEKRTADGSEFESPKKKAKVE

SEQ ID NO: 2415 - protein, 2089 aa, synthetic construct
MPAAKRVKLDGGDKKYSIGLDIGTNSVGWAVITDEYKVPSKKFKVLGNTDRHSIKKNLIGALLFDSGETAEATRLKRTARRRYTRRKNRICYLQEIFSNEMAKVDDSFFHRLEESFLVEEDKKHERHPIFGNIVDEVAYHEKYPTIYHLRKKLVDSTDKADLRLIYLALAHMIKFRGHFLIEGDLNPDNSDVDKLFIQLVQTYNQLFEENPINASGVDAKAILSARLSKSRRLENLIAQLPGEKKNGLFGNLIALSLGLTPNFKSNFDLAEDAKLQLSKDTYDDDLDNLLAQIGDQYADLFLAAKNLSDAILLSDILRVNTEITKAPLSASMIKRYDEHHQDLTLLKALVRQQLPEKYKEIFFDQSKNGYAGYIDGGASQEEFYKFIKPILEKMDGTEELLVKLNREDLLRKQRTFDNGSIPHQIHLGELHAILRRQEDFYPFLKDNREKIEKILTFRIPYYVGPLARGNSRFAWMTRKSEETITPWNFEEVVDKGASAQSFIERMTNFDKNLPNEKVLPKHSLLYEYFTVYNELTKVKYVTEGMRKPAFLSGEQKKAIVDLLFKTNRKVTVKQLKEDYFKKIECFDSVEISGVEDRFNASLGTYHDLLKIIKDKDFLDNEENEDILEDIVLTLTLFEDREMIEERLKTYAHLFDDKVMKQLKRRRYTGWGRLSRKLINGIRDKQSGKTILDFLKSDGFANRNFMQLIHDDSLTFKEDIQKAQVSGQGDSLHEHIANLAGSPAIKKGILQTVKVVDELVKVMGRHKPENIVIEMARENQTTQKGQKNSRERMKRIEEGIKELGSQILKEHPVENTQLQNEKLYLYYLQNGRDMYVDQELDINRLSDYDVDHIVPQSFLKDDSIDNKVLTRSDKARGKSDNVPSEEVVKKMKNYWRQLLNAKLITQRKFDNLTKAERGGLSELDKAGFIKRQLVETRQITKHVAQILDSRMNTKYDENDKLIREVKVITLKSKLVSDFRKDFQFYKVREINNYHHAHDAYLNAVVGTALIKKYPKLESEFVYGDYKVYDVRKMIAKSEQEIGKATAKYFFYSNIMNFFKTEITLANGEIRKRPLIETNGETGEIVWDKGRDFATVRKVLSMPQVNIVKKTEVQTGGFSKESILPKRNSDKLIARKKDWDPKKYGGFDSPTVAYSVLVVAKVEKGKSKKLKSVKELLGITIMERSSFEKNPIDFLEAKGYKEVKKDLIIKLPKYSLFELENGRKRMLASAGELQKGNELALPSKYVNFLYLASHYEKLKGSPEDNEQKQLFVEQHKHYLDEIIEQISEFSKRVILADANLDKVLSAYNKHRDKPIREQAENIIHLFTLTNLGAPAAFKYFDTTIDRKRYTSTKEVLDATLIHQSITGLYETRIDLSQLGGDGGGGGGGGTLNIEDEYRLHETSKEPDVSLGSTWLSDFPQAWAETGGMGLAVRQAPLIIPLKATSTPVSIKQYPMSQEARLGIKPHIQRLLDQGILVPCQSPWNTPLLPVKKPGTNDYRPVQDLREVNKRVEDIHPTVPNPYNLLSGLPPSHQWYTVLDLKDAFFCLRLHPTSQPLFAFEWRDPEMGISGQLTWTRLPQGFKNSPTLFNEALHRDLAGFRIQHPDLILLQYVDDLLLAATSELDCQQGTRALLQTLGDLGYRASAKKAQICQKQVKYLGYLLKEGQRWLTEARKETVMGQPIPKTPRQLREFLGKAGFCRLFIPGFAEMAAPLYPLTKPGTLFNWGPDQQKAFQEIKQALLTAPALGLPDLTKPFELFVDEKQGYAKGVLTQKLGPWRRPVAYLSKKLDPVAAGWPPCLRMVAAIAVLTKDAGKLTMGQPLVILAPHAVEALVKQPPDRWLSNARMTHYQALLLDTDRVQFGPVVALNPATLLPLPEEGLQHDCLDILAEAHGTRSDLMDQPLPDADHTWYTDGSSFLQEGQRKAGAAVTTETEVIWARALPAGTSAQRAELIALTQALKMAEGKKLNVYTDSRYAFATAHIHGEIYRRRGWLTSEGKEIKNKDEILALLKALFLPKRLSIIHCPGHQKGNSAEARGNRMADQAAREVATRETPETSTLLAGKRTADGSEFEKRTADGSEFESPKKKAKVE

SEQ ID NO: 2416 - protein, 2094 aa, synthetic construct
MPAAKRVKLDGGDKKYSIGLDIGTNSVGWAVITDEYKVPSKKFKVLGNTDRHSIKKNLIGALLFDSGETAEATRLKRTARRRYTRRKNRICYLQEIFSNEMAKVDDSFFHRLEESFLVEEDKKHERHPIFGNIVDEVAYHEKYPTIYHLRKKLVDSTDKADLRLIYLALAHMIKFRGHFLIEGDLNPDNSDVDKLFIQLVQTYNQLFEENPINASGVDAKAILSARLSKSRRLENLIAQLPGEKKNGLFGNLIALSLGLTPNFKSNFDLAEDAKLQLSKDTYDDDLDNLLAQIGDQYADLFLAAKNLSDAILLSDILRVNTEITKAPLSASMIKRYDEHHQDLTLLKALVRQQLPEKYKEIFFDQSKNGYAGYIDGGASQEEFYKFIKPILEKMDGTEELLVKLNREDLLRKQRTFDNGSIPHQIHLGELHAILRRQEDFYPFLKDNREKIEKILTFRIPYYVGPLARGNSRFAWMTRKSEETITPWNFEEVVDKGASAQSFIERMTNFDKNLPNEKVLPKHSLLYEYFTVYNELTKVKYVTEGMRKPAFLSGEQKKAIVDLLFKTNRKVTVKQLKEDYFKKIECFDSVEISGVEDRFNASLGTYHDLLKIIKDKDFLDNEENEDILEDIVLTLTLFEDREMIEERLKTYAHLFDDKVMKQLKRRRYTGWGRLSRKLINGIRDKQSGKTILDFLKSDGFANRNFMQLIHDDSLTFKEDIQKAQVSGQGDSLHEHIANLAGSPAIKKGILQTVKVVDELVKVMGRHKPENIVIEMARENQTTQKGQKNSRERMKRIEEGIKELGSQILKEHPVENTQLQNEKLYLYYLQNGRDMYVDQELDINRLSDYDVDHIVPQSFLKDDSIDNKVLTRSDKARGKSDNVPSEEVVKKMKNYWRQLLNAKLITQRKFDNLTKAERGGLSELDKAGFIKRQLVETRQITKHVAQILDSRMNTKYDENDKLIREVKVITLKSKLVSDFRKDFQFYKVREINNYHHAHDAYLNAVVGTALIKKYPKLESEFVYGDYKVYDVRKMIAKSEQEIGKATAKYFFYSNIMNFFKTEITLANGEIRKRPLIETNGETGEIVWDKGRDFATVRKVLSMPQVNIVKKTEVQTGGFSKESILPKRNSDKLIARKKDWDPKKYGGFDSPTVAYSVLVVAKVEKGKSKKLKSVKELLGITIMERSSFEKNPIDFLEAKGYKEVKKDLIIKLPKYSLFELENGRKRMLASAGELQKGNELALPSKYVNFLYLASHYEKLKGSPEDNEQKQLFVEQHKHYLDEIIEQISEFSKRVILADANLDKVLSAYNKHRDKPIREQAENIIHLFTLTNLGAPAAFKYFDTTIDRKRYTSTKEVLDATLIHQSITGLYETRIDLSQLGGDGGGGGGGSPAPGGTLNIEDEYRLHETSKEPDVSLGSTWLSDFPQAWAETGGMGLAVRQAPLIIPLKATSTPVSIKQYPMSQEARLGIKPHIQRLLDQGILVPCQSPWNTPLLPVKKPGTNDYRPVQDLREVNKRVEDIHPTVPNPYNLLSGLPPSHQWYTVLDLKDAFFCLRLHPTSQPLFAFEWRDPEMGISGQLTWTRLPQGFKNSPTLFNEALHRDLAGFRIQHPDLILLQYVDDLLLAATSELDCQQGTRALLQTLGDLGYRASAKKAQICQKQVKYLGYLLKEGQRWLTEARKETVMGQPIPKTPRQLREFLGKAGFCRLFIPGFAEMAAPLYPLTKPGTLFNWGPDQQKAFQEIKQALLTAPALGLPDLTKPFELFVDEKQGYAKGVLTQKLGPWRRPVAYLSKKLDPVAAGWPPCLRMVAAIAVLTKDAGKLTMGQPLVILAPHAVEALVKQPPDRWLSNARMTHYQALLLDTDRVQFGPVVALNPATLLPLPEEGLQHDCLDILAEAHGTRSDLMDQPLPDADHTWYTDGSSFLQEGQRKAGAAVTTETEVIWARALPAGTSAQRAELIALTQALKMAEGKKLNVYTDSRYAFATAHIHGEIYRRRGWLTSEGKEIKNKDEILALLKALFLPKRLSIIHCPGHQKGNSAEARGNRMADQAAREVATRETPETSTLLAGKRTADGSEFEKRTADGSEFESPKKKAKVE

SEQ ID NO: 2417 - protein, 2100 aa, synthetic construct
MPAAKRVKLDGGDKKYSIGLDIGTNSVGWAVITDEYKVPSKKFKVLGNTDRHSIKKNLIGALLFDSGETAEATRLKRTARRRYTRRKNRICYLQEIFSNEMAKVDDSFFHRLEESFLVEEDKKHERHPIFGNIVDEVAYHEKYPTIYHLRKKLVDSTDKADLRLIYLALAHMIKFRGHFLIEGDLNPDNSDVDKLFIQLVQTYNQLFEENPINASGVDAKAILSARLSKSRRLENLIAQLPGEKKNGLFGNLIALSLGLTPNFKSNFDLAEDAKLQLSKDTYDDDLDNLLAQIGDQYADLFLAAKNLSDAILLSDILRVNTEITKAPLSASMIKRYDEHHQDLTLLKALVRQQLPEKYKEIFFDQSKNGYAGYIDGGASQEEFYKFIKPILEKMDGTEELLVKLNREDLLRKQRTFDNGSIPHQIHLGELHAILRRQEDFYPFLKDNREKIEKILTFRIPYYVGPLARGNSRFAWMTRKSEETITPWNFEEVVDKGASAQSFIERMTNFDKNLPNEKVLPKHSLLYEYFTVYNELTKVKYVTEGMRKPAFLSGEQKKAIVDLLFKTNRKVTVKQLKEDYFKKIECFDSVEISGVEDRFNASLGTYHDLLKIIKDKDFLDNEENEDILEDIVLTLTLFEDREMIEERLKTYAHLFDDKVMKQLKRRRYTGWGRLSRKLINGIRDKQSGKTILDFLKSDGFANRNFMQLIHDDSLTFKEDIQKAQVSGQGDSLHEHIANLAGSPAIKKGILQTVKVVDELVKVMGRHKPENIVIEMARENQTTQKGQKNSRERMKRIEEGIKELGSQILKEHPVENTQLQNEKLYLYYLQNGRDMYVDQELDINRLSDYDVDHIVPQSFLKDDSIDNKVLTRSDKARGKSDNVPSEEVVKKMKNYWRQLLNAKLITQRKFDNLTKAERGGLSELDKAGFIKRQLVETRQITKHVAQILDSRMNTKYDENDKLIREVKVITLKSKLVSDFRKDFQFYKVREINNYHHAHDAYLNAVVGTALIKKYPKLESEFVYGDYKVYDVRKMIAKSEQEIGKATAKYFFYSNIMNFFKTEITLANGEIRKRPLIETNGETGEIVWDKGRDFATVRKVLSMPQVNIVKKTEVQTGGFSKESILPKRNSDKLIARKKDWDPKKYGGFDSPTVAYSVLVVAKVEKGKSKKLKSVKELLGITIMERSSFEKNPIDFLEAKGYKEVKKDLIIKLPKYSLFELENGRKRMLASAGELQKGNELALPSKYVNFLYLASHYEKLKGSPEDNEQKQLFVEQHKHYLDEIIEQISEFSKRVILADANLDKVLSAYNKHRDKPIREQAENIIHLFTLTNLGAPAAFKYFDTTIDRKRYTSTKEVLDATLIHQSITGLYETRIDLSQLGGDGGGGSGGSGGSGGSGGSGGTLNIEDEYRLHETSKGPDVPLGSTWLSDFPQAWAETGGMGLAFRQAPLIISLKATSTPVSIKQYPMSQEARLGIKPHIQRLLDQGILVPCQSPWNTPLLPVKKPGTNDYRPVQDLREVNKRVEDIHPTVPNPYNLLSGLPPSHQWYTVLDLKDAFFCLRLHPTSQSLFAFEWKDPEMGISGQLTWTRLPQGFKNSPTLFDEALHRDLADFRIQHPDLILLQYVDDLLLAATSELDCQQGTRALLQTLGDLGYRASAKKAQICQKQVKYLGYLLKEGQRWLTEARKETVMGQPTPKTPRQLREFLGTAGLCRLWIPGFAEMAAPLYPLTKTGTLFKWGPDQQKAYQEIKQALLTAPALGLPDLTKPFELFVDEKQGYAKGVLTQKLGPWRRPVAYLSKKLDPVAAGWPPCLRMVAAIAVLTKDVGKLTMGQPLVILAPHAVEALVKQPPDRWLSNARMTHYQALLLDTDRVQFGPIVALNPATLLPLPEEGLQHDCLDILAEAHGTRPDLTDQPLPDADHTWYTDGSSFLQEGQRRAGAAVTTETEVIWAKALPAGTSAQRAELIALTQALKMAAGKKLNVYTDSRYAFATAHIHGEIYRRRGLLTSEGKEIKNKDEILALLKALFLPKRLSIIHCPGHQKGNHAEARGNRMADQAAREVATRETPETSTLLAGKRTADGSEFEKRTADGSEFESPKKKAKVE

SEQ ID NO: 2418 - protein, 2096 aa, synthetic construct
MPAAKRVKLDGGDKKYSIGLDIGTNSVGWAVITDEYKVPSKKFKVLGNTDRHSIKKNLIGALLFDSGETAEATRLKRTARRRYTRRKNRICYLQEIFSNEMAKVDDSFFHRLEESFLVEEDKKHERHPIFGNIVDEVAYHEKYPTIYHLRKKLVDSTDKADLRLIYLALAHMIKFRGHFLIEGDLNPDNSDVDKLFIQLVQTYNQLFEENPINASGVDAKAILSARLSKSRRLENLIAQLPGEKKNGLFGNLIALSLGLTPNFKSNFDLAEDAKLQLSKDTYDDDLDNLLAQIGDQYADLFLAAKNLSDAILLSDILRVNTEITKAPLSASMIKRYDEHHQDLTLLKALVRQQLPEKYKEIFFDQSKNGYAGYIDGGASQEEFYKFIKPILEKMDGTEELLVKLNREDLLRKQRTFDNGSIPHQIHLGELHAILRRQEDFYPFLKDNREKIEKILTFRIPYYVGPLARGNSRFAWMTRKSEETITPWNFEEVVDKGASAQSFIERMTNFDKNLPNEKVLPKHSLLYEYFTVYNELTKVKYVTEGMRKPAFLSGEQKKAIVDLLFKTNRKVTVKQLKEDYFKKIECFDSVEISGVEDRFNASLGTYHDLLKIIKDKDFLDNEENEDILEDIVLTLTLFEDREMIEERLKTYAHLFDDKVMKQLKRRRYTGWGRLSRKLINGIRDKQSGKTILDFLKSDGFANRNFMQLIHDDSLTFKEDIQKAQVSGQGDSLHEHIANLAGSPAIKKGILQTVKVVDELVKVMGRHKPENIVIEMARENQTTQKGQKNSRERMKRIEEGIKELGSQILKEHPVENTQLQNEKLYLYYLQNGRDMYVDQELDINRLSDYDVDHIVPQSFLKDDSIDNKVLTRSDKARGKSDNVPSEEVVKKMKNYWRQLLNAKLITQRKFDNLTKAERGGLSELDKAGFIKRQLVETRQITKHVAQILDSRMNTKYDENDKLIREVKVITLKSKLVSDFRKDFQFYKVREINNYHHAHDAYLNAVVGTALIKKYPKLESEFVYGDYKVYDVRKMIAKSEQEIGKATAKYFFYSNIMNFFKTEITLANGEIRKRPLIETNGETGEIVWDKGRDFATVRKVLSMPQVNIVKKTEVQTGGFSKESILPKRNSDKLIARKKDWDPKKYGGFDSPTVAYSVLVVAKVEKGKSKKLKSVKELLGITIMERSSFEKNPIDFLEAKGYKEVKKDLIIKLPKYSLFELENGRKRMLASAGELQKGNELALPSKYVNFLYLASHYEKLKGSPEDNEQKQLFVEQHKHYLDEIIEQISEFSKRVILADANLDKVLSAYNKHRDKPIREQAENIIHLFTLTNLGAPAAFKYFDTTIDRKRYTSTKEVLDATLIHQSITGLYETRIDLSQLGGDGGEAAAKGGGPAPGGTLNIEDEYRLHETSKGPDVPLGSTWLSDFPQAWAETGGMGLAFRQAPLIISLKATSTPVSIKQYPMSQEARLGIKPHIQRLLDQGILVPCQSPWNTPLLPVKKPGTNDYRPVQDLREVNKRVEDIHPTVPNPYNLLSGLPPSHQWYTVLDLKDAFFCLRLHPTSQSLFAFEWKDPEMGISGQLTWTRLPQGFKNSPTLFDEALHRDLADFRIQHPDLILLQYVDDLLLAATSELDCQQGTRALLQTLGDLGYRASAKKAQICQKQVKYLGYLLKEGQRWLTEARKETVMGQPTPKTPRQLREFLGTAGLCRLWIPGFAEMAAPLYPLTKTGTLFKWGPDQQKAYQEIKQALLTAPALGLPDLTKPFELFVDEKQGYAKGVLTQKLGPWRRPVAYLSKKLDPVAAGWPPCLRMVAAIAVLTKDVGKLTMGQPLVILAPHAVEALVKQPPDRWLSNARMTHYQALLLDTDRVQFGPIVALNPATLLPLPEEGLQHDCLDILAEAHGTRPDLTDQPLPDADHTWYTDGSSFLQEGQRRAGAAVTTETEVIWAKALPAGTSAQRAELIALTQALKMAAGKKLNVYTDSRYAFATAHIHGEIYRRRGLLTSEGKEIKNKDEILALLKALFLPKRLSIIHCPGHQKGNHAEARGNRMADQAAREVATRETPETSTLLAGKRTADGSEFEKRTADGSEFESPKKKAKVE

SEQ ID NO: 2419 - protein, 2094 aa, synthetic construct
MPAAKRVKLDGGDKKYSIGLDIGTNSVGWAVITDEYKVPSKKFKVLGNTDRHSIKKNLIGALLFDSGETAEATRLKRTARRRYTRRKNRICYLQEIFSNEMAKVDDSFFHRLEESFLVEEDKKHERHPIFGNIVDEVAYHEKYPTIYHLRKKLVDSTDKADLRLIYLALAHMIKFRGHFLIEGDLNPDNSDVDKLFIQLVQTYNQLFEENPINASGVDAKAILSARLSKSRRLENLIAQLPGEKKNGLFGNLIALSLGLTPNFKSNFDLAEDAKLQLSKDTYDDDLDNLLAQIGDQYADLFLAAKNLSDAILLSDILRVNTEITKAPLSASMIKRYDEHHQDLTLLKALVRQQLPEKYKEIFFDQSKNGYAGYIDGGASQEEFYKFIKPILEKMDGTEELLVKLNREDLLRKQRTFDNGSIPHQIHLGELHAILRRQEDFYPFLKDNREKIEKILTFRIPYYVGPLARGNSRFAWMTRKSEETITPWNFEEVVDKGASAQSFIERMTNFDKNLPNEKVLPKHSLLYEYFTVYNELTKVKYVTEGMRKPAFLSGEQKKAIVDLLFKTNRKVTVKQLKEDYFKKIECFDSVEISGVEDRFNASLGTYHDLLKIIKDKDFLDNEENEDILEDIVLTLTLFEDREMIEERLKTYAHLFDDKVMKQLKRRRYTGWGRLSRKLINGIRDKQSGKTILDFLKSDGFANRNFMQLIHDDSLTFKEDIQKAQVSGQGDSLHEHIANLAGSPAIKKGILQTVKVVDELVKVMGRHKPENIVIEMARENQTTQKGQKNSRERMKRIEEGIKELGSQILKEHPVENTQLQNEKLYLYYLQNGRDMYVDQELDINRLSDYDVDHIVPQSFLKDDSIDNKVLTRSDKARGKSDNVPSEEVVKKMKNYWRQLLNAKLITQRKFDNLTKAERGGLSELDKAGFIKRQLVETRQITKHVAQILDSRMNTKYDENDKLIREVKVITLKSKLVSDFRKDFQFYKVREINNYHHAHDAYLNAVVGTALIKKYPKLESEFVYGDYKVYDVRKMIAKSEQEIGKATAKYFFYSNIMNFFKTEITLANGEIRKRPLIETNGETGEIVWDKGRDFATVRKVLSMPQVNIVKKTEVQTGGFSKESILPKRNSDKLIARKKDWDPKKYGGFDSPTVAYSVLVVAKVEKGKSKKLKSVKELLGITIMERSSFEKNPIDFLEAKGYKEVKKDLIIKLPKYSLFELENGRKRMLASAGELQKGNELALPSKYVNFLYLASHYEKLKGSPEDNEQKQLFVEQHKHYLDEIIEQISEFSKRVILADANLDKVLSAYNKHRDKPIREQAENIIHLFTLTNLGAPAAFKYFDTTIDRKRYTSTKEVLDATLIHQSITGLYETRIDLSQLGGDGGGSSGGSGGGGGTLNIEDEYRLHETSKGPDVPLGSTWLSDFPQAWAETGGMGLAFRQAPLIISLKATSTPVSIKQYPMSQEARLGIKPHIQRLLDQGILVPCQSPWNTPLLPVKKPGTNDYRPVQDLREVNKRVEDIHPTVPNPYNLLSGLPPSHQWYTVLDLKDAFFCLRLHPTSQSLFAFEWKDPEMGISGQLTWTRLPQGFKNSPTLFDEALHRDLADFRIQHPDLILLQYVDDLLLAATSELDCQQGTRALLQTLGDLGYRASAKKAQICQKQVKYLGYLLKEGQRWLTEARKETVMGQPTPKTPRQLREFLGTAGLCRLWIPGFAEMAAPLYPLTKTGTLFKWGPDQQKAYQEIKQALLTAPALGLPDLTKPFELFVDEKQGYAKGVLTQKLGPWRRPVAYLSKKLDPVAAGWPPCLRMVAAIAVLTKDVGKLTMGQPLVILAPHAVEALVKQPPDRWLSNARMTHYQALLLDTDRVQFGPIVALNPATLLPLPEEGLQHDCLDILAEAHGTRPDLTDQPLPDADHTWYTDGSSFLQEGQRRAGAAVTTETEVIWAKALPAGTSAQRAELIALTQALKMAAGKKLNVYTDSRYAFATAHIHGEIYRRRGLLTSEGKEIKNKDEILALLKALFLPKRLSIIHCPGHQKGNHAEARGNRMADQAAREVATRETPETSTLLAGKRTADGSEFEKRTADGSEFESPKKKAKVE

SEQ ID NO: 2420 - protein, 2096 aa, synthetic construct
MPAAKRVKLDGGDKKYSIGLDIGTNSVGWAVITDEYKVPSKKFKVLGNTDRHSIKKNLIGALLFDSGETAEATRLKRTARRRYTRRKNRICYLQEIFSNEMAKVDDSFFHRLEESFLVEEDKKHERHPIFGNIVDEVAYHEKYPTIYHLRKKLVDSTDKADLRLIYLALAHMIKFRGHFLIEGDLNPDNSDVDKLFIQLVQTYNQLFEENPINASGVDAKAILSARLSKSRRLENLIAQLPGEKKNGLFGNLIALSLGLTPNFKSNFDLAEDAKLQLSKDTYDDDLDNLLAQIGDQYADLFLAAKNLSDAILLSDILRVNTEITKAPLSASMIKRYDEHHQDLTLLKALVRQQLPEKYKEIFFDQSKNGYAGYIDGGASQEEFYKFIKPILEKMDGTEELLVKLNREDLLRKQRTFDNGSIPHQIHLGELHAILRRQEDFYPFLKDNREKIEKILTFRIPYYVGPLARGNSRFAWMTRKSEETITPWNFEEVVDKGASAQSFIERMTNFDKNLPNEKVLPKHSLLYEYFTVYNELTKVKYVTEGMRKPAFLSGEQKKAIVDLLFKTNRKVTVKQLKEDYFKKIECFDSVEISGVEDRFNASLGTYHDLLKIIKDKDFLDNEENEDILEDIVLTLTLFEDREMIEERLKTYAHLFDDKVMKQLKRRRYTGWGRLSRKLINGIRDKQSGKTILDFLKSDGFANRNFMQLIHDDSLTFKEDIQKAQVSGQGDSLHEHIANLAGSPAIKKGILQTVKVVDELVKVMGRHKPENIVIEMARENQTTQKGQKNSRERMKRIEEGIKELGSQILKEHPVENTQLQNEKLYLYYLQNGRDMYVDQELDINRLSDYDVDHIVPQSFLKDDSIDNKVLTRSDKARGKSDNVPSEEVVKKMKNYWRQLLNAKLITQRKFDNLTKAERGGLSELDKAGFIKRQLVETRQITKHVAQILDSRMNTKYDENDKLIREVKVITLKSKLVSDFRKDFQFYKVREINNYHHAHDAYLNAVVGTALIKKYPKLESEFVYGDYKVYDVRKMIAKSEQEIGKATAKYFFYSNIMNFFKTEITLANGEIRKRPLIETNGETGEIVWDKGRDFATVRKVLSMPQVNIVKKTEVQTGGFSKESILPKRNSDKLIARKKDWDPKKYGGFDSPTVAYSVLVVAKVEKGKSKKLKSVKELLGITIMERSSFEKNPIDFLEAKGYKEVKKDLIIKLPKYSLFELENGRKRMLASAGELQKGNELALPSKYVNFLYLASHYEKLKGSPEDNEQKQLFVEQHKHYLDEIIEQISEFSKRVILADANLDKVLSAYNKHRDKPIREQAENIIHLFTLTNLGAPAAFKYFDTTIDRKRYTSTKEVLDATLIHQSITGLYETRIDLSQLGGDGGPAPEAAAKGGGGGTLNIEDEYRLHETSKGPDVPLGSTWLSDFPQAWAETGGMGLAFRQAPLIISLKATSTPVSIKQYPMSQEARLGIKPHIQRLLDQGILVPCQSPWNTPLLPVKKPGTNDYRPVQDLREVNKRVEDIHPTVPNPYNLLSGLPPSHQWYTVLDLKDAFFCLRLHPTSQSLFAFEWKDPEMGISGQLTWTRLPQGFKNSPTLFDEALHRDLADFRIQHPDLILLQYVDDLLLAATSELDCQQGTRALLQTLGDLGYRASAKKAQICQKQVKYLGYLLKEGQRWLTEARKETVMGQPTPKTPRQLREFLGTAGLCRLWIPGFAEMAAPLYPLTKTGTLFKWGPDQQKAYQEIKQALLTAPALGLPDLTKPFELFVDEKQGYAKGVLTQKLGPWRRPVAYLSKKLDPVAAGWPPCLRMVAAIAVLTKDVGKLTMGQPLVILAPHAVEALVKQPPDRWLSNARMTHYQALLLDTDRVQFGPIVALNPATLLPLPEEGLQHDCLDILAEAHGTRPDLTDQPLPDADHTWYTDGSSFLQEGQRRAGAAVTTETEVIWAKALPAGTSAQRAELIALTQALKMAAGKKLNVYTDSRYAFATAHIHGEIYRRRGLLTSEGKEIKNKDEILALLKALFLPKRLSIIHCPGHQKGNHAEARGNRMADQAAREVATRETPETSTLLAGKRTADGSEFEKRTADGSEFESPKKKAKVE

SEQ ID NO: 2421 - protein, 2008 aa, synthetic construct
MPAAKRVKLDGGDKKYSIGLDIGTNSVGWAVITDEYKVPSKKFKVLGNTDRHSIKKNLIGALLFDSGETAEATRLKRTARRRYTRRKNRICYLQEIFSNEMAKVDDSFFHRLEESFLVEEDKKHERHPIFGNIVDEVAYHEKYPTIYHLRKKLVDSTDKADLRLIYLALAHMIKFRGHFLIEGDLNPDNSDVDKLFIQLVQTYNQLFEENPINASGVDAKAILSARLSKSRRLENLIAQLPGEKKNGLFGNLIALSLGLTPNFKSNFDLAEDAKLQLSKDTYDDDLDNLLAQIGDQYADLFLAAKNLSDAILLSDILRVNTEITKAPLSASMIKRYDEHHQDLTLLKALVRQQLPEKYKEIFFDQSKNGYAGYIDGGASQEEFYKFIKPILEKMDGTEELLVKLNREDLLRKQRTFDNGSIPHQIHLGELHAILRRQEDFYPFLKDNREKIEKILTFRIPYYVGPLARGNSRFAWMTRKSEETITPWNFEEVVDKGASAQSFIERMTNFDKNLPNEKVLPKHSLLYEYFTVYNELTKVKYVTEGMRKPAFLSGEQKKAIVDLLFKTNRKVTVKQLKEDYFKKIECFDSVEISGVEDRFNASLGTYHDLLKIIKDKDFLDNEENEDILEDIVLTLTLFEDREMIEERLKTYAHLFDDKVMKQLKRRRYTGWGRLSRKLINGIRDKQSGKTILDFLKSDGFANRNFMQLIHDDSLTFKEDIQKAQVSGQGDSLHEHIANLAGSPAIKKGILQTVKVVDELVKVMGRHKPENIVIEMARENQTTQKGQKNSRERMKRIEEGIKELGSQILKEHPVENTQLQNEKLYLYYLQNGRDMYVDQELDINRLSDYDVDHIVPQSFLKDDSIDNKVLTRSDKARGKSDNVPSEEVVKKMKNYWRQLLNAKLITQRKFDNLTKAERGGLSELDKAGFIKRQLVETRQITKHVAQILDSRMNTKYDENDKLIREVKVITLKSKLVSDFRKDFQFYKVREINNYHHAHDAYLNAVVGTALIKKYPKLESEFVYGDYKVYDVRKMIAKSEQEIGKATAKYFFYSNIMNFFKTEITLANGEIRKRPLIETNGETGEIVWDKGRDFATVRKVLSMPQVNIVKKTEVQTGGFSKESILPKRNSDKLIARKKDWDPKKYGGFDSPTVAYSVLVVAKVEKGKSKKLKSVKELLGITIMERSSFEKNPIDFLEAKGYKEVKKDLIIKLPKYSLFELENGRKRMLASAGELQKGNELALPSKYVNFLYLASHYEKLKGSPEDNEQKQLFVEQHKHYLDEIIEQISEFSKRVILADANLDKVLSAYNKHRDKPIREQAENIIHLFTLTNLGAPAAFKYFDTTIDRKRYTSTKEVLDATLIHQSITGLYETRIDLSQLGGDGGGGSGGSGGSGGSGGSGGSGGGVLDAPPSHIGLEHLPPPPEVPQFPLNLERLQALQDLVHRSLEAGYISPWDGPGNNPVFPVRKPNGAWRFVHDLRVTNALTKPIPALSPGPPDLTAIPTHLPHIICLDLKDAFFQIPVEDRFRSYFAFTLPTPGGLQPHRRFAWRVLPQGFINSPALFERALQEPLRQVSAAFSQSLLVSYMDDILYVSPTEEQRLQCYQTMAAHLRDLGFQVASEKTRQTPSPVPFLGQMVHERMVTYQSLPTLQISSPISLHQLQTVLGDLQWVSRGTPTTRRPLQLLYSSLKGIDDPRAIIHLSPEQQQGIAELRQALSHNARSRYNEQEPLLAYVHLTRAGSTLVLFQKGAQFPLAYFQTPLTDNQASPWGLLLLLGCQYLQAQALSSYAKTILKYYHNLPKTSLDNWIQSSEDPRVQELLQLWPQISSQGIQPPGPWKTLVTRAEVFLTPQFSPEPIPAALCLFSDGAARRGAYCLWKDHLLDFQAVPAPESAQKGELAGLLAGLAAAPPEPLNIWVDSKYLYSLLRTLVLGAWLQPDPVPSYALLYKSLLRHPAIFVGHVRSHSSASHPIASLNNYVDQLAGKRTADGSEFEKRTADGSEFESPKKKAKVE

SEQ ID NO: 2422 - protein, 2093 aa, synthetic construct
MPAAKRVKLDGGDKKYSIGLDIGTNSVGWAVITDEYKVPSKKFKVLGNTDRHSIKKNLIGALLFDSGETAEATRLKRTARRRYTRRKNRICYLQEIFSNEMAKVDDSFFHRLEESFLVEEDKKHERHPIFGNIVDEVAYHEKYPTIYHLRKKLVDSTDKADLRLIYLALAHMIKFRGHFLIEGDLNPDNSDVDKLFIQLVQTYNQLFEENPINASGVDAKAILSARLSKSRRLENLIAQLPGEKKNGLFGNLIALSLGLTPNFKSNFDLAEDAKLQLSKDTYDDDLDNLLAQIGDQYADLFLAAKNLSDAILLSDILRVNTEITKAPLSASMIKRYDEHHQDLTLLKALVRQQLPEKYKEIFFDQSKNGYAGYIDGGASQEEFYKFIKPILEKMDGTEELLVKLNREDLLRKQRTFDNGSIPHQIHLGELHAILRRQEDFYPFLKDNREKIEKILTFRIPYYVGPLARGNSRFAWMTRKSEETITPWNFEEVVDKGASAQSFIERMTNFDKNLPNEKVLPKHSLLYEYFTVYNELTKVKYVTEGMRKPAFLSGEQKKAIVDLLFKTNRKVTVKQLKEDYFKKIECFDSVEISGVEDRFNASLGTYHDLLKIIKDKDFLDNEENEDILEDIVLTLTLFEDREMIEERLKTYAHLFDDKVMKQLKRRRYTGWGRLSRKLINGIRDKQSGKTILDFLKSDGFANRNFMQLIHDDSLTFKEDIQKAQVSGQGDSLHEHIANLAGSPAIKKGILQTVKVVDELVKVMGRHKPENIVIEMARENQTTQKGQKNSRERMKRIEEGIKELGSQILKEHPVENTQLQNEKLYLYYLQNGRDMYVDQELDINRLSDYDVDHIVPQSFLKDDSIDNKVLTRSDKARGKSDNVPSEEVVKKMKNYWRQLLNAKLITQRKFDNLTKAERGGLSELDKAGFIKRQLVETRQITKHVAQILDSRMNTKYDENDKLIREVKVITLKSKLVSDFRKDFQFYKVREINNYHHAHDAYLNAVVGTALIKKYPKLESEFVYGDYKVYDVRKMIAKSEQEIGKATAKYFFYSNIMNFFKTEITLANGEIRKRPLIETNGETGEIVWDKGRDFATVRKVLSMPQVNIVKKTEVQTGGFSKESILPKRNSDKLIARKKDWDPKKYGGFDSPTVAYSVLVVAKVEKGKSKKLKSVKELLGITIMERSSFEKNPIDFLEAKGYKEVKKDLIIKLPKYSLFELENGRKRMLASAGELQKGNELALPSKYVNFLYLASHYEKLKGSPEDNEQKQLFVEQHKHYLDEIIEQISEFSKRVILADANLDKVLSAYNKHRDKPIREQAENIIHLFTLTNLGAPAAFKYFDTTIDRKRYTSTKEVLDATLIHQSITGLYETRIDLSQLGGDGGEAAAKPAPGGTLNIEDEYRLHETSKGPDVPLGSTWLSDFPQAWAETGGMGLAFRQAPLIISLKATSTPVSIKQYPMSQEARLGIKPHIQRLLDQGILVPCQSPWNTPLLPVKKPGTNDYRPVQDLREVNKRVEDIHPTVPNPYNLLSGLPPSHQWYTVLDLKDAFFCLRLHPTSQSLFAFEWKDPEMGISGQLTWTRLPQGFKNSPTLFNEALHRDLADFRIQHPDLILLQYVDDLLLAATSELDCQQGTRALLQTLGDLGYRASAKKAQICQKQVKYLGYLLKEGQRWLTEARKETVMGQPTPKTPRQLREFLGTAGLCRLWIPGFAEMAAPLYPLTKPGTLFKWGPDQQKAYQEIKQALLTAPALGLPDLTKPFELFVDEKQGYAKGVLTQKLGPWRRPVAYLSKKLDPVAAGWPPCLRMVAAIAVLTKDVGKLTMGQPLVILAPHAVEALVKQPPDRWLSNARMTHYQALLLDTDRVQFGPIVALNPATLLPLPEEGLQHDCLDILAEAHGTRPDLTDQPLPDADHTWYTDGSSFLQEGQRRAGAAVTTETEVIWAKALPAGTSAQRAELIALTQALKMAAGKKLNVYTDSRYAFATAHIHGEIYRRRGWLTSEGKEIKNKDEILALLKALFLPKRLSIIHCPGHQKGNHAEARGNRMADQAAREVATRETPETSTLLAGKRTADGSEFEKRTADGSEFESPKKKAKVE

SEQ ID NO: 2423 - protein, 2096 aa, synthetic construct
MPAAKRVKLDGGDKKYSIGLDIGTNSVGWAVITDEYKVPSKKFKVLGNTDRHSIKKNLIGALLFDSGETAEATRLKRTARRRYTRRKNRICYLQEIFSNEMAKVDDSFFHRLEESFLVEEDKKHERHPIFGNIVDEVAYHEKYPTIYHLRKKLVDSTDKADLRLIYLALAHMIKFRGHFLIEGDLNPDNSDVDKLFIQLVQTYNQLFEENPINASGVDAKAILSARLSKSRRLENLIAQLPGEKKNGLFGNLIALSLGLTPNFKSNFDLAEDAKLQLSKDTYDDDLDNLLAQIGDQYADLFLAAKNLSDAILLSDILRVNTEITKAPLSASMIKRYDEHHQDLTLLKALVRQQLPEKYKEIFFDQSKNGYAGYIDGGASQEEFYKFIKPILEKMDGTEELLVKLNREDLLRKQRTFDNGSIPHQIHLGELHAILRRQEDFYPFLKDNREKIEKILTFRIPYYVGPLARGNSRFAWMTRKSEETITPWNFEEVVDKGASAQSFIERMTNFDKNLPNEKVLPKHSLLYEYFTVYNELTKVKYVTEGMRKPAFLSGEQKKAIVDLLFKTNRKVTVKQLKEDYFKKIECFDSVEISGVEDRFNASLGTYHDLLKIIKDKDFLDNEENEDILEDIVLTLTLFEDREMIEERLKTYAHLFDDKVMKQLKRRRYTGWGRLSRKLINGIRDKQSGKTILDFLKSDGFANRNFMQLIHDDSLTFKEDIQKAQVSGQGDSLHEHIANLAGSPAIKKGILQTVKVVDELVKVMGRHKPENIVIEMARENQTTQKGQKNSRERMKRIEEGIKELGSQILKEHPVENTQLQNEKLYLYYLQNGRDMYVDQELDINRLSDYDVDHIVPQSFLKDDSIDNKVLTRSDKARGKSDNVPSEEVVKKMKNYWRQLLNAKLITQRKFDNLTKAERGGLSELDKAGFIKRQLVETRQITKHVAQILDSRMNTKYDENDKLIREVKVITLKSKLVSDFRKDFQFYKVREINNYHHAHDAYLNAVVGTALIKKYPKLESEFVYGDYKVYDVRKMIAKSEQEIGKATAKYFFYSNIMNFFKTEITLANGEIRKRPLIETNGETGEIVWDKGRDFATVRKVLSMPQVNIVKKTEVQTGGFSKESILPKRNSDKLIARKKDWDPKKYGGFDSPTVAYSVLVVAKVEKGKSKKLKSVKELLGITIMERSSFEKNPIDFLEAKGYKEVKKDLIIKLPKYSLFELENGRKRMLASAGELQKGNELALPSKYVNFLYLASHYEKLKGSPEDNEQKQLFVEQHKHYLDEIIEQISEFSKRVILADANLDKVLSAYNKHRDKPIREQAENIIHLFTLTNLGAPAAFKYFDTTIDRKRYTSTKEVLDATLIHQSITGLYETRIDLSQLGGDGGPAPAPAPAPAPGGTLNIEDEYRLHETSKGPDVPLGSTWLSDFPQAWAETGGMGLAFRQAPLIISLKATSTPVSIKQYPMSQEARLGIKPHIQRLLDQGILVPCQSPWNTPLLPVKKPGTNDYRPVQDLREVNKRVEDIHPTVPNPYNLLSGLPPSHQWYTVLDLKDAFFCLRLHPTSQSLFAFEWKDPEMGISGQLTWTRLPQGFKNSPTLFNEALHRDLADFRIQHPDLILLQYVDDLLLAATSELDCQQGTRALLQTLGDLGYRASAKKAQICQKQVKYLGYLLKEGQRWLTEARKETVMGQPTPKTPRQLREFLGTAGLCRLWIPGFAEMAAPLYPLTKPGTLFKWGPDQQKAYQEIKQALLTAPALGLPDLTKPFELFVDEKQGYAKGVLTQKLGPWRRPVAYLSKKLDPVAAGWPPCLRMVAAIAVLTKDVGKLTMGQPLVILAPHAVEALVKQPPDRWLSNARMTHYQALLLDTDRVQFGPIVALNPATLLPLPEEGLQHDCLDILAEAHGTRPDLTDQPLPDADHTWYTDGSSFLQEGQRRAGAAVTTETEVIWAKALPAGTSAQRAELIALTQALKMAAGKKLNVYTDSRYAFATAHIHGEIYRRRGWLTSEGKEIKNKDEILALLKALFLPKRLSIIHCPGHQKGNHAEARGNRMADQAAREVATRETPETSTLLAGKRTADGSEFEKRTADGSEFESPKKKAKVE

SEQ ID NO: 2424 - protein, 2089 aa, synthetic construct
MPAAKRVKLDGGDKKYSIGLDIGTNSVGWAVITDEYKVPSKKFKVLGNTDRHSIKKNLIGALLFDSGETAEATRLKRTARRRYTRRKNRICYLQEIFSNEMAKVDDSFFHRLEESFLVEEDKKHERHPIFGNIVDEVAYHEKYPTIYHLRKKLVDSTDKADLRLIYLALAHMIKFRGHFLIEGDLNPDNSDVDKLFIQLVQTYNQLFEENPINASGVDAKAILSARLSKSRRLENLIAQLPGEKKNGLFGNLIALSLGLTPNFKSNFDLAEDAKLQLSKDTYDDDLDNLLAQIGDQYADLFLAAKNLSDAILLSDILRVNTEITKAPLSASMIKRYDEHHQDLTLLKALVRQQLPEKYKEIFFDQSKNGYAGYIDGGASQEEFYKFIKPILEKMDGTEELLVKLNREDLLRKQRTFDNGSIPHQIHLGELHAILRRQEDFYPFLKDNREKIEKILTFRIPYYVGPLARGNSRFAWMTRKSEETITPWNFEEVVDKGASAQSFIERMTNFDKNLPNEKVLPKHSLLYEYFTVYNELTKVKYVTEGMRKPAFLSGEQKKAIVDLLFKTNRKVTVKQLKEDYFKKIECFDSVEISGVEDRFNASLGTYHDLLKIIKDKDFLDNEENEDILEDIVLTLTLFEDREMIEERLKTYAHLFDDKVMKQLKRRRYTGWGRLSRKLINGIRDKQSGKTILDFLKSDGFANRNFMQLIHDDSLTFKEDIQKAQVSGQGDSLHEHIANLAGSPAIKKGILQTVKVVDELVKVMGRHKPENIVIEMARENQTTQKGQKNSRERMKRIEEGIKELGSQILKEHPVENTQLQNEKLYLYYLQNGRDMYVDQELDINRLSDYDVDHIVPQSFLKDDSIDNKVLTRSDKARGKSDNVPSEEVVKKMKNYWRQLLNAKLITQRKFDNLTKAERGGLSELDKAGFIKRQLVETRQITKHVAQILDSRMNTKYDENDKLIREVKVITLKSKLVSDFRKDFQFYKVREINNYHHAHDAYLNAVVGTALIKKYPKLESEFVYGDYKVYDVRKMIAKSEQEIGKATAKYFFYSNIMNFFKTEITLANGEIRKRPLIETNGETGEIVWDKGRDFATVRKVLSMPQVNIVKKTEVQTGGFSKESILPKRNSDKLIARKKDWDPKKYGGFDSPTVAYSVLVVAKVEKGKSKKLKSVKELLGITIMERSSFEKNPIDFLEAKGYKEVKKDLIIKLPKYSLFELENGRKRMLASAGELQKGNELALPSKYVNFLYLASHYEKLKGSPEDNEQKQLFVEQHKHYLDEIIEQISEFSKRVILADANLDKVLSAYNKHRDKPIREQAENIIHLFTLTNLGAPAAFKYFDTTIDRKRYTSTKEVLDATLIHQSITGLYETRIDLSQLGGDGGGGGGGGTLNIEDEYRLHETSKGPDVPLGSTWLSDFPQAWAETGGMGLAFRQAPLIISLKATSTPVSIKQYPMSQEARLGIKPHIQRLLDQGILVPCQSPWNTPLLPVKKPGTNDYRPVQDLREVNKRVEDIHPTVPNPYNLLSGLPPSHQWYTVLDLKDAFFCLRLHPTSQSLFAFEWKDPEMGISGQLTWTRLPQGFKNSPTLFNEALHRDLADFRIQHPDLILLQYVDDLLLAATSELDCQQGTRALLQTLGDLGYRASAKKAQICQKQVKYLGYLLKEGQRWLTEARKETVMGQPTPKTPRQLREFLGTAGLCRLWIPGFAEMAAPLYPLTKPGTLFKWGPDQQKAYQEIKQALLTAPALGLPDLTKPFELFVDEKQGYAKGVLTQKLGPWRRPVAYLSKKLDPVAAGWPPCLRMVAAIAVLTKDVGKLTMGQPLVILAPHAVEALVKQPPDRWLSNARMTHYQALLLDTDRVQFGPIVALNPATLLPLPEEGLQHDCLDILAEAHGTRPDLTDQPLPDADHTWYTDGSSFLQEGQRRAGAAVTTETEVIWAKALPAGTSAQRAELIALTQALKMAAGKKLNVYTDSRYAFATAHIHGEIYRRRGWLTSEGKEIKNKDEILALLKALFLPKRLSIIHCPGHQKGNHAEARGNRMADQAAREVATRETPETSTLLAGKRTADGSEFEKRTADGSEFESPKKKAKVE

SEQ ID NO: 2425 - protein, 2094 aa, synthetic construct
MPAAKRVKLDGGDKKYSIGLDIGTNSVGWAVITDEYKVPSKKFKVLGNTDRHSIKKNLIGALLFDSGETAEATRLKRTARRRYTRRKNRICYLQEIFSNEMAKVDDSFFHRLEESFLVEEDKKHERHPIFGNIVDEVAYHEKYPTIYHLRKKLVDSTDKADLRLIYLALAHMIKFRGHFLIEGDLNPDNSDVDKLFIQLVQTYNQLFEENPINASGVDAKAILSARLSKSRRLENLIAQLPGEKKNGLFGNLIALSLGLTPNFKSNFDLAEDAKLQLSKDTYDDDLDNLLAQIGDQYADLFLAAKNLSDAILLSDILRVNTEITKAPLSASMIKRYDEHHQDLTLLKALVRQQLPEKYKEIFFDQSKNGYAGYIDGGASQEEFYKFIKPILEKMDGTEELLVKLNREDLLRKQRTFDNGSIPHQIHLGELHAILRRQEDFYPFLKDNREKIEKILTFRIPYYVGPLARGNSRFAWMTRKSEETITPWNFEEVVDKGASAQSFIERMTNFDKNLPNEKVLPKHSLLYEYFTVYNELTKVKYVTEGMRKPAFLSGEQKKAIVDLLFKTNRKVTVKQLKEDYFKKIECFDSVEISGVEDRFNASLGTYHDLLKIIKDKDFLDNEENEDILEDIVLTLTLFEDREMIEERLKTYAHLFDDKVMKQLKRRRYTGWGRLSRKLINGIRDKQSGKTILDFLKSDGFANRNFMQLIHDDSLTFKEDIQKAQVSGQGDSLHEHIANLAGSPAIKKGILQTVKVVDELVKVMGRHKPENIVIEMARENQTTQKGQKNSRERMKRIEEGIKELGSQILKEHPVENTQLQNEKLYLYYLQNGRDMYVDQELDINRLSDYDVDHIVPQSFLKDDSIDNKVLTRSDKARGKSDNVPSEEVVKKMKNYWRQLLNAKLITQRKFDNLTKAERGGLSELDKAGFIKRQLVETRQITKHVAQILDSRMNTKYDENDKLIREVKVITLKSKLVSDFRKDFQFYKVREINNYHHAHDAYLNAVVGTALIKKYPKLESEFVYGDYKVYDVRKMIAKSEQEIGKATAKYFFYSNIMNFFKTEITLANGEIRKRPLIETNGETGEIVWDKGRDFATVRKVLSMPQVNIVKKTEVQTGGFSKESILPKRNSDKLIARKKDWDPKKYGGFDSPTVAYSVLVVAKVEKGKSKKLKSVKELLGITIMERSSFEKNPIDFLEAKGYKEVKKDLIIKLPKYSLFELENGRKRMLASAGELQKGNELALPSKYVNFLYLASHYEKLKGSPEDNEQKQLFVEQHKHYLDEIIEQISEFSKRVILADANLDKVLSAYNKHRDKPIREQAENIIHLFTLTNLGAPAAFKYFDTTIDRKRYTSTKEVLDATLIHQSITGLYETRIDLSQLGGDGGGSSGGGGGSGGTLNIEDEYRLHETSKGPDVPLGSTWLSDFPQAWAETGGMGLAFRQAPLIISLKATSTPVSIKQYPMSQEARLGIKPHIQRLLDQGILVPCQSPWNTPLLPVKKPGTNDYRPVQDLREVNKRVEDIHPTVPNPYNLLSGLPPSHQWYTVLDLKDAFFCLRLHPTSQSLFAFEWKDPEMGISGQLTWTRLPQGFKNSPTLFNEALHRDLADFRIQHPDLILLQYVDDLLLAATSELDCQQGTRALLQTLGDLGYRASAKKAQICQKQVKYLGYLLKEGQRWLTEARKETVMGQPTPKTPRQLREFLGTAGLCRLWIPGFAEMAAPLYPLTKPGTLFKWGPDQQKAYQEIKQALLTAPALGLPDLTKPFELFVDEKQGYAKGVLTQKLGPWRRPVAYLSKKLDPVAAGWPPCLRMVAAIAVLTKDVGKLTMGQPLVILAPHAVEALVKQPPDRWLSNARMTHYQALLLDTDRVQFGPIVALNPATLLPLPEEGLQHDCLDILAEAHGTRPDLTDQPLPDADHTWYTDGSSFLQEGQRRAGAAVTTETEVIWAKALPAGTSAQRAELIALTQALKMAAGKKLNVYTDSRYAFATAHIHGEIYRRRGWLTSEGKEIKNKDEILALLKALFLPKRLSIIHCPGHQKGNHAEARGNRMADQAAREVATRETPETSTLLAGKRTADGSEFEKRTADGSEFESPKKKAKVE

SEQ ID NO: 2426 - protein, 2093 aa, synthetic construct
MPAAKRVKLDGGDKKYSIGLDIGTNSVGWAVITDEYKVPSKKFKVLGNTDRHSIKKNLIGALLFDSGETAEATRLKRTARRRYTRRKNRICYLQEIFSNEMAKVDDSFFHRLEESFLVEEDKKHERHPIFGNIVDEVAYHEKYPTIYHLRKKLVDSTDKADLRLIYLALAHMIKFRGHFLIEGDLNPDNSDVDKLFIQLVQTYNQLFEENPINASGVDAKAILSARLSKSRRLENLIAQLPGEKKNGLFGNLIALSLGLTPNFKSNFDLAEDAKLQLSKDTYDDDLDNLLAQIGDQYADLFLAAKNLSDAILLSDILRVNTEITKAPLSASMIKRYDEHHQDLTLLKALVRQQLPEKYKEIFFDQSKNGYAGYIDGGASQEEFYKFIKPILEKMDGTEELLVKLNREDLLRKQRTFDNGSIPHQIHLGELHAILRRQEDFYPFLKDNREKIEKILTFRIPYYVGPLARGNSRFAWMTRKSEETITPWNFEEVVDKGASAQSFIERMTNFDKNLPNEKVLPKHSLLYEYFTVYNELTKVKYVTEGMRKPAFLSGEQKKAIVDLLFKTNRKVTVKQLKEDYFKKIECFDSVEISGVEDRFNASLGTYHDLLKIIKDKDFLDNEENEDILEDIVLTLTLFEDREMIEERLKTYAHLFDDKVMKQLKRRRYTGWGRLSRKLINGIRDKQSGKTILDFLKSDGFANRNFMQLIHDDSLTFKEDIQKAQVSGQGDSLHEHIANLAGSPAIKKGILQTVKVVDELVKVMGRHKPENIVIEMARENQTTQKGQKNSRERMKRIEEGIKELGSQILKEHPVENTQLQNEKLYLYYLQNGRDMYVDQELDINRLSDYDVDHIVPQSFLKDDSIDNKVLTRSDKARGKSDNVPSEEVVKKMKNYWRQLLNAKLITQRKFDNLTKAERGGLSELDKAGFIKRQLVETRQITKHVAQILDSRMNTKYDENDKLIREVKVITLKSKLVSDFRKDFQFYKVREINNYHHAHDAYLNAVVGTALIKKYPKLESEFVYGDYKVYDVRKMIAKSEQEIGKATAKYFFYSNIMNFFKTEITLANGEIRKRPLIETNGETGEIVWDKGRDFATVRKVLSMPQVNIVKKTEVQTGGFSKESILPKRNSDKLIARKKDWDPKKYGGFDSPTVAYSVLVVAKVEKGKSKKLKSVKELLGITIMERSSFEKNPIDFLEAKGYKEVKKDLIIKLPKYSLFELENGRKRMLASAGELQKGNELALPSKYVNFLYLASHYEKLKGSPEDNEQKQLFVEQHKHYLDEIIEQISEFSKRVILADANLDKVLSAYNKHRDKPIREQAENIIHLFTLTNLGAPAAFKYFDTTIDRKRYTSTKEVLDATLIHQSITGLYETRIDLSQLGGDGGEAAAKGGSGGTLNIEDEYRLHETSKGPDVPLGSTWLSDFPQAWAETGGMGLAFRQAPLIISLKATSTPVSIKQYPMSQEARLGIKPHIQRLLDQGILVPCQSPWNTPLLPVKKPGTNDYRPVQDLREVNKRVEDIHPTVPNPYNLLSGLPPSHQWYTVLDLKDAFFCLRLHPTSQSLFAFEWKDPEMGISGQLTWTRLPQGFKNSPTLFNEALHRDLADFRIQHPDLILLQYVDDLLLAATSELDCQQGTRALLQTLGDLGYRASAKKAQICQKQVKYLGYLLKEGQRWLTEARKETVMGQPTPKTPRQLREFLGTAGLCRLWIPGFAEMAAPLYPLTKPGTLFKWGPDQQKAYQEIKQALLTAPALGLPDLTKPFELFVDEKQGYAKGVLTQKLGPWRRPVAYLSKKLDPVAAGWPPCLRMVAAIAVLTKDVGKLTMGQPLVILAPHAVEALVKQPPDRWLSNARMTHYQALLLDTDRVQFGPIVALNPATLLPLPEEGLQHDCLDILAEAHGTRPDLTDQPLPDADHTWYTDGSSFLQEGQRRAGAAVTTETEVIWAKALPAGTSAQRAELIALTQALKMAAGKKLNVYTDSRYAFATAHIHGEIYRRRGWLTSEGKEIKNKDEILALLKALFLPKRLSIIHCPGHQKGNHAEARGNRMADQAAREVATRETPETSTLLAGKRTADGSEFEKRTADGSEFESPKKKAKVE

SEQ ID NO: 2427 - protein, 2088 aa, synthetic construct
MPAAKRVKLDGGDKKYSIGLDIGTNSVGWAVITDEYKVPSKKFKVLGNTDRHSIKKNLIGALLFDSGETAEATRLKRTARRRYTRRKNRICYLQEIFSNEMAKVDDSFFHRLEESFLVEEDKKHERHPIFGNIVDEVAYHEKYPTIYHLRKKLVDSTDKADLRLIYLALAHMIKFRGHFLIEGDLNPDNSDVDKLFIQLVQTYNQLFEENPINASGVDAKAILSARLSKSRRLENLIAQLPGEKKNGLFGNLIALSLGLTPNFKSNFDLAEDAKLQLSKDTYDDDLDNLLAQIGDQYADLFLAAKNLSDAILLSDILRVNTEITKAPLSASMIKRYDEHHQDLTLLKALVRQQLPEKYKEIFFDQSKNGYAGYIDGGASQEEFYKFIKPILEKMDGTEELLVKLNREDLLRKQRTFDNGSIPHQIHLGELHAILRRQEDFYPFLKDNREKIEKILTFRIPYYVGPLARGNSRFAWMTRKSEETITPWNFEEVVDKGASAQSFIERMTNFDKNLPNEKVLPKHSLLYEYFTVYNELTKVKYVTEGMRKPAFLSGEQKKAIVDLLFKTNRKVTVKQLKEDYFKKIECFDSVEISGVEDRFNASLGTYHDLLKIIKDKDFLDNEENEDILEDIVLTLTLFEDREMIEERLKTYAHLFDDKVMKQLKRRRYTGWGRLSRKLINGIRDKQSGKTILDFLKSDGFANRNFMQLIHDDSLTFKEDIQKAQVSGQGDSLHEHIANLAGSPAIKKGILQTVKVVDELVKVMGRHKPENIVIEMARENQTTQKGQKNSRERMKRIEEGIKELGSQILKEHPVENTQLQNEKLYLYYLQNGRDMYVDQELDINRLSDYDVDHIVPQSFLKDDSIDNKVLTRSDKARGKSDNVPSEEVVKKMKNYWRQLLNAKLITQRKFDNLTKAERGGLSELDKAGFIKRQLVETRQITKHVAQILDSRMNTKYDENDKLIREVKVITLKSKLVSDFRKDFQFYKVREINNYHHAHDAYLNAVVGTALIKKYPKLESEFVYGDYKVYDVRKMIAKSEQEIGKATAKYFFYSNIMNFFKTEITLANGEIRKRPLIETNGETGEIVWDKGRDFATVRKVLSMPQVNIVKKTEVQTGGFSKESILPKRNSDKLIARKKDWDPKKYGGFDSPTVAYSVLVVAKVEKGKSKKLKSVKELLGITIMERSSFEKNPIDFLEAKGYKEVKKDLIIKLPKYSLFELENGRKRMLASAGELQKGNELALPSKYVNFLYLASHYEKLKGSPEDNEQKQLFVEQHKHYLDEIIEQISEFSKRVILADANLDKVLSAYNKHRDKPIREQAENIIHLFTLTNLGAPAAFKYFDTTIDRKRYTSTKEVLDATLIHQSITGLYETRIDLSQLGGDGGPAPGGTLNIEDEYRLHETSKGPDVPLGSTWLSDFPQAWAETGGMGLAFRQAPLIISLKATSTPVSIKQYPMSQEARLGIKPHIQRLLDQGILVPCQSPWNTPLLPVKKPGTNDYRPVQDLREVNKRVEDIHPTVPNPYNLLSGLPPSHQWYTVLDLKDAFFCLRLHPTSQSLFAFEWKDPEMGISGQLTWTRLPQGFKNSPTLFNEALHRDLADFRIQHPDLILLQYVDDLLLAATSELDCQQGTRALLQTLGDLGYRASAKKAQICQKQVKYLGYLLKEGQRWLTEARKETVMGQPTPKTPRQLREFLGTAGLCRLWIPGFAEMAAPLYPLTKPGTLFKWGPDQQKAYQEIKQALLTAPALGLPDLTKPFELFVDEKQGYAKGVLTQKLGPWRRPVAYLSKKLDPVAAGWPPCLRMVAAIAVLTKDVGKLTMGQPLVILAPHAVEALVKQPPDRWLSNARMTHYQALLLDTDRVQFGPIVALNPATLLPLPEEGLQHDCLDILAEAHGTRPDLTDQPLPDADHTWYTDGSSFLQEGQRRAGAAVTTETEVIWAKALPAGTSAQRAELIALTQALKMAAGKKLNVYTDSRYAFATAHIHGEIYRRRGWLTSEGKEIKNKDEILALLKALFLPKRLSIIHCPGHQKGNHAEARGNRMADQAAREVATRETPETSTLLAGKRTADGSEFEKRTADGSEFESPKKKAKVE

SEQ ID NO: 2428 - protein, 2096 aa, synthetic construct
MPAAKRVKLDGGDKKYSIGLDIGTNSVGWAVITDEYKVPSKKFKVLGNTDRHSIKKNLIGALLFDSGETAEATRLKRTARRRYTRRKNRICYLQEIFSNEMAKVDDSFFHRLEESFLVEEDKKHERHPIFGNIVDEVAYHEKYPTIYHLRKKLVDSTDKADLRLIYLALAHMIKFRGHFLIEGDLNPDNSDVDKLFIQLVQTYNQLFEENPINASGVDAKAILSARLSKSRRLENLIAQLPGEKKNGLFGNLIALSLGLTPNFKSNFDLAEDAKLQLSKDTYDDDLDNLLAQIGDQYADLFLAAKNLSDAILLSDILRVNTEITKAPLSASMIKRYDEHHQDLTLLKALVRQQLPEKYKEIFFDQSKNGYAGYIDGGASQEEFYKFIKPILEKMDGTEELLVKLNREDLLRKQRTFDNGSIPHQIHLGELHAILRRQEDFYPFLKDNREKIEKILTFRIPYYVGPLARGNSRFAWMTRKSEETITPWNFEEVVDKGASAQSFIERMTNFDKNLPNEKVLPKHSLLYEYFTVYNELTKVKYVTEGMRKPAFLSGEQKKAIVDLLFKTNRKVTVKQLKEDYFKKIECFDSVEISGVEDRFNASLGTYHDLLKIIKDKDFLDNEENEDILEDIVLTLTLFEDREMIEERLKTYAHLFDDKVMKQLKRRRYTGWGRLSRKLINGIRDKQSGKTILDFLKSDGFANRNFMQLIHDDSLTFKEDIQKAQVSGQGDSLHEHIANLAGSPAIKKGILQTVKVVDELVKVMGRHKPENIVIEMARENQTTQKGQKNSRERMKRIEEGIKELGSQILKEHPVENTQLQNEKLYLYYLQNGRDMYVDQELDINRLSDYDVDHIVPQSFLKDDSIDNKVLTRSDKARGKSDNVPSEEVVKKMKNYWRQLLNAKLITQRKFDNLTKAERGGLSELDKAGFIKRQLVETRQITKHVAQILDSRMNTKYDENDKLIREVKVITLKSKLVSDFRKDFQFYKVREINNYHHAHDAYLNAVVGTALIKKYPKLESEFVYGDYKVYDVRKMIAKSEQEIGKATAKYFFYSNIMNFFKTEITLANGEIRKRPLIETNGETGEIVWDKGRDFATVRKVLSMPQVNIVKKTEVQTGGFSKESILPKRNSDKLIARKKDWDPKKYGGFDSPTVAYSVLVVAKVEKGKSKKLKSVKELLGITIMERSSFEKNPIDFLEAKGYKEVKKDLIIKLPKYSLFELENGRKRMLASAGELQKGNELALPSKYVNFLYLASHYEKLKGSPEDNEQKQLFVEQHKHYLDEIIEQISEFSKRVILADANLDKVLSAYNKHRDKPIREQAENIIHLFTLTNLGAPAAFKYFDTTIDRKRYTSTKEVLDATLIHQSITGLYETRIDLSQLGGDGGPAPGSSEAAAKGGTLNIEDEYRLHETSKGPDVPLGSTWLSDFPQAWAETGGMGLAFRQAPLIISLKATSTPVSIKQYPMSQEARLGIKPHIQRLLDQGILVPCQSPWNTPLLPVKKPGTNDYRPVQDLREVNKRVEDIHPTVPNPYNLLSGLPPSHQWYTVLDLKDAFFCLRLHPTSQSLFAFEWKDPEMGISGQLTWTRLPQGFKNSPTLFNEALHRDLADFRIQHPDLILLQYVDDLLLAATSELDCQQGTRALLQTLGDLGYRASAKKAQICQKQVKYLGYLLKEGQRWLTEARKETVMGQPTPKTPRQLREFLGTAGLCRLWIPGFAEMAAPLYPLTKPGTLFKWGPDQQKAYQEIKQALLTAPALGLPDLTKPFELFVDEKQGYAKGVLTQKLGPWRRPVAYLSKKLDPVAAGWPPCLRMVAAIAVLTKDVGKLTMGQPLVILAPHAVEALVKQPPDRWLSNARMTHYQALLLDTDRVQFGPIVALNPATLLPLPEEGLQHDCLDILAEAHGTRPDLTDQPLPDADHTWYTDGSSFLQEGQRRAGAAVTTETEVIWAKALPAGTSAQRAELIALTQALKMAAGKKLNVYTDSRYAFATAHIHGEIYRRRGWLTSEGKEIKNKDEILALLKALFLPKRLSIIHCPGHQKGNHAEARGNRMADQAAREVATRETPETSTLLAGKRTADGSEFEKRTADGSEFESPKKKAKVE

SEQ ID NO: 2429 - protein, 2115 aa, synthetic construct
MPAAKRVKLDGGDKKYSIGLDIGTNSVGWAVITDEYKVPSKKFKVLGNTDRHSIKKNLIGALLFDSGETAEATRLKRTARRRYTRRKNRICYLQEIFSNEMAKVDDSFFHRLEESFLVEEDKKHERHPIFGNIVDEVAYHEKYPTIYHLRKKLVDSTDKADLRLIYLALAHMIKFRGHFLIEGDLNPDNSDVDKLFIQLVQTYNQLFEENPINASGVDAKAILSARLSKSRRLENLIAQLPGEKKNGLFGNLIALSLGLTPNFKSNFDLAEDAKLQLSKDTYDDDLDNLLAQIGDQYADLFLAAKNLSDAILLSDILRVNTEITKAPLSASMIKRYDEHHQDLTLLKALVRQQLPEKYKEIFFDQSKNGYAGYIDGGASQEEFYKFIKPILEKMDGTEELLVKLNREDLLRKQRTFDNGSIPHQIHLGELHAILRRQEDFYPFLKDNREKIEKILTFRIPYYVGPLARGNSRFAWMTRKSEETITPWNFEEVVDKGASAQSFIERMTNFDKNLPNEKVLPKHSLLYEYFTVYNELTKVKYVTEGMRKPAFLSGEQKKAIVDLLFKTNRKVTVKQLKEDYFKKIECFDSVEISGVEDRFNASLGTYHDLLKIIKDKDFLDNEENEDILEDIVLTLTLFEDREMIEERLKTYAHLFDDKVMKQLKRRRYTGWGRLSRKLINGIRDKQSGKTILDFLKSDGFANRNFMQLIHDDSLTFKEDIQKAQVSGQGDSLHEHIANLAGSPAIKKGILQTVKVVDELVKVMGRHKPENIVIEMARENQTTQKGQKNSRERMKRIEEGIKELGSQILKEHPVENTQLQNEKLYLYYLQNGRDMYVDQELDINRLSDYDVDHIVPQSFLKDDSIDNKVLTRSDKARGKSDNVPSEEVVKKMKNYWRQLLNAKLITQRKFDNLTKAERGGLSELDKAGFIKRQLVETRQITKHVAQILDSRMNTKYDENDKLIREVKVITLKSKLVSDFRKDFQFYKVREINNYHHAHDAYLNAVVGTALIKKYPKLESEFVYGDYKVYDVRKMIAKSEQEIGKATAKYFFYSNIMNFFKTEITLANGEIRKRPLIETNGETGEIVWDKGRDFATVRKVLSMPQVNIVKKTEVQTGGFSKESILPKRNSDKLIARKKDWDPKKYGGFDSPTVAYSVLVVAKVEKGKSKKLKSVKELLGITIMERSSFEKNPIDFLEAKGYKEVKKDLIIKLPKYSLFELENGRKRMLASAGELQKGNELALPSKYVNFLYLASHYEKLKGSPEDNEQKQLFVEQHKHYLDEIIEQISEFSKRVILADANLDKVLSAYNKHRDKPIREQAENIIHLFTLTNLGAPAAFKYFDTTIDRKRYTSTKEVLDATLIHQSITGLYETRIDLSQLGGDGGGGGGSGGGGSGGGGSGGGGSGGGGSGGGGSGGTLNIEDEYRLHETSKGPDVPLGSTWLSDFPQAWAETGGMGLAFRQAPLIISLKATSTPVSIKQYPMSQEARLGIKPHIQRLLDQGILVPCQSPWNTPLLPVKKPGTNDYRPVQDLREVNKRVEDIHPTVPNPYNLLSGLPPSHQWYTVLDLKDAFFCLRLHPTSQSLFAFEWKDPEMGISGQLTWTRLPQGFKNSPTLFNEALHRDLADFRIQHPDLILLQYVDDLLLAATSELDCQQGTRALLQTLGDLGYRASAKKAQICQKQVKYLGYLLKEGQRWLTEARKETVMGQPTPKTPRQLREFLGTAGLCRLWIPGFAEMAAPLYPLTKPGTLFKWGPDQQKAYQEIKQALLTAPALGLPDLTKPFELFVDEKQGYAKGVLTQKLGPWRRPVAYLSKKLDPVAAGWPPCLRMVAAIAVLTKDVGKLTMGQPLVILAPHAVEALVKQPPDRWLSNARMTHYQALLLDTDRVQFGPIVALNPATLLPLPEEGLQHDCLDILAEAHGTRPDLTDQPLPDADHTWYTDGSSFLQEGQRRAGAAVTTETEVIWAKALPAGTSAQRAELIALTQALKMAAGKKLNVYTDSRYAFATAHIHGEIYRRRGWLTSEGKEIKNKDEILALLKALFLPKRLSIIHCPGHQKGNHAEARGNRMADQAAREVATRETPETSTLLAGKRTADGSEFEKRTADGSEFESPKKKAKVE

SEQ ID NO: 2430 - protein, 2098 aa, synthetic construct
MPAAKRVKLDGGDKKYSIGLDIGTNSVGWAVITDEYKVPSKKFKVLGNTDRHSIKKNLIGALLFDSGETAEATRLKRTARRRYTRRKNRICYLQEIFSNEMAKVDDSFFHRLEESFLVEEDKKHERHPIFGNIVDEVAYHEKYPTIYHLRKKLVDSTDKADLRLIYLALAHMIKFRGHFLIEGDLNPDNSDVDKLFIQLVQTYNQLFEENPINASGVDAKAILSARLSKSRRLENLIAQLPGEKKNGLFGNLIALSLGLTPNFKSNFDLAEDAKLQLSKDTYDDDLDNLLAQIGDQYADLFLAAKNLSDAILLSDILRVNTEITKAPLSASMIKRYDEHHQDLTLLKALVRQQLPEKYKEIFFDQSKNGYAGYIDGGASQEEFYKFIKPILEKMDGTEELLVKLNREDLLRKQRTFDNGSIPHQIHLGELHAILRRQEDFYPFLKDNREKIEKILTFRIPYYVGPLARGNSRFAWMTRKSEETITPWNFEEVVDKGASAQSFIERMTNFDKNLPNEKVLPKHSLLYEYFTVYNELTKVKYVTEGMRKPAFLSGEQKKAIVDLLFKTNRKVTVKQLKEDYFKKIECFDSVEISGVEDRFNASLGTYHDLLKIIKDKDFLDNEENEDILEDIVLTLTLFEDREMIEERLKTYAHLFDDKVMKQLKRRRYTGWGRLSRKLINGIRDKQSGKTILDFLKSDGFANRNFMQLIHDDSLTFKEDIQKAQVSGQGDSLHEHIANLAGSPAIKKGILQTVKVVDELVKVMGRHKPENIVIEMARENQTTQKGQKNSRERMKRIEEGIKELGSQILKEHPVENTQLQNEKLYLYYLQNGRDMYVDQELDINRLSDYDVDHIVPQSFLKDDSIDNKVLTRSDKARGKSDNVPSEEVVKKMKNYWRQLLNAKLITQRKFDNLTKAERGGLSELDKAGFIKRQLVETRQITKHVAQILDSRMNTKYDENDKLIREVKVITLKSKLVSDFRKDFQFYKVREINNYHHAHDAYLNAVVGTALIKKYPKLESEFVYGDYKVYDVRKMIAKSEQEIGKATAKYFFYSNIMNFFKTEITLANGEIRKRPLIETNGETGEIVWDKGRDFATVRKVLSMPQVNIVKKTEVQTGGFSKESILPKRNSDKLIARKKDWDPKKYGGFDSPTVAYSVLVVAKVEKGKSKKLKSVKELLGITIMERSSFEKNPIDFLEAKGYKEVKKDLIIKLPKYSLFELENGRKRMLASAGELQKGNELALPSKYVNFLYLASHYEKLKGSPEDNEQKQLFVEQHKHYLDEIIEQISEFSKRVILADANLDKVLSAYNKHRDKPIREQAENIIHLFTLTNLGAPAAFKYFDTTIDRKRYTSTKEVLDATLIHQSITGLYETRIDLSQLGGDGGPAPAPAPAPAPAPGGTLNIEDEYRLHETSKGPDVPLGSTWLSDFPQAWAETGGMGLAFRQAPLIISLKATSTPVSIKQYPMSQEARLGIKPHIQRLLDQGILVPCQSPWNTPLLPVKKPGTNDYRPVQDLREVNKRVEDIHPTVPNPYNLLSGLPPSHQWYTVLDLKDAFFCLRLHPTSQSLFAFEWKDPEMGISGQLTWTRLPQGFKNSPTLFNEALHRDLADFRIQHPDLILLQYVDDLLLAATSELDCQQGTRALLQTLGDLGYRASAKKAQICQKQVKYLGYLLKEGQRWLTEARKETVMGQPTPKTPRQLREFLGKAGLCRLFIPGFAEMAAPLYPLTKPGTLFKWGPDQQKAYQEIKQALLTAPALGLPDLTKPFELFVDEKQGYAKGVLTQKLGPWRRPVAYLSKKLDPVAAGWPPCLRMVAAIAVLTKDVGKLTMGQPLVILAPHAVEALVKQPPDRWLSNARMTHYQALLLDTDRVQFGPIVALNPATLLPLPEEGLQHDCLDILAEAHGTRPDLTDQPLPDADHTWYTDGSSFLQEGQRRAGAAVTTETEVIWAKALPAGTSAQRAELIALTQALKMAAGKKLNVYTDSRYAFATAHIHGEIYRRRGWLTSEGKEIKNKDEILALLKALFLPKRLSIIHCPGHQKGNHAEARGNRMADQAAREVATRETPETSTLLAGKRTADGSEFEKRTADGSEFESPKKKAKVE

SEQ ID NO: 2431 - protein, 2096 aa, synthetic construct
MPAAKRVKLDGGDKKYSIGLDIGTNSVGWAVITDEYKVPSKKFKVLGNTDRHSIKKNLIGALLFDSGETAEATRLKRTARRRYTRRKNRICYLQEIFSNEMAKVDDSFFHRLEESFLVEEDKKHERHPIFGNIVDEVAYHEKYPTIYHLRKKLVDSTDKADLRLIYLALAHMIKFRGHFLIEGDLNPDNSDVDKLFIQLVQTYNQLFEENPINASGVDAKAILSARLSKSRRLENLIAQLPGEKKNGLFGNLIALSLGLTPNFKSNFDLAEDAKLQLSKDTYDDDLDNLLAQIGDQYADLFLAAKNLSDAILLSDILRVNTEITKAPLSASMIKRYDEHHQDLTLLKALVRQQLPEKYKEIFFDQSKNGYAGYIDGGASQEEFYKFIKPILEKMDGTEELLVKLNREDLLRKQRTFDNGSIPHQIHLGELHAILRRQEDFYPFLKDNREKIEKILTFRIPYYVGPLARGNSRFAWMTRKSEETITPWNFEEVVDKGASAQSFIERMTNFDKNLPNEKVLPKHSLLYEYFTVYNELTKVKYVTEGMRKPAFLSGEQKKAIVDLLFKTNRKVTVKQLKEDYFKKIECFDSVEISGVEDRFNASLGTYHDLLKIIKDKDFLDNEENEDILEDIVLTLTLFEDREMIEERLKTYAHLFDDKVMKQLKRRRYTGWGRLSRKLINGIRDKQSGKTILDFLKSDGFANRNFMQLIHDDSLTFKEDIQKAQVSGQGDSLHEHIANLAGSPAIKKGILQTVKVVDELVKVMGRHKPENIVIEMARENQTTQKGQKNSRERMKRIEEGIKELGSQILKEHPVENTQLQNEKLYLYYLQNGRDMYVDQELDINRLSDYDVDHIVPQSFLKDDSIDNKVLTRSDKARGKSDNVPSEEVVKKMKNYWRQLLNAKLITQRKFDNLTKAERGGLSELDKAGFIKRQLVETRQITKHVAQILDSRMNTKYDENDKLIREVKVITLKSKLVSDFRKDFQFYKVREINNYHHAHDAYLNAVVGTALIKKYPKLESEFVYGDYKVYDVRKMIAKSEQEIGKATAKYFFYSNIMNFFKTEITLANGEIRKRPLIETNGETGEIVWDKGRDFATVRKVLSMPQVNIVKKTEVQTGGFSKESILPKRNSDKLIARKKDWDPKKYGGFDSPTVAYSVLVVAKVEKGKSKKLKSVKELLGITIMERSSFEKNPIDFLEAKGYKEVKKDLIIKLPKYSLFELENGRKRMLASAGELQKGNELALPSKYVNFLYLASHYEKLKGSPEDNEQKQLFVEQHKHYLDEIIEQISEFSKRVILADANLDKVLSAYNKHRDKPIREQAENIIHLFTLTNLGAPAAFKYFDTTIDRKRYTSTKEVLDATLIHQSITGLYETRIDLSQLGGDGGEAAAKPAPGGSGGTLNIEDEYRLHETSKGPDVPLGSTWLSDFPQAWAETGGMGLAFRQAPLIISLKATSTPVSIKQYPMSQEARLGIKPHIQRLLDQGILVPCQSPWNTPLLPVKKPGTNDYRPVQDLREVNKRVEDIHPTVPNPYNLLSGLPPSHQWYTVLDLKDAFFCLRLHPTSQSLFAFEWKDPEMGISGQLTWTRLPQGFKNSPTLFNEALHRDLADFRIQHPDLILLQYVDDLLLAATSELDCQQGTRALLQTLGDLGYRASAKKAQICQKQVKYLGYLLKEGQRWLTEARKETVMGQPTPKTPRQLREFLGKAGLCRLFIPGFAEMAAPLYPLTKPGTLFKWGPDQQKAYQEIKQALLTAPALGLPDLTKPFELFVDEKQGYAKGVLTQKLGPWRRPVAYLSKKLDPVAAGWPPCLRMVAAIAVLTKDVGKLTMGQPLVILAPHAVEALVKQPPDRWLSNARMTHYQALLLDTDRVQFGPIVALNPATLLPLPEEGLQHDCLDILAEAHGTRPDLTDQPLPDADHTWYTDGSSFLQEGQRRAGAAVTTETEVIWAKALPAGTSAQRAELIALTQALKMAAGKKLNVYTDSRYAFATAHIHGEIYRRRGWLTSEGKEIKNKDEILALLKALFLPKRLSIIHCPGHQKGNHAEARGNRMADQAAREVATRETPETSTLLAGKRTADGSEFEKRTADGSEFESPKKKAKVE

SEQ ID NO: 2432 - protein, 2094 aa, synthetic construct
MPAAKRVKLDGGDKKYSIGLDIGTNSVGWAVITDEYKVPSKKFKVLGNTDRHSIKKNLIGALLFDSGETAEATRLKRTARRRYTRRKNRICYLQEIFSNEMAKVDDSFFHRLEESFLVEEDKKHERHPIFGNIVDEVAYHEKYPTIYHLRKKLVDSTDKADLRLIYLALAHMIKFRGHFLIEGDLNPDNSDVDKLFIQLVQTYNQLFEENPINASGVDAKAILSARLSKSRRLENLIAQLPGEKKNGLFGNLIALSLGLTPNFKSNFDLAEDAKLQLSKDTYDDDLDNLLAQIGDQYADLFLAAKNLSDAILLSDILRVNTEITKAPLSASMIKRYDEHHQDLTLLKALVRQQLPEKYKEIFFDQSKNGYAGYIDGGASQEEFYKFIKPILEKMDGTEELLVKLNREDLLRKQRTFDNGSIPHQIHLGELHAILRRQEDFYPFLKDNREKIEKILTFRIPYYVGPLARGNSRFAWMTRKSEETITPWNFEEVVDKGASAQSFIERMTNFDKNLPNEKVLPKHSLLYEYFTVYNELTKVKYVTEGMRKPAFLSGEQKKAIVDLLFKTNRKVTVKQLKEDYFKKIECFDSVEISGVEDRFNASLGTYHDLLKIIKDKDFLDNEENEDILEDIVLTLTLFEDREMIEERLKTYAHLFDDKVMKQLKRRRYTGWGRLSRKLINGIRDKQSGKTILDFLKSDGFANRNFMQLIHDDSLTFKEDIQKAQVSGQGDSLHEHIANLAGSPAIKKGILQTVKVVDELVKVMGRHKPENIVIEMARENQTTQKGQKNSRERMKRIEEGIKELGSQILKEHPVENTQLQNEKLYLYYLQNGRDMYVDQELDINRLSDYDVDHIVPQSFLKDDSIDNKVLTRSDKARGKSDNVPSEEVVKKMKNYWRQLLNAKLITQRKFDNLTKAERGGLSELDKAGFIKRQLVETRQITKHVAQILDSRMNTKYDENDKLIREVKVITLKSKLVSDFRKDFQFYKVREINNYHHAHDAYLNAVVGTALIKKYPKLESEFVYGDYKVYDVRKMIAKSEQEIGKATAKYFFYSNIMNFFKTEITLANGEIRKRPLIETNGETGEIVWDKGRDFATVRKVLSMPQVNIVKKTEVQTGGFSKESILPKRNSDKLIARKKDWDPKKYGGFDSPTVAYSVLVVAKVEKGKSKKLKSVKELLGITIMERSSFEKNPIDFLEAKGYKEVKKDLIIKLPKYSLFELENGRKRMLASAGELQKGNELALPSKYVNFLYLASHYEKLKGSPEDNEQKQLFVEQHKHYLDEIIEQISEFSKRVILADANLDKVLSAYNKHRDKPIREQAENIIHLFTLTNLGAPAAFKYFDTTIDRKRYTSTKEVLDATLIHQSITGLYETRIDLSQLGGDGGPAPGGSGGGGGTLNIEDEYRLHETSKGPDVPLGSTWLSDFPQAWAETGGMGLAFRQAPLIISLKATSTPVSIKQYPMSQEARLGIKPHIQRLLDQGILVPCQSPWNTPLLPVKKPGTNDYRPVQDLREVNKRVEDIHPTVPNPYNLLSGLPPSHQWYTVLDLKDAFFCLRLHPTSQSLFAFEWKDPEMGISGQLTWTRLPQGFKNSPTLFNEALHRDLADFRIQHPDLILLQYVDDLLLAATSELDCQQGTRALLQTLGDLGYRASAKKAQICQKQVKYLGYLLKEGQRWLTEARKETVMGQPTPKTPRQLREFLGKAGLCRLFIPGFAEMAAPLYPLTKPGTLFKWGPDQQKAYQEIKQALLTAPALGLPDLTKPFELFVDEKQGYAKGVLTQKLGPWRRPVAYLSKKLDPVAAGWPPCLRMVAAIAVLTKDVGKLTMGQPLVILAPHAVEALVKQPPDRWLSNARMTHYQALLLDTDRVQFGPIVALNPATLLPLPEEGLQHDCLDILAEAHGTRPDLTDQPLPDADHTWYTDGSSFLQEGQRRAGAAVTTETEVIWAKALPAGTSAQRAELIALTQALKMAAGKKLNVYTDSRYAFATAHIHGEIYRRRGWLTSEGKEIKNKDEILALLKALFLPKRLSIIHCPGHQKGNHAEARGNRMADQAAREVATRETPETSTLLAGKRTADGSEFEKRTADGSEFESPKKKAKVE

SEQ ID NO: 2433 - protein, 2100 aa, synthetic construct
MPAAKRVKLDGGDKKYSIGLDIGTNSVGWAVITDEYKVPSKKFKVLGNTDRHSIKKNLIGALLFDSGETAEATRLKRTARRRYTRRKNRICYLQEIFSNEMAKVDDSFFHRLEESFLVEEDKKHERHPIFGNIVDEVAYHEKYPTIYHLRKKLVDSTDKADLRLIYLALAHMIKFRGHFLIEGDLNPDNSDVDKLFIQLVQTYNQLFEENPINASGVDAKAILSARLSKSRRLENLIAQLPGEKKNGLFGNLIALSLGLTPNFKSNFDLAEDAKLQLSKDTYDDDLDNLLAQIGDQYADLFLAAKNLSDAILLSDILRVNTEITKAPLSASMIKRYDEHHQDLTLLKALVRQQLPEKYKEIFFDQSKNGYAGYIDGGASQEEFYKFIKPILEKMDGTEELLVKLNREDLLRKQRTFDNGSIPHQIHLGELHAILRRQEDFYPFLKDNREKIEKILTFRIPYYVGPLARGNSRFAWMTRKSEETITPWNFEEVVDKGASAQSFIERMTNFDKNLPNEKVLPKHSLLYEYFTVYNELTKVKYVTEGMRKPAFLSGEQKKAIVDLLFKTNRKVTVKQLKEDYFKKIECFDSVEISGVEDRFNASLGTYHDLLKIIKDKDFLDNEENEDILEDIVLTLTLFEDREMIEERLKTYAHLFDDKVMKQLKRRRYTGWGRLSRKLINGIRDKQSGKTILDFLKSDGFANRNFMQLIHDDSLTFKEDIQKAQVSGQGDSLHEHIANLAGSPAIKKGILQTVKVVDELVKVMGRHKPENIVIEMARENQTTQKGQKNSRERMKRIEEGIKELGSQILKEHPVENTQLQNEKLYLYYLQNGRDMYVDQELDINRLSDYDVDHIVPQSFLKDDSIDNKVLTRSDKARGKSDNVPSEEVVKKMKNYWRQLLNAKLITQRKFDNLTKAERGGLSELDKAGFIKRQLVETRQITKHVAQILDSRMNTKYDENDKLIREVKVITLKSKLVSDFRKDFQFYKVREINNYHHAHDAYLNAVVGTALIKKYPKLESEFVYGDYKVYDVRKMIAKSEQEIGKATAKYFFYSNIMNFFKTEITLANGEIRKRPLIETNGETGEIVWDKGRDFATVRKVLSMPQVNIVKKTEVQTGGFSKESILPKRNSDKLIARKKDWDPKKYGGFDSPTVAYSVLVVAKVEKGKSKKLKSVKELLGITIMERSSFEKNPIDFLEAKGYKEVKKDLIIKLPKYSLFELENGRKRMLASAGELQKGNELALPSKYVNFLYLASHYEKLKGSPEDNEQKQLFVEQHKHYLDEIIEQISEFSKRVILADANLDKVLSAYNKHRDKPIREQAENIIHLFTLTNLGAPAAFKYFDTTIDRKRYTSTKEVLDATLIHQSITGLYETRIDLSQLGGDGGEAAAKGGGGSEAAAKGGTLNIEDEYRLHETSKGPDVPLGSTWLSDFPQAWAETGGMGLAFRQAPLIISLKATSTPVSIKQYPMSQEARLGIKPHIQRLLDQGILVPCQSPWNTPLLPVKKPGTNDYRPVQDLREVNKRVEDIHPTVPNPYNLLSGLPPSHQWYTVLDLKDAFFCLRLHPTSQSLFAFEWKDPEMGISGQLTWTRLPQGFKNSPTLFNEALHRDLADFRIQHPDLILLQYVDDLLLAATSELDCQQGTRALLQTLGDLGYRASAKKAQICQKQVKYLGYLLKEGQRWLTEARKETVMGQPTPKTPRQLREFLGKAGLCRLFIPGFAEMAAPLYPLTKPGTLFKWGPDQQKAYQEIKQALLTAPALGLPDLTKPFELFVDEKQGYAKGVLTQKLGPWRRPVAYLSKKLDPVAAGWPPCLRMVAAIAVLTKDVGKLTMGQPLVILAPHAVEALVKQPPDRWLSNARMTHYQALLLDTDRVQFGPIVALNPATLLPLPEEGLQHDCLDILAEAHGTRPDLTDQPLPDADHTWYTDGSSFLQEGQRRAGAAVTTETEVIWAKALPAGTSAQRAELIALTQALKMAAGKKLNVYTDSRYAFATAHIHGEIYRRRGWLTSEGKEIKNKDEILALLKALFLPKRLSIIHCPGHQKGNHAEARGNRMADQAAREVATRETPETSTLLAGKRTADGSEFEKRTADGSEFESPKKKAKVE

SEQ ID NO: 2434 - protein, 2096 aa, synthetic construct
MPAAKRVKLDGGDKKYSIGLDIGTNSVGWAVITDEYKVPSKKFKVLGNTDRHSIKKNLIGALLFDSGETAEATRLKRTARRRYTRRKNRICYLQEIFSNEMAKVDDSFFHRLEESFLVEEDKKHERHPIFGNIVDEVAYHEKYPTIYHLRKKLVDSTDKADLRLIYLALAHMIKFRGHFLIEGDLNPDNSDVDKLFIQLVQTYNQLFEENPINASGVDAKAILSARLSKSRRLENLIAQLPGEKKNGLFGNLIALSLGLTPNFKSNFDLAEDAKLQLSKDTYDDDLDNLLAQIGDQYADLFLAAKNLSDAILLSDILRVNTEITKAPLSASMIKRYDEHHQDLTLLKALVRQQLPEKYKEIFFDQSKNGYAGYIDGGASQEEFYKFIKPILEKMDGTEELLVKLNREDLLRKQRTFDNGSIPHQIHLGELHAILRRQEDFYPFLKDNREKIEKILTFRIPYYVGPLARGNSRFAWMTRKSEETITPWNFEEVVDKGASAQSFIERMTNFDKNLPNEKVLPKHSLLYEYFTVYNELTKVKYVTEGMRKPAFLSGEQKKAIVDLLFKTNRKVTVKQLKEDYFKKIECFDSVEISGVEDRFNASLGTYHDLLKIIKDKDFLDNEENEDILEDIVLTLTLFEDREMIEERLKTYAHLFDDKVMKQLKRRRYTGWGRLSRKLINGIRDKQSGKTILDFLKSDGFANRNFMQLIHDDSLTFKEDIQKAQVSGQGDSLHEHIANLAGSPAIKKGILQTVKVVDELVKVMGRHKPENIVIEMARENQTTQKGQKNSRERMKRIEEGIKELGSQILKEHPVENTQLQNEKLYLYYLQNGRDMYVDQELDINRLSDYDVDHIVPQSFLKDDSIDNKVLTRSDKARGKSDNVPSEEVVKKMKNYWRQLLNAKLITQRKFDNLTKAERGGLSELDKAGFIKRQLVETRQITKHVAQILDSRMNTKYDENDKLIREVKVITLKSKLVSDFRKDFQFYKVREINNYHHAHDAYLNAVVGTALIKKYPKLESEFVYGDYKVYDVRKMIAKSEQEIGKATAKYFFYSNIMNFFKTEITLANGEIRKRPLIETNGETGEIVWDKGRDFATVRKVLSMPQVNIVKKTEVQTGGFSKESILPKRNSDKLIARKKDWDPKKYGGFDSPTVAYSVLVVAKVEKGKSKKLKSVKELLGITIMERSSFEKNPIDFLEAKGYKEVKKDLIIKLPKYSLFELENGRKRMLASAGELQKGNELALPSKYVNFLYLASHYEKLKGSPEDNEQKQLFVEQHKHYLDEIIEQISEFSKRVILADANLDKVLSAYNKHRDKPIREQAENIIHLFTLTNLGAPAAFKYFDTTIDRKRYTSTKEVLDATLIHQSITGLYETRIDLSQLGGDGGGGGGSSEAAAKGGTLNIEDEYRLHETSKGPDVPLGSTWLSDFPQAWAETGGMGLAFRQAPLIISLKATSTPVSIKQYPMSQEARLGIKPHIQRLLDQGILVPCQSPWNTPLLPVKKPGTNDYRPVQDLREVNKRVEDIHPTVPNPYNLLSGLPPSHQWYTVLDLKDAFFCLRLHPTSQSLFAFEWKDPEMGISGQLTWTRLPQGFKNSPTLFNEALHRDLADFRIQHPDLILLQYVDDLLLAATSELDCQQGTRALLQTLGDLGYRASAKKAQICQKQVKYLGYLLKEGQRWLTEARKETVMGQPTPKTPRQLREFLGKAGLCRLFIPGFAEMAAPLYPLTKPGTLFKWGPDQQKAYQEIKQALLTAPALGLPDLTKPFELFVDEKQGYAKGVLTQKLGPWRRPVAYLSKKLDPVAAGWPPCLRMVAAIAVLTKDVGKLTMGQPLVILAPHAVEALVKQPPDRWLSNARMTHYQALLLDTDRVQFGPIVALNPATLLPLPEEGLQHDCLDILAEAHGTRPDLTDQPLPDADHTWYTDGSSFLQEGQRRAGAAVTTETEVIWAKALPAGTSAQRAELIALTQALKMAAGKKLNVYTDSRYAFATAHIHGEIYRRRGWLTSEGKEIKNKDEILALLKALFLPKRLSIIHCPGHQKGNHAEARGNRMADQAAREVATRETPETSTLLAGKRTADGSEFEKRTADGSEFESPKKKAKVE

SEQ ID NO: 2435 - protein, 2093 aa, synthetic construct
MPAAKRVKLDGGDKKYSIGLDIGTNSVGWAVITDEYKVPSKKFKVLGNTDRHSIKKNLIGALLFDSGETAEATRLKRTARRRYTRRKNRICYLQEIFSNEMAKVDDSFFHRLEESFLVEEDKKHERHPIFGNIVDEVAYHEKYPTIYHLRKKLVDSTDKADLRLIYLALAHMIKFRGHFLIEGDLNPDNSDVDKLFIQLVQTYNQLFEENPINASGVDAKAILSARLSKSRRLENLIAQLPGEKKNGLFGNLIALSLGLTPNFKSNFDLAEDAKLQLSKDTYDDDLDNLLAQIGDQYADLFLAAKNLSDAILLSDILRVNTEITKAPLSASMIKRYDEHHQDLTLLKALVRQQLPEKYKEIFFDQSKNGYAGYIDGGASQEEFYKFIKPILEKMDGTEELLVKLNREDLLRKQRTFDNGSIPHQIHLGELHAILRRQEDFYPFLKDNREKIEKILTFRIPYYVGPLARGNSRFAWMTRKSEETITPWNFEEVVDKGASAQSFIERMTNFDKNLPNEKVLPKHSLLYEYFTVYNELTKVKYVTEGMRKPAFLSGEQKKAIVDLLFKTNRKVTVKQLKEDYFKKIECFDSVEISGVEDRFNASLGTYHDLLKIIKDKDFLDNEENEDILEDIVLTLTLFEDREMIEERLKTYAHLFDDKVMKQLKRRRYTGWGRLSRKLINGIRDKQSGKTILDFLKSDGFANRNFMQLIHDDSLTFKEDIQKAQVSGQGDSLHEHIANLAGSPAIKKGILQTVKVVDELVKVMGRHKPENIVIEMARENQTTQKGQKNSRERMKRIEEGIKELGSQILKEHPVENTQLQNEKLYLYYLQNGRDMYVDQELDINRLSDYDVDHIVPQSFLKDDSIDNKVLTRSDKARGKSDNVPSEEVVKKMKNYWRQLLNAKLITQRKFDNLTKAERGGLSELDKAGFIKRQLVETRQITKHVAQILDSRMNTKYDENDKLIREVKVITLKSKLVSDFRKDFQFYKVREINNYHHAHDAYLNAVVGTALIKKYPKLESEFVYGDYKVYDVRKMIAKSEQEIGKATAKYFFYSNIMNFFKTEITLANGEIRKRPLIETNGETGEIVWDKGRDFATVRKVLSMPQVNIVKKTEVQTGGFSKESILPKRNSDKLIARKKDWDPKKYGGFDSPTVAYSVLVVAKVEKGKSKKLKSVKELLGITIMERSSFEKNPIDFLEAKGYKEVKKDLIIKLPKYSLFELENGRKRMLASAGELQKGNELALPSKYVNFLYLASHYEKLKGSPEDNEQKQLFVEQHKHYLDEIIEQISEFSKRVILADANLDKVLSAYNKHRDKPIREQAENIIHLFTLTNLGAPAAFKYFDTTIDRKRYTSTKEVLDATLIHQSITGLYETRIDLSQLGGDGGEAAAKGGSGGTLNIEDEYRLHETSKGPDVPLGSTWLSDFPQAWAETGGMGLAFRQAPLIISLKATSTPVSIKQYPMSQEARLGIKPHIQRLLDQGILVPCQSPWNTPLLPVKKPGTNDYRPVQDLREVNKRVEDIHPTVPNPYNLLSGLPPSHQWYTVLDLKDAFFCLRLHPTSQSLFAFEWKDPEMGISGQLTWTRLPQGFKNSPTLFNEALHRDLADFRIQHPDLILLQYVDDLLLAATSELDCQQGTRALLQTLGDLGYRASAKKAQICQKQVKYLGYLLKEGQRWLTEARKETVMGQPTPKTPRQLREFLGKAGLCRLFIPGFAEMAAPLYPLTKPGTLFKWGPDQQKAYQEIKQALLTAPALGLPDLTKPFELFVDEKQGYAKGVLTQKLGPWRRPVAYLSKKLDPVAAGWPPCLRMVAAIAVLTKDVGKLTMGQPLVILAPHAVEALVKQPPDRWLSNARMTHYQALLLDTDRVQFGPIVALNPATLLPLPEEGLQHDCLDILAEAHGTRPDLTDQPLPDADHTWYTDGSSFLQEGQRRAGAAVTTETEVIWAKALPAGTSAQRAELIALTQALKMAAGKKLNVYTDSRYAFATAHIHGEIYRRRGWLTSEGKEIKNKDEILALLKALFLPKRLSIIHCPGHQKGNHAEARGNRMADQAAREVATRETPETSTLLAGKRTADGSEFEKRTADGSEFESPKKKAKVE

SEQ ID NO: 2436 - protein, 2091 aa, synthetic construct
MPAAKRVKLDGGDKKYSIGLDIGTNSVGWAVITDEYKVPSKKFKVLGNTDRHSIKKNLIGALLFDSGETAEATRLKRTARRRYTRRKNRICYLQEIFSNEMAKVDDSFFHRLEESFLVEEDKKHERHPIFGNIVDEVAYHEKYPTIYHLRKKLVDSTDKADLRLIYLALAHMIKFRGHFLIEGDLNPDNSDVDKLFIQLVQTYNQLFEENPINASGVDAKAILSARLSKSRRLENLIAQLPGEKKNGLFGNLIALSLGLTPNFKSNFDLAEDAKLQLSKDTYDDDLDNLLAQIGDQYADLFLAAKNLSDAILLSDILRVNTEITKAPLSASMIKRYDEHHQDLTLLKALVRQQLPEKYKEIFFDQSKNGYAGYIDGGASQEEFYKFIKPILEKMDGTEELLVKLNREDLLRKQRTFDNGSIPHQIHLGELHAILRRQEDFYPFLKDNREKIEKILTFRIPYYVGPLARGNSRFAWMTRKSEETITPWNFEEVVDKGASAQSFIERMTNFDKNLPNEKVLPKHSLLYEYFTVYNELTKVKYVTEGMRKPAFLSGEQKKAIVDLLFKTNRKVTVKQLKEDYFKKIECFDSVEISGVEDRFNASLGTYHDLLKIIKDKDFLDNEENEDILEDIVLTLTLFEDREMIEERLKTYAHLFDDKVMKQLKRRRYTGWGRLSRKLINGIRDKQSGKTILDFLKSDGFANRNFMQLIHDDSLTFKEDIQKAQVSGQGDSLHEHIANLAGSPAIKKGILQTVKVVDELVKVMGRHKPENIVIEMARENQTTQKGQKNSRERMKRIEEGIKELGSQILKEHPVENTQLQNEKLYLYYLQNGRDMYVDQELDINRLSDYDVDHIVPQSFLKDDSIDNKVLTRSDKARGKSDNVPSEEVVKKMKNYWRQLLNAKLITQRKFDNLTKAERGGLSELDKAGFIKRQLVETRQITKHVAQILDSRMNTKYDENDKLIREVKVITLKSKLVSDFRKDFQFYKVREINNYHHAHDAYLNAVVGTALIKKYPKLESEFVYGDYKVYDVRKMIAKSEQEIGKATAKYFFYSNIMNFFKTEITLANGEIRKRPLIETNGETGEIVWDKGRDFATVRKVLSMPQVNIVKKTEVQTGGFSKESILPKRNSDKLIARKKDWDPKKYGGFDSPTVAYSVLVVAKVEKGKSKKLKSVKELLGITIMERSSFEKNPIDFLEAKGYKEVKKDLIIKLPKYSLFELENGRKRMLASAGELQKGNELALPSKYVNFLYLASHYEKLKGSPEDNEQKQLFVEQHKHYLDEIIEQISEFSKRVILADANLDKVLSAYNKHRDKPIREQAENIIHLFTLTNLGAPAAFKYFDTTIDRKRYTSTKEVLDATLIHQSITGLYETRIDLSQLGGDGGGGGGGSGGTLNIEDEYRLHETSKGPDVPLGSTWLSDFPQAWAETGGMGLAFRQAPLIISLKATSTPVSIKQYPMSQEARLGIKPHIQRLLDQGILVPCQSPWNTPLLPVKKPGTNDYRPVQDLREVNKRVEDIHPTVPNPYNLLSGLPPSHQWYTVLDLKDAFFCLRLHPTSQSLFAFEWKDPEMGISGQLTWTRLPQGFKNSPTLFNEALHRDLADFRIQHPDLILLQYVDDLLLAATSELDCQQGTRALLQTLGDLGYRASAKKAQICQKQVKYLGYLLKEGQRWLTEARKETVMGQPTPKTPRQLREFLGKAGLCRLFIPGFAEMAAPLYPLTKPGTLFKWGPDQQKAYQEIKQALLTAPALGLPDLTKPFELFVDEKQGYAKGVLTQKLGPWRRPVAYLSKKLDPVAAGWPPCLRMVAAIAVLTKDVGKLTMGQPLVILAPHAVEALVKQPPDRWLSNARMTHYQALLLDTDRVQFGPIVALNPATLLPLPEEGLQHDCLDILAEAHGTRPDLTDQPLPDADHTWYTDGSSFLQEGQRRAGAAVTTETEVIWAKALPAGTSAQRAELIALTQALKMAAGKKLNVYTDSRYAFATAHIHGEIYRRRGWLTSEGKEIKNKDEILALLKALFLPKRLSIIHCPGHQKGNHAEARGNRMADQAAREVATRETPETSTLLAGKRTADGSEFEKRTADGSEFESPKKKAKVE

SEQ ID NO: 2437 - protein, 2096 aa, synthetic construct
MPAAKRVKLDGGDKKYSIGLDIGTNSVGWAVITDEYKVPSKKFKVLGNTDRHSIKKNLIGALLFDSGETAEATRLKRTARRRYTRRKNRICYLQEIFSNEMAKVDDSFFHRLEESFLVEEDKKHERHPIFGNIVDEVAYHEKYPTIYHLRKKLVDSTDKADLRLIYLALAHMIKFRGHFLIEGDLNPDNSDVDKLFIQLVQTYNQLFEENPINASGVDAKAILSARLSKSRRLENLIAQLPGEKKNGLFGNLIALSLGLTPNFKSNFDLAEDAKLQLSKDTYDDDLDNLLAQIGDQYADLFLAAKNLSDAILLSDILRVNTEITKAPLSASMIKRYDEHHQDLTLLKALVRQQLPEKYKEIFFDQSKNGYAGYIDGGASQEEFYKFIKPILEKMDGTEELLVKLNREDLLRKQRTFDNGSIPHQIHLGELHAILRRQEDFYPFLKDNREKIEKILTFRIPYYVGPLARGNSRFAWMTRKSEETITPWNFEEVVDKGASAQSFIERMTNFDKNLPNEKVLPKHSLLYEYFTVYNELTKVKYVTEGMRKPAFLSGEQKKAIVDLLFKTNRKVTVKQLKEDYFKKIECFDSVEISGVEDRFNASLGTYHDLLKIIKDKDFLDNEENEDILEDIVLTLTLFEDREMIEERLKTYAHLFDDKVMKQLKRRRYTGWGRLSRKLINGIRDKQSGKTILDFLKSDGFANRNFMQLIHDDSLTFKEDIQKAQVSGQGDSLHEHIANLAGSPAIKKGILQTVKVVDELVKVMGRHKPENIVIEMARENQTTQKGQKNSRERMKRIEEGIKELGSQILKEHPVENTQLQNEKLYLYYLQNGRDMYVDQELDINRLSDYDVDHIVPQSFLKDDSIDNKVLTRSDKARGKSDNVPSEEVVKKMKNYWRQLLNAKLITQRKFDNLTKAERGGLSELDKAGFIKRQLVETRQITKHVAQILDSRMNTKYDENDKLIREVKVITLKSKLVSDFRKDFQFYKVREINNYHHAHDAYLNAVVGTALIKKYPKLESEFVYGDYKVYDVRKMIAKSEQEIGKATAKYFFYSNIMNFFKTEITLANGEIRKRPLIETNGETGEIVWDKGRDFATVRKVLSMPQVNIVKKTEVQTGGFSKESILPKRNSDKLIARKKDWDPKKYGGFDSPTVAYSVLVVAKVEKGKSKKLKSVKELLGITIMERSSFEKNPIDFLEAKGYKEVKKDLIIKLPKYSLFELENGRKRMLASAGELQKGNELALPSKYVNFLYLASHYEKLKGSPEDNEQKQLFVEQHKHYLDEIIEQISEFSKRVILADANLDKVLSAYNKHRDKPIREQAENIIHLFTLTNLGAPAAFKYFDTTIDRKRYTSTKEVLDATLIHQSITGLYETRIDLSQLGGDGGGSSGGSEAAAKGGTLNIEDEYRLHETSKGPDVPLGSTWLSDFPQAWAETGGMGLAFRQAPLIISLKATSTPVSIKQYPMSQEARLGIKPHIQRLLDQGILVPCQSPWNTPLLPVKKPGTNDYRPVQDLREVNKRVEDIHPTVPNPYNLLSGLPPSHQWYTVLDLKDAFFCLRLHPTSQSLFAFEWKDPEMGISGQLTWTRLPQGFKNSPTLFNEALHRDLADFRIQHPDLILLQYVDDLLLAATSELDCQQGTRALLQTLGDLGYRASAKKAQICQKQVKYLGYLLKEGQRWLTEARKETVMGQPTPKTPRQLREFLGKAGLCRLFIPGFAEMAAPLYPLTKPGTLFKWGPDQQKAYQEIKQALLTAPALGLPDLTKPFELFVDEKQGYAKGVLTQKLGPWRRPVAYLSKKLDPVAAGWPPCLRMVAAIAVLTKDVGKLTMGQPLVILAPHAVEALVKQPPDRWLSNARMTHYQALLLDTDRVQFGPIVALNPATLLPLPEEGLQHDCLDILAEAHGTRPDLTDQPLPDADHTWYTDGSSFLQEGQRRAGAAVTTETEVIWAKALPAGTSAQRAELIALTQALKMAAGKKLNVYTDSRYAFATAHIHGEIYRRRGWLTSEGKEIKNKDEILALLKALFLPKRLSIIHCPGHQKGNHAEARGNRMADQAAREVATRETPETSTLLAGKRTADGSEFEKRTADGSEFESPKKKAKVE

SEQ ID NO: 2438 - protein, 2094 aa, synthetic construct
MPAAKRVKLDGGDKKYSIGLDIGTNSVGWAVITDEYKVPSKKFKVLGNTDRHSIKKNLIGALLFDSGETAEATRLKRTARRRYTRRKNRICYLQEIFSNEMAKVDDSFFHRLEESFLVEEDKKHERHPIFGNIVDEVAYHEKYPTIYHLRKKLVDSTDKADLRLIYLALAHMIKFRGHFLIEGDLNPDNSDVDKLFIQLVQTYNQLFEENPINASGVDAKAILSARLSKSRRLENLIAQLPGEKKNGLFGNLIALSLGLTPNFKSNFDLAEDAKLQLSKDTYDDDLDNLLAQIGDQYADLFLAAKNLSDAILLSDILRVNTEITKAPLSASMIKRYDEHHQDLTLLKALVRQQLPEKYKEIFFDQSKNGYAGYIDGGASQEEFYKFIKPILEKMDGTEELLVKLNREDLLRKQRTFDNGSIPHQIHLGELHAILRRQEDFYPFLKDNREKIEKILTFRIPYYVGPLARGNSRFAWMTRKSEETITPWNFEEVVDKGASAQSFIERMTNFDKNLPNEKVLPKHSLLYEYFTVYNELTKVKYVTEGMRKPAFLSGEQKKAIVDLLFKTNRKVTVKQLKEDYFKKIECFDSVEISGVEDRFNASLGTYHDLLKIIKDKDFLDNEENEDILEDIVLTLTLFEDREMIEERLKTYAHLFDDKVMKQLKRRRYTGWGRLSRKLINGIRDKQSGKTILDFLKSDGFANRNFMQLIHDDSLTFKEDIQKAQVSGQGDSLHEHIANLAGSPAIKKGILQTVKVVDELVKVMGRHKPENIVIEMARENQTTQKGQKNSRERMKRIEEGIKELGSQILKEHPVENTQLQNEKLYLYYLQNGRDMYVDQELDINRLSDYDVDHIVPQSFLKDDSIDNKVLTRSDKARGKSDNVPSEEVVKKMKNYWRQLLNAKLITQRKFDNLTKAERGGLSELDKAGFIKRQLVETRQITKHVAQILDSRMNTKYDENDKLIREVKVITLKSKLVSDFRKDFQFYKVREINNYHHAHDAYLNAVVGTALIKKYPKLESEFVYGDYKVYDVRKMIAKSEQEIGKATAKYFFYSNIMNFFKTEITLANGEIRKRPLIETNGETGEIVWDKGRDFATVRKVLSMPQVNIVKKTEVQTGGFSKESILPKRNSDKLIARKKDWDPKKYGGFDSPTVAYSVLVVAKVEKGKSKKLKSVKELLGITIMERSSFEKNPIDFLEAKGYKEVKKDLIIKLPKYSLFELENGRKRMLASAGELQKGNELALPSKYVNFLYLASHYEKLKGSPEDNEQKQLFVEQHKHYLDEIIEQISEFSKRVILADANLDKVLSAYNKHRDKPIREQAENIIHLFTLTNLGAPAAFKYFDTTIDRKRYTSTKEVLDATLIHQSITGLYETRIDLSQLGGDGGGSSGGGGGSGGTLNIEDEYRLHETSKGPDVPLGSTWLSDFPQAWAETGGMGLAFRQAPLIISLKATSTPVSIKQYPMSQEARLGIKPHIQRLLDQGILVPCQSPWNTPLLPVKKPGTNDYRPVQDLREVNKRVEDIHPTVPNPYNLLSGLPPSHQWYTVLDLKDAFFCLRLHPTSQSLFAFEWKDPEMGISGQLTWTRLPQGFKNSPTLFNEALHRDLADFRIQHPDLILLQYVDDLLLAATSELDCQQGTRALLQTLGDLGYRASAKKAQICQKQVKYLGYLLKEGQRWLTEARKETVMGQPTPKTPRQLREFLGKAGLCRLFIPGFAEMAAPLYPLTKPGTLFKWGPDQQKAYQEIKQALLTAPALGLPDLTKPFELFVDEKQGYAKGVLTQKLGPWRRPVAYLSKKLDPVAAGWPPCLRMVAAIAVLTKDVGKLTMGQPLVILAPHAVEALVKQPPDRWLSNARMTHYQALLLDTDRVQFGPIVALNPATLLPLPEEGLQHDCLDILAEAHGTRPDLTDQPLPDADHTWYTDGSSFLQEGQRRAGAAVTTETEVIWAKALPAGTSAQRAELIALTQALKMAAGKKLNVYTDSRYAFATAHIHGEIYRRRGWLTSEGKEIKNKDEILALLKALFLPKRLSIIHCPGHQKGNHAEARGNRMADQAAREVATRETPETSTLLAGKRTADGSEFEKRTADGSEFESPKKKAKVE

SEQ ID NO: 2439 - protein, 2091 aa, synthetic construct
MPAAKRVKLDGGDKKYSIGLDIGTNSVGWAVITDEYKVPSKKFKVLGNTDRHSIKKNLIGALLFDSGETAEATRLKRTARRRYTRRKNRICYLQEIFSNEMAKVDDSFFHRLEESFLVEEDKKHERHPIFGNIVDEVAYHEKYPTIYHLRKKLVDSTDKADLRLIYLALAHMIKFRGHFLIEGDLNPDNSDVDKLFIQLVQTYNQLFEENPINASGVDAKAILSARLSKSRRLENLIAQLPGEKKNGLFGNLIALSLGLTPNFKSNFDLAEDAKLQLSKDTYDDDLDNLLAQIGDQYADLFLAAKNLSDAILLSDILRVNTEITKAPLSASMIKRYDEHHQDLTLLKALVRQQLPEKYKEIFFDQSKNGYAGYIDGGASQEEFYKFIKPILEKMDGTEELLVKLNREDLLRKQRTFDNGSIPHQIHLGELHAILRRQEDFYPFLKDNREKIEKILTFRIPYYVGPLARGNSRFAWMTRKSEETITPWNFEEVVDKGASAQSFIERMTNFDKNLPNEKVLPKHSLLYEYFTVYNELTKVKYVTEGMRKPAFLSGEQKKAIVDLLFKTNRKVTVKQLKEDYFKKIECFDSVEISGVEDRFNASLGTYHDLLKIIKDKDFLDNEENEDILEDIVLTLTLFEDREMIEERLKTYAHLFDDKVMKQLKRRRYTGWGRLSRKLINGIRDKQSGKTILDFLKSDGFANRNFMQLIHDDSLTFKEDIQKAQVSGQGDSLHEHIANLAGSPAIKKGILQTVKVVDELVKVMGRHKPENIVIEMARENQTTQKGQKNSRERMKRIEEGIKELGSQILKEHPVENTQLQNEKLYLYYLQNGRDMYVDQELDINRLSDYDVDHIVPQSFLKDDSIDNKVLTRSDKARGKSDNVPSEEVVKKMKNYWRQLLNAKLITQRKFDNLTKAERGGLSELDKAGFIKRQLVETRQITKHVAQILDSRMNTKYDENDKLIREVKVITLKSKLVSDFRKDFQFYKVREINNYHHAHDAYLNAVVGTALIKKYPKLESEFVYGDYKVYDVRKMIAKSEQEIGKATAKYFFYSNIMNFFKTEITLANGEIRKRPLIETNGETGEIVWDKGRDFATVRKVLSMPQVNIVKKTEVQTGGFSKESILPKRNSDKLIARKKDWDPKKYGGFDSPTVAYSVLVVAKVEKGKSKKLKSVKELLGITIMERSSFEKNPIDFLEAKGYKEVKKDLIIKLPKYSLFELENGRKRMLASAGELQKGNELALPSKYVNFLYLASHYEKLKGSPEDNEQKQLFVEQHKHYLDEIIEQISEFSKRVILADANLDKVLSAYNKHRDKPIREQAENIIHLFTLTNLGAPAAFKYFDTTIDRKRYTSTKEVLDATLIHQSITGLYETRIDLSQLGGDGGGGSGSSGGTLNIEDEYRLHETSKGPDVPLGSTWLSDFPQAWAETGGMGLAFRQAPLIISLKATSTPVSIKQYPMSQEARLGIKPHIQRLLDQGILVPCQSPWNTPLLPVKKPGTNDYRPVQDLREVNKRVEDIHPTVPNPYNLLSGLPPSHQWYTVLDLKDAFFCLRLHPTSQSLFAFEWKDPEMGISGQLTWTRLPQGFKNSPTLFNEALHRDLADFRIQHPDLILLQYVDDLLLAATSELDCQQGTRALLQTLGDLGYRASAKKAQICQKQVKYLGYLLKEGQRWLTEARKETVMGQPTPKTPRQLREFLGKAGLCRLFIPGFAEMAAPLYPLTKPGTLFKWGPDQQKAYQEIKQALLTAPALGLPDLTKPFELFVDEKQGYAKGVLTQKLGPWRRPVAYLSKKLDPVAAGWPPCLRMVAAIAVLTKDVGKLTMGQPLVILAPHAVEALVKQPPDRWLSNARMTHYQALLLDTDRVQFGPIVALNPATLLPLPEEGLQHDCLDILAEAHGTRPDLTDQPLPDADHTWYTDGSSFLQEGQRRAGAAVTTETEVIWAKALPAGTSAQRAELIALTQALKMAAGKKLNVYTDSRYAFATAHIHGEIYRRRGWLTSEGKEIKNKDEILALLKALFLPKRLSIIHCPGHQKGNHAEARGNRMADQAAREVATRETPETSTLLAGKRTADGSEFEKRTADGSEFESPKKKAKVE

SEQ ID NO: 2440 - protein, 2096 aa, synthetic construct
MPAAKRVKLDGGDKKYSIGLDIGTNSVGWAVITDEYKVPSKKFKVLGNTDRHSIKKNLIGALLFDSGETAEATRLKRTARRRYTRRKNRICYLQEIFSNEMAKVDDSFFHRLEESFLVEEDKKHERHPIFGNIVDEVAYHEKYPTIYHLRKKLVDSTDKADLRLIYLALAHMIKFRGHFLIEGDLNPDNSDVDKLFIQLVQTYNQLFEENPINASGVDAKAILSARLSKSRRLENLIAQLPGEKKNGLFGNLIALSLGLTPNFKSNFDLAEDAKLQLSKDTYDDDLDNLLAQIGDQYADLFLAAKNLSDAILLSDILRVNTEITKAPLSASMIKRYDEHHQDLTLLKALVRQQLPEKYKEIFFDQSKNGYAGYIDGGASQEEFYKFIKPILEKMDGTEELLVKLNREDLLRKQRTFDNGSIPHQIHLGELHAILRRQEDFYPFLKDNREKIEKILTFRIPYYVGPLARGNSRFAWMTRKSEETITPWNFEEVVDKGASAQSFIERMTNFDKNLPNEKVLPKHSLLYEYFTVYNELTKVKYVTEGMRKPAFLSGEQKKAIVDLLFKTNRKVTVKQLKEDYFKKIECFDSVEISGVEDRFNASLGTYHDLLKIIKDKDFLDNEENEDILEDIVLTLTLFEDREMIEERLKTYAHLFDDKVMKQLKRRRYTGWGRLSRKLINGIRDKQSGKTILDFLKSDGFANRNFMQLIHDDSLTFKEDIQKAQVSGQGDSLHEHIANLAGSPAIKKGILQTVKVVDELVKVMGRHKPENIVIEMARENQTTQKGQKNSRERMKRIEEGIKELGSQILKEHPVENTQLQNEKLYLYYLQNGRDMYVDQELDINRLSDYDVDHIVPQSFLKDDSIDNKVLTRSDKARGKSDNVPSEEVVKKMKNYWRQLLNAKLITQRKFDNLTKAERGGLSELDKAGFIKRQLVETRQITKHVAQILDSRMNTKYDENDKLIREVKVITLKSKLVSDFRKDFQFYKVREINNYHHAHDAYLNAVVGTALIKKYPKLESEFVYGDYKVYDVRKMIAKSEQEIGKATAKYFFYSNIMNFFKTEITLANGEIRKRPLIETNGETGEIVWDKGRDFATVRKVLSMPQVNIVKKTEVQTGGFSKESILPKRNSDKLIARKKDWDPKKYGGFDSPTVAYSVLVVAKVEKGKSKKLKSVKELLGITIMERSSFEKNPIDFLEAKGYKEVKKDLIIKLPKYSLFELENGRKRMLASAGELQKGNELALPSKYVNFLYLASHYEKLKGSPEDNEQKQLFVEQHKHYLDEIIEQISEFSKRVILADANLDKVLSAYNKHRDKPIREQAENIIHLFTLTNLGAPAAFKYFDTTIDRKRYTSTKEVLDATLIHQSITGLYETRIDLSQLGGDGGPAPGGGEAAAKGGTLNIEDEYRLHETSKGPDVPLGSTWLSDFPQAWAETGGMGLAVRQAPLIIPLKATSTPVSIKQYPMSQEARLGIKPHIQRLLDQGILVPCQSPWNTPLLPVKKPGTNDYRPVQDLREVNKRVEDIHPTVPNPYNLLSGLPPSHQWYTVLDLKDAFFCLRLHPTSQSLFAFEWRDPEMGISGQLTWTRLPQGFKNSPTLFNEALHRDLADFRIQHPDLILLQYVDDLLLAATSELDCQQGTRALLQTLGDLGYRASAKKAQICQKQVKYLGYLLKEGQRWLTEARKETVMGQPTPKTPRQLREFLGTAGFCRLWIPGFAEMAAPLYPLTKPGTLFEWGPDQQKAYQEIKQALLTAPALGLPDLTKPFELFVDEKQGYAKGVLTQKLGPWRRPVAYLSKKLDPVAAGWPPCLRMVAAIAVLTKDAGKLTMGQPLVILAPHAVEALVKQPPDRWLSNARMTHYQALLLDTDRVQFGPIVALNPATLLPLPEEGLQHDCLDILAEAHGTRPDLTDQPLPDADHTWYTDGSSFLQEGQRKAGAAVTTETEVVWAKALPAGTSAQRAELIALTQALKMAEGKKLNVYTDSRYAFATAHIHGEIYRRRGWLTSEGKEIKNKDEILALLKALFLPKRLSIIHCPGHQKGNRAEARGNRMADQAAREVATRETPETSTLLAGKRTADGSEFEKRTADGSEFESPKKKAKVE

SEQ ID NO: 2441 - protein, 2110 aa, synthetic construct
MPAAKRVKLDGGDKKYSIGLDIGTNSVGWAVITDEYKVPSKKFKVLGNTDRHSIKKNLIGALLFDSGETAEATRLKRTARRRYTRRKNRICYLQEIFSNEMAKVDDSFFHRLEESFLVEEDKKHERHPIFGNIVDEVAYHEKYPTIYHLRKKLVDSTDKADLRLIYLALAHMIKFRGHFLIEGDLNPDNSDVDKLFIQLVQTYNQLFEENPINASGVDAKAILSARLSKSRRLENLIAQLPGEKKNGLFGNLIALSLGLTPNFKSNFDLAEDAKLQLSKDTYDDDLDNLLAQIGDQYADLFLAAKNLSDAILLSDILRVNTEITKAPLSASMIKRYDEHHQDLTLLKALVRQQLPEKYKEIFFDQSKNGYAGYIDGGASQEEFYKFIKPILEKMDGTEELLVKLNREDLLRKQRTFDNGSIPHQIHLGELHAILRRQEDFYPFLKDNREKIEKILTFRIPYYVGPLARGNSRFAWMTRKSEETITPWNFEEVVDKGASAQSFIERMTNFDKNLPNEKVLPKHSLLYEYFTVYNELTKVKYVTEGMRKPAFLSGEQKKAIVDLLFKTNRKVTVKQLKEDYFKKIECFDSVEISGVEDRFNASLGTYHDLLKIIKDKDFLDNEENEDILEDIVLTLTLFEDREMIEERLKTYAHLFDDKVMKQLKRRRYTGWGRLSRKLINGIRDKQSGKTILDFLKSDGFANRNFMQLIHDDSLTFKEDIQKAQVSGQGDSLHEHIANLAGSPAIKKGILQTVKVVDELVKVMGRHKPENIVIEMARENQTTQKGQKNSRERMKRIEEGIKELGSQILKEHPVENTQLQNEKLYLYYLQNGRDMYVDQELDINRLSDYDVDHIVPQSFLKDDSIDNKVLTRSDKARGKSDNVPSEEVVKKMKNYWRQLLNAKLITQRKFDNLTKAERGGLSELDKAGFIKRQLVETRQITKHVAQILDSRMNTKYDENDKLIREVKVITLKSKLVSDFRKDFQFYKVREINNYHHAHDAYLNAVVGTALIKKYPKLESEFVYGDYKVYDVRKMIAKSEQEIGKATAKYFFYSNIMNFFKTEITLANGEIRKRPLIETNGETGEIVWDKGRDFATVRKVLSMPQVNIVKKTEVQTGGFSKESILPKRNSDKLIARKKDWDPKKYGGFDSPTVAYSVLVVAKVEKGKSKKLKSVKELLGITIMERSSFEKNPIDFLEAKGYKEVKKDLIIKLPKYSLFELENGRKRMLASAGELQKGNELALPSKYVNFLYLASHYEKLKGSPEDNEQKQLFVEQHKHYLDEIIEQISEFSKRVILADANLDKVLSAYNKHRDKPIREQAENIIHLFTLTNLGAPAAFKYFDTTIDRKRYTSTKEVLDATLIHQSITGLYETRIDLSQLGGDGGGGGGSGGGGSGGGGSGGGGSGGGGSGGTLNIEDEYRLHETSKGPDVPLGSTWLSDFPQAWAETGGMGLAVRQAPLIIPLKATSTPVSIKQYPMSQEARLGIKPHIQRLLDQGILVPCQSPWNTPLLPVKKPGTNDYRPVQDLREVNKRVEDIHPTVPNPYNLLSGLPPSHQWYTVLDLKDAFFCLRLHPTSQSLFAFEWRDPEMGISGQLTWTRLPQGFKNSPTLFNEALHRDLADFRIQHPDLILLQYVDDLLLAATSELDCQQGTRALLQTLGDLGYRASAKKAQICQKQVKYLGYLLKEGQRWLTEARKETVMGQPTPKTPRQLREFLGTAGFCRLWIPGFAEMAAPLYPLTKPGTLFEWGPDQQKAYQEIKQALLTAPALGLPDLTKPFELFVDEKQGYAKGVLTQKLGPWRRPVAYLSKKLDPVAAGWPPCLRMVAAIAVLTKDAGKLTMGQPLVILAPHAVEALVKQPPDRWLSNARMTHYQALLLDTDRVQFGPIVALNPATLLPLPEEGLQHDCLDILAEAHGTRPDLTDQPLPDADHTWYTDGSSFLQEGQRKAGAAVTTETEVVWAKALPAGTSAQRAELIALTQALKMAEGKKLNVYTDSRYAFATAHIHGEIYRRRGWLTSEGKEIKNKDEILALLKALFLPKRLSIIHCPGHQKGNRAEARGNRMADQAAREVATRETPETSTLLAGKRTADGSEFEKRTADGSEFESPKKKAKVE

SEQ ID NO: 2442 - protein, 2088 aa, synthetic construct
MPAAKRVKLDGGDKKYSIGLDIGTNSVGWAVITDEYKVPSKKFKVLGNTDRHSIKKNLIGALLFDSGETAEATRLKRTARRRYTRRKNRICYLQEIFSNEMAKVDDSFFHRLEESFLVEEDKKHERHPIFGNIVDEVAYHEKYPTIYHLRKKLVDSTDKADLRLIYLALAHMIKFRGHFLIEGDLNPDNSDVDKLFIQLVQTYNQLFEENPINASGVDAKAILSARLSKSRRLENLIAQLPGEKKNGLFGNLIALSLGLTPNFKSNFDLAEDAKLQLSKDTYDDDLDNLLAQIGDQYADLFLAAKNLSDAILLSDILRVNTEITKAPLSASMIKRYDEHHQDLTLLKALVRQQLPEKYKEIFFDQSKNGYAGYIDGGASQEEFYKFIKPILEKMDGTEELLVKLNREDLLRKQRTFDNGSIPHQIHLGELHAILRRQEDFYPFLKDNREKIEKILTFRIPYYVGPLARGNSRFAWMTRKSEETITPWNFEEVVDKGASAQSFIERMTNFDKNLPNEKVLPKHSLLYEYFTVYNELTKVKYVTEGMRKPAFLSGEQKKAIVDLLFKTNRKVTVKQLKEDYFKKIECFDSVEISGVEDRFNASLGTYHDLLKIIKDKDFLDNEENEDILEDIVLTLTLFEDREMIEERLKTYAHLFDDKVMKQLKRRRYTGWGRLSRKLINGIRDKQSGKTILDFLKSDGFANRNFMQLIHDDSLTFKEDIQKAQVSGQGDSLHEHIANLAGSPAIKKGILQTVKVVDELVKVMGRHKPENIVIEMARENQTTQKGQKNSRERMKRIEEGIKELGSQILKEHPVENTQLQNEKLYLYYLQNGRDMYVDQELDINRLSDYDVDHIVPQSFLKDDSIDNKVLTRSDKARGKSDNVPSEEVVKKMKNYWRQLLNAKLITQRKFDNLTKAERGGLSELDKAGFIKRQLVETRQITKHVAQILDSRMNTKYDENDKLIREVKVITLKSKLVSDFRKDFQFYKVREINNYHHAHDAYLNAVVGTALIKKYPKLESEFVYGDYKVYDVRKMIAKSEQEIGKATAKYFFYSNIMNFFKTEITLANGEIRKRPLIETNGETGEIVWDKGRDFATVRKVLSMPQVNIVKKTEVQTGGFSKESILPKRNSDKLIARKKDWDPKKYGGFDSPTVAYSVLVVAKVEKGKSKKLKSVKELLGITIMERSSFEKNPIDFLEAKGYKEVKKDLIIKLPKYSLFELENGRKRMLASAGELQKGNELALPSKYVNFLYLASHYEKLKGSPEDNEQKQLFVEQHKHYLDEIIEQISEFSKRVILADANLDKVLSAYNKHRDKPIREQAENIIHLFTLTNLGAPAAFKYFDTTIDRKRYTSTKEVLDATLIHQSITGLYETRIDLSQLGGDGGPAPGGTLNIEDEYRLHETSKGPDVPLGSTWLSDFPQAWAETGGMGLAVRQAPLIIPLKATSTPVSIKQYPMSQEARLGIKPHIQRLLDQGILVPCQSPWNTPLLPVKKPGTNDYRPVQDLREVNKRVEDIHPTVPNPYNLLSGLPPSHQWYTVLDLKDAFFCLRLHPTSQSLFAFEWRDPEMGISGQLTWTRLPQGFKNSPTLFNEALHRDLADFRIQHPDLILLQYVDDLLLAATSELDCQQGTRALLQTLGDLGYRASAKKAQICQKQVKYLGYLLKEGQRWLTEARKETVMGQPTPKTPRQLREFLGTAGFCRLWIPGFAEMAAPLYPLTKPGTLFEWGPDQQKAYQEIKQALLTAPALGLPDLTKPFELFVDEKQGYAKGVLTQKLGPWRRPVAYLSKKLDPVAAGWPPCLRMVAAIAVLTKDAGKLTMGQPLVILAPHAVEALVKQPPDRWLSNARMTHYQALLLDTDRVQFGPIVALNPATLLPLPEEGLQHDCLDILAEAHGTRPDLTDQPLPDADHTWYTDGSSFLQEGQRKAGAAVTTETEVVWAKALPAGTSAQRAELIALTQALKMAEGKKLNVYTDSRYAFATAHIHGEIYRRRGWLTSEGKEIKNKDEILALLKALFLPKRLSIIHCPGHQKGNRAEARGNRMADQAAREVATRETPETSTLLAGKRTADGSEFEKRTADGSEFESPKKKAKVE

SEQ ID NO: 2443 - protein, 2100 aa, synthetic construct
MPAAKRVKLDGGDKKYSIGLDIGTNSVGWAVITDEYKVPSKKFKVLGNTDRHSIKKNLIGALLFDSGETAEATRLKRTARRRYTRRKNRICYLQEIFSNEMAKVDDSFFHRLEESFLVEEDKKHERHPIFGNIVDEVAYHEKYPTIYHLRKKLVDSTDKADLRLIYLALAHMIKFRGHFLIEGDLNPDNSDVDKLFIQLVQTYNQLFEENPINASGVDAKAILSARLSKSRRLENLIAQLPGEKKNGLFGNLIALSLGLTPNFKSNFDLAEDAKLQLSKDTYDDDLDNLLAQIGDQYADLFLAAKNLSDAILLSDILRVNTEITKAPLSASMIKRYDEHHQDLTLLKALVRQQLPEKYKEIFFDQSKNGYAGYIDGGASQEEFYKFIKPILEKMDGTEELLVKLNREDLLRKQRTFDNGSIPHQIHLGELHAILRRQEDFYPFLKDNREKIEKILTFRIPYYVGPLARGNSRFAWMTRKSEETITPWNFEEVVDKGASAQSFIERMTNFDKNLPNEKVLPKHSLLYEYFTVYNELTKVKYVTEGMRKPAFLSGEQKKAIVDLLFKTNRKVTVKQLKEDYFKKIECFDSVEISGVEDRFNASLGTYHDLLKIIKDKDFLDNEENEDILEDIVLTLTLFEDREMIEERLKTYAHLFDDKVMKQLKRRRYTGWGRLSRKLINGIRDKQSGKTILDFLKSDGFANRNFMQLIHDDSLTFKEDIQKAQVSGQGDSLHEHIANLAGSPAIKKGILQTVKVVDELVKVMGRHKPENIVIEMARENQTTQKGQKNSRERMKRIEEGIKELGSQILKEHPVENTQLQNEKLYLYYLQNGRDMYVDQELDINRLSDYDVDHIVPQSFLKDDSIDNKVLTRSDKARGKSDNVPSEEVVKKMKNYWRQLLNAKLITQRKFDNLTKAERGGLSELDKAGFIKRQLVETRQITKHVAQILDSRMNTKYDENDKLIREVKVITLKSKLVSDFRKDFQFYKVREINNYHHAHDAYLNAVVGTALIKKYPKLESEFVYGDYKVYDVRKMIAKSEQEIGKATAKYFFYSNIMNFFKTEITLANGEIRKRPLIETNGETGEIVWDKGRDFATVRKVLSMPQVNIVKKTEVQTGGFSKESILPKRNSDKLIARKKDWDPKKYGGFDSPTVAYSVLVVAKVEKGKSKKLKSVKELLGITIMERSSFEKNPIDFLEAKGYKEVKKDLIIKLPKYSLFELENGRKRMLASAGELQKGNELALPSKYVNFLYLASHYEKLKGSPEDNEQKQLFVEQHKHYLDEIIEQISEFSKRVILADANLDKVLSAYNKHRDKPIREQAENIIHLFTLTNLGAPAAFKYFDTTIDRKRYTSTKEVLDATLIHQSITGLYETRIDLSQLGGDGGGSSGSSGSSGSSGSSGGTLNIEDEYRLHETSKGPDVPLGSTWLSDFPQAWAETGGMGLAVRQAPLIIPLKATSTPVSIKQYPMSQEARLGIKPHIQRLLDQGILVPCQSPWNTPLLPVKKPGTNDYRPVQDLREVNKRVEDIHPTVPNPYNLLSGLPPSHQWYTVLDLKDAFFCLRLHPTSQSLFAFEWRDPEMGISGQLTWTRLPQGFKNSPTLFNEALHRDLADFRIQHPDLILLQYVDDLLLAATSELDCQQGTRALLQTLGDLGYRASAKKAQICQKQVKYLGYLLKEGQRWLTEARKETVMGQPTPKTPRQLREFLGTAGFCRLWIPGFAEMAAPLYPLTKPGTLFEWGPDQQKAYQEIKQALLTAPALGLPDLTKPFELFVDEKQGYAKGVLTQKLGPWRRPVAYLSKKLDPVAAGWPPCLRMVAAIAVLTKDAGKLTMGQPLVILAPHAVEALVKQPPDRWLSNARMTHYQALLLDTDRVQFGPIVALNPATLLPLPEEGLQHDCLDILAEAHGTRPDLTDQPLPDADHTWYTDGSSFLQEGQRKAGAAVTTETEVVWAKALPAGTSAQRAELIALTQALKMAEGKKLNVYTDSRYAFATAHIHGEIYRRRGWLTSEGKEIKNKDEILALLKALFLPKRLSIIHCPGHQKGNRAEARGNRMADQAAREVATRETPETSTLLAGKRTADGSEFEKRTADGSEFESPKKKAKVE

SEQ ID NO: 2444 - protein, 2096 aa, synthetic construct
MPAAKRVKLDGGDKKYSIGLDIGTNSVGWAVITDEYKVPSKKFKVLGNTDRHSIKKNLIGALLFDSGETAEATRLKRTARRRYTRRKNRICYLQEIFSNEMAKVDDSFFHRLEESFLVEEDKKHERHPIFGNIVDEVAYHEKYPTIYHLRKKLVDSTDKADLRLIYLALAHMIKFRGHFLIEGDLNPDNSDVDKLFIQLVQTYNQLFEENPINASGVDAKAILSARLSKSRRLENLIAQLPGEKKNGLFGNLIALSLGLTPNFKSNFDLAEDAKLQLSKDTYDDDLDNLLAQIGDQYADLFLAAKNLSDAILLSDILRVNTEITKAPLSASMIKRYDEHHQDLTLLKALVRQQLPEKYKEIFFDQSKNGYAGYIDGGASQEEFYKFIKPILEKMDGTEELLVKLNREDLLRKQRTFDNGSIPHQIHLGELHAILRRQEDFYPFLKDNREKIEKILTFRIPYYVGPLARGNSRFAWMTRKSEETITPWNFEEVVDKGASAQSFIERMTNFDKNLPNEKVLPKHSLLYEYFTVYNELTKVKYVTEGMRKPAFLSGEQKKAIVDLLFKTNRKVTVKQLKEDYFKKIECFDSVEISGVEDRFNASLGTYHDLLKIIKDKDFLDNEENEDILEDIVLTLTLFEDREMIEERLKTYAHLFDDKVMKQLKRRRYTGWGRLSRKLINGIRDKQSGKTILDFLKSDGFANRNFMQLIHDDSLTFKEDIQKAQVSGQGDSLHEHIANLAGSPAIKKGILQTVKVVDELVKVMGRHKPENIVIEMARENQTTQKGQKNSRERMKRIEEGIKELGSQILKEHPVENTQLQNEKLYLYYLQNGRDMYVDQELDINRLSDYDVDHIVPQSFLKDDSIDNKVLTRSDKARGKSDNVPSEEVVKKMKNYWRQLLNAKLITQRKFDNLTKAERGGLSELDKAGFIKRQLVETRQITKHVAQILDSRMNTKYDENDKLIREVKVITLKSKLVSDFRKDFQFYKVREINNYHHAHDAYLNAVVGTALIKKYPKLESEFVYGDYKVYDVRKMIAKSEQEIGKATAKYFFYSNIMNFFKTEITLANGEIRKRPLIETNGETGEIVWDKGRDFATVRKVLSMPQVNIVKKTEVQTGGFSKESILPKRNSDKLIARKKDWDPKKYGGFDSPTVAYSVLVVAKVEKGKSKKLKSVKELLGITIMERSSFEKNPIDFLEAKGYKEVKKDLIIKLPKYSLFELENGRKRMLASAGELQKGNELALPSKYVNFLYLASHYEKLKGSPEDNEQKQLFVEQHKHYLDEIIEQISEFSKRVILADANLDKVLSAYNKHRDKPIREQAENIIHLFTLTNLGAPAAFKYFDTTIDRKRYTSTKEVLDATLIHQSITGLYETRIDLSQLGGDGGEAAAKGSSGGSGGTLNIEDEYRLHETSKGPDVPLGSTWLSDFPQAWAETGGMGLAVRQAPLIIPLKATSTPVSIKQYPMSQEARLGIKPHIQRLLDQGILVPCQSPWNTPLLPVKKPGTNDYRPVQDLREVNKRVEDIHPTVPNPYNLLSGLPPSHQWYTVLDLKDAFFCLRLHPTSQSLFAFEWRDPEMGISGQLTWTRLPQGFKNSPTLFNEALHRDLADFRIQHPDLILLQYVDDLLLAATSELDCQQGTRALLQTLGDLGYRASAKKAQICQKQVKYLGYLLKEGQRWLTEARKETVMGQPTPKTPRQLREFLGTAGFCRLWIPGFAEMAAPLYPLTKPGTLFEWGPDQQKAYQEIKQALLTAPALGLPDLTKPFELFVDEKQGYAKGVLTQKLGPWRRPVAYLSKKLDPVAAGWPPCLRMVAAIAVLTKDAGKLTMGQPLVILAPHAVEALVKQPPDRWLSNARMTHYQALLLDTDRVQFGPIVALNPATLLPLPEEGLQHDCLDILAEAHGTRPDLTDQPLPDADHTWYTDGSSFLQEGQRKAGAAVTTETEVVWAKALPAGTSAQRAELIALTQALKMAEGKKLNVYTDSRYAFATAHIHGEIYRRRGWLTSEGKEIKNKDEILALLKALFLPKRLSIIHCPGHQKGNRAEARGNRMADQAAREVATRETPETSTLLAGKRTADGSEFEKRTADGSEFESPKKKAKVE

SEQ ID NO: 2445 - protein, 2091 aa, synthetic construct
MPAAKRVKLDGGDKKYSIGLDIGTNSVGWAVITDEYKVPSKKFKVLGNTDRHSIKKNLIGALLFDSGETAEATRLKRTARRRYTRRKNRICYLQEIFSNEMAKVDDSFFHRLEESFLVEEDKKHERHPIFGNIVDEVAYHEKYPTIYHLRKKLVDSTDKADLRLIYLALAHMIKFRGHFLIEGDLNPDNSDVDKLFIQLVQTYNQLFEENPINASGVDAKAILSARLSKSRRLENLIAQLPGEKKNGLFGNLIALSLGLTPNFKSNFDLAEDAKLQLSKDTYDDDLDNLLAQIGDQYADLFLAAKNLSDAILLSDILRVNTEITKAPLSASMIKRYDEHHQDLTLLKALVRQQLPEKYKEIFFDQSKNGYAGYIDGGASQEEFYKFIKPILEKMDGTEELLVKLNREDLLRKQRTFDNGSIPHQIHLGELHAILRRQEDFYPFLKDNREKIEKILTFRIPYYVGPLARGNSRFAWMTRKSEETITPWNFEEVVDKGASAQSFIERMTNFDKNLPNEKVLPKHSLLYEYFTVYNELTKVKYVTEGMRKPAFLSGEQKKAIVDLLFKTNRKVTVKQLKEDYFKKIECFDSVEISGVEDRFNASLGTYHDLLKIIKDKDFLDNEENEDILEDIVLTLTLFEDREMIEERLKTYAHLFDDKVMKQLKRRRYTGWGRLSRKLINGIRDKQSGKTILDFLKSDGFANRNFMQLIHDDSLTFKEDIQKAQVSGQGDSLHEHIANLAGSPAIKKGILQTVKVVDELVKVMGRHKPENIVIEMARENQTTQKGQKNSRERMKRIEEGIKELGSQILKEHPVENTQLQNEKLYLYYLQNGRDMYVDQELDINRLSDYDVDHIVPQSFLKDDSIDNKVLTRSDKARGKSDNVPSEEVVKKMKNYWRQLLNAKLITQRKFDNLTKAERGGLSELDKAGFIKRQLVETRQITKHVAQILDSRMNTKYDENDKLIREVKVITLKSKLVSDFRKDFQFYKVREINNYHHAHDAYLNAVVGTALIKKYPKLESEFVYGDYKVYDVRKMIAKSEQEIGKATAKYFFYSNIMNFFKTEITLANGEIRKRPLIETNGETGEIVWDKGRDFATVRKVLSMPQVNIVKKTEVQTGGFSKESILPKRNSDKLIARKKDWDPKKYGGFDSPTVAYSVLVVAKVEKGKSKKLKSVKELLGITIMERSSFEKNPIDFLEAKGYKEVKKDLIIKLPKYSLFELENGRKRMLASAGELQKGNELALPSKYVNFLYLASHYEKLKGSPEDNEQKQLFVEQHKHYLDEIIEQISEFSKRVILADANLDKVLSAYNKHRDKPIREQAENIIHLFTLTNLGAPAAFKYFDTTIDRKRYTSTKEVLDATLIHQSITGLYETRIDLSQLGGDGGGGGPAPGGTLNIEDEYRLHETSKGPDVPLGSTWLSDFPQAWAETGGMGLAVRQAPLIIPLKATSTPVSIKQYPMSQEARLGIKPHIQRLLDQGILVPCQSPWNTPLLPVKKPGTNDYRPVQDLREVNKRVEDIHPTVPNPYNLLSGLPPSHQWYTVLDLKDAFFCLRLHPTSQSLFAFEWRDPEMGISGQLTWTRLPQGFKNSPTLFNEALHRDLADFRIQHPDLILLQYVDDLLLAATSELDCQQGTRALLQTLGDLGYRASAKKAQICQKQVKYLGYLLKEGQRWLTEARKETVMGQPTPKTPRQLREFLGTAGFCRLWIPGFAEMAAPLYPLTKPGTLFEWGPDQQKAYQEIKQALLTAPALGLPDLTKPFELFVDEKQGYAKGVLTQKLGPWRRPVAYLSKKLDPVAAGWPPCLRMVAAIAVLTKDAGKLTMGQPLVILAPHAVEALVKQPPDRWLSNARMTHYQALLLDTDRVQFGPIVALNPATLLPLPEEGLQHDCLDILAEAHGTRPDLTDQPLPDADHTWYTDGSSFLQEGQRKAGAAVTTETEVVWAKALPAGTSAQRAELIALTQALKMAEGKKLNVYTDSRYAFATAHIHGEIYRRRGWLTSEGKEIKNKDEILALLKALFLPKRLSIIHCPGHQKGNRAEARGNRMADQAAREVATRETPETSTLLAGKRTADGSEFEKRTADGSEFESPKKKAKVE

SEQ ID NO: 2446 - protein, 2105 aa, synthetic construct
MPAAKRVKLDGGDKKYSIGLDIGTNSVGWAVITDEYKVPSKKFKVLGNTDRHSIKKNLIGALLFDSGETAEATRLKRTARRRYTRRKNRICYLQEIFSNEMAKVDDSFFHRLEESFLVEEDKKHERHPIFGNIVDEVAYHEKYPTIYHLRKKLVDSTDKADLRLIYLALAHMIKFRGHFLIEGDLNPDNSDVDKLFIQLVQTYNQLFEENPINASGVDAKAILSARLSKSRRLENLIAQLPGEKKNGLFGNLIALSLGLTPNFKSNFDLAEDAKLQLSKDTYDDDLDNLLAQIGDQYADLFLAAKNLSDAILLSDILRVNTEITKAPLSASMIKRYDEHHQDLTLLKALVRQQLPEKYKEIFFDQSKNGYAGYIDGGASQEEFYKFIKPILEKMDGTEELLVKLNREDLLRKQRTFDNGSIPHQIHLGELHAILRRQEDFYPFLKDNREKIEKILTFRIPYYVGPLARGNSRFAWMTRKSEETITPWNFEEVVDKGASAQSFIERMTNFDKNLPNEKVLPKHSLLYEYFTVYNELTKVKYVTEGMRKPAFLSGEQKKAIVDLLFKTNRKVTVKQLKEDYFKKIECFDSVEISGVEDRFNASLGTYHDLLKIIKDKDFLDNEENEDILEDIVLTLTLFEDREMIEERLKTYAHLFDDKVMKQLKRRRYTGWGRLSRKLINGIRDKQSGKTILDFLKSDGFANRNFMQLIHDDSLTFKEDIQKAQVSGQGDSLHEHIANLAGSPAIKKGILQTVKVVDELVKVMGRHKPENIVIEMARENQTTQKGQKNSRERMKRIEEGIKELGSQILKEHPVENTQLQNEKLYLYYLQNGRDMYVDQELDINRLSDYDVDHIVPQSFLKDDSIDNKVLTRSDKARGKSDNVPSEEVVKKMKNYWRQLLNAKLITQRKFDNLTKAERGGLSELDKAGFIKRQLVETRQITKHVAQILDSRMNTKYDENDKLIREVKVITLKSKLVSDFRKDFQFYKVREINNYHHAHDAYLNAVVGTALIKKYPKLESEFVYGDYKVYDVRKMIAKSEQEIGKATAKYFFYSNIMNFFKTEITLANGEIRKRPLIETNGETGEIVWDKGRDFATVRKVLSMPQVNIVKKTEVQTGGFSKESILPKRNSDKLIARKKDWDPKKYGGFDSPTVAYSVLVVAKVEKGKSKKLKSVKELLGITIMERSSFEKNPIDFLEAKGYKEVKKDLIIKLPKYSLFELENGRKRMLASAGELQKGNELALPSKYVNFLYLASHYEKLKGSPEDNEQKQLFVEQHKHYLDEIIEQISEFSKRVILADANLDKVLSAYNKHRDKPIREQAENIIHLFTLTNLGAPAAFKYFDTTIDRKRYTSTKEVLDATLIHQSITGLYETRIDLSQLGGDGGEAAAKEAAAKEAAAKEAAAKGGTLNIEDEYRLHETSKGPDVPLGSTWLSDFPQAWAETGGMGLAVRQAPLIIPLKATSTPVSIKQYPMSQEARLGIKPHIQRLLDQGILVPCQSPWNTPLLPVKKPGTNDYRPVQDLREVNKRVEDIHPTVPNPYNLLSGLPPSHQWYTVLDLKDAFFCLRLHPTSQSLFAFEWRDPEMGISGQLTWTRLPQGFKNSPTLFNEALHRDLADFRIQHPDLILLQYVDDLLLAATSELDCQQGTRALLQTLGDLGYRASAKKAQICQKQVKYLGYLLKEGQRWLTEARKETVMGQPTPKTPRQLREFLGTAGFCRLWIPGFAEMAAPLYPLTKPGTLFEWGPDQQKAYQEIKQALLTAPALGLPDLTKPFELFVDEKQGYAKGVLTQKLGPWRRPVAYLSKKLDPVAAGWPPCLRMVAAIAVLTKDAGKLTMGQPLVILAPHAVEALVKQPPDRWLSNARMTHYQALLLDTDRVQFGPIVALNPATLLPLPEEGLQHDCLDILAEAHGTRPDLTDQPLPDADHTWYTDGSSFLQEGQRKAGAAVTTETEVVWAKALPAGTSAQRAELIALTQALKMAEGKKLNVYTDSRYAFATAHIHGEIYRRRGWLTSEGKEIKNKDEILALLKALFLPKRLSIIHCPGHQKGNRAEARGNRMADQAAREVATRETPETSTLLAGKRTADGSEFEKRTADGSEFESPKKKAKVE

SEQ ID NO: 2447 - protein, 2096 aa, synthetic construct
MPAAKRVKLDGGDKKYSIGLDIGTNSVGWAVITDEYKVPSKKFKVLGNTDRHSIKKNLIGALLFDSGETAEATRLKRTARRRYTRRKNRICYLQEIFSNEMAKVDDSFFHRLEESFLVEEDKKHERHPIFGNIVDEVAYHEKYPTIYHLRKKLVDSTDKADLRLIYLALAHMIKFRGHFLIEGDLNPDNSDVDKLFIQLVQTYNQLFEENPINASGVDAKAILSARLSKSRRLENLIAQLPGEKKNGLFGNLIALSLGLTPNFKSNFDLAEDAKLQLSKDTYDDDLDNLLAQIGDQYADLFLAAKNLSDAILLSDILRVNTEITKAPLSASMIKRYDEHHQDLTLLKALVRQQLPEKYKEIFFDQSKNGYAGYIDGGASQEEFYKFIKPILEKMDGTEELLVKLNREDLLRKQRTFDNGSIPHQIHLGELHAILRRQEDFYPFLKDNREKIEKILTFRIPYYVGPLARGNSRFAWMTRKSEETITPWNFEEVVDKGASAQSFIERMTNFDKNLPNEKVLPKHSLLYEYFTVYNELTKVKYVTEGMRKPAFLSGEQKKAIVDLLFKTNRKVTVKQLKEDYFKKIECFDSVEISGVEDRFNASLGTYHDLLKIIKDKDFLDNEENEDILEDIVLTLTLFEDREMIEERLKTYAHLFDDKVMKQLKRRRYTGWGRLSRKLINGIRDKQSGKTILDFLKSDGFANRNFMQLIHDDSLTFKEDIQKAQVSGQGDSLHEHIANLAGSPAIKKGILQTVKVVDELVKVMGRHKPENIVIEMARENQTTQKGQKNSRERMKRIEEGIKELGSQILKEHPVENTQLQNEKLYLYYLQNGRDMYVDQELDINRLSDYDVDHIVPQSFLKDDSIDNKVLTRSDKARGKSDNVPSEEVVKKMKNYWRQLLNAKLITQRKFDNLTKAERGGLSELDKAGFIKRQLVETRQITKHVAQILDSRMNTKYDENDKLIREVKVITLKSKLVSDFRKDFQFYKVREINNYHHAHDAYLNAVVGTALIKKYPKLESEFVYGDYKVYDVRKMIAKSEQEIGKATAKYFFYSNIMNFFKTEITLANGEIRKRPLIETNGETGEIVWDKGRDFATVRKVLSMPQVNIVKKTEVQTGGFSKESILPKRNSDKLIARKKDWDPKKYGGFDSPTVAYSVLVVAKVEKGKSKKLKSVKELLGITIMERSSFEKNPIDFLEAKGYKEVKKDLIIKLPKYSLFELENGRKRMLASAGELQKGNELALPSKYVNFLYLASHYEKLKGSPEDNEQKQLFVEQHKHYLDEIIEQISEFSKRVILADANLDKVLSAYNKHRDKPIREQAENIIHLFTLTNLGAPAAFKYFDTTIDRKRYTSTKEVLDATLIHQSITGLYETRIDLSQLGGDGGGGSPAPEAAAKGGTLNIEDEYRLHETSKGPDVPLGSTWLSDFPQAWAETGGMGLAVRQAPLIIPLKATSTPVSIKQYPMSQEARLGIKPHIQRLLDQGILVPCQSPWNTPLLPVKKPGTNDYRPVQDLREVNKRVEDIHPTVPNPYNLLSGLPPSHQWYTVLDLKDAFFCLRLHPTSQSLFAFEWRDPEMGISGQLTWTRLPQGFKNSPTLFNEALHRDLADFRIQHPDLILLQYVDDLLLAATSELDCQQGTRALLQTLGDLGYRASAKKAQICQKQVKYLGYLLKEGQRWLTEARKETVMGQPTPKTPRQLREFLGTAGFCRLWIPGFAEMAAPLYPLTKPGTLFEWGPDQQKAYQEIKQALLTAPALGLPDLTKPFELFVDEKQGYAKGVLTQKLGPWRRPVAYLSKKLDPVAAGWPPCLRMVAAIAVLTKDAGKLTMGQPLVILAPHAVEALVKQPPDRWLSNARMTHYQALLLDTDRVQFGPIVALNPATLLPLPEEGLQHDCLDILAEAHGTRPDLTDQPLPDADHTWYTDGSSFLQEGQRKAGAAVTTETEVVWAKALPAGTSAQRAELIALTQALKMAEGKKLNVYTDSRYAFATAHIHGEIYRRRGWLTSEGKEIKNKDEILALLKALFLPKRLSIIHCPGHQKGNRAEARGNRMADQAAREVATRETPETSTLLAGKRTADGSEFEKRTADGSEFESPKKKAKVE

SEQ ID NO: 2448 - protein, 2090 aa, synthetic construct
MPAAKRVKLDGGDKKYSIGLDIGTNSVGWAVITDEYKVPSKKFKVLGNTDRHSIKKNLIGALLFDSGETAEATRLKRTARRRYTRRKNRICYLQEIFSNEMAKVDDSFFHRLEESFLVEEDKKHERHPIFGNIVDEVAYHEKYPTIYHLRKKLVDSTDKADLRLIYLALAHMIKFRGHFLIEGDLNPDNSDVDKLFIQLVQTYNQLFEENPINASGVDAKAILSARLSKSRRLENLIAQLPGEKKNGLFGNLIALSLGLTPNFKSNFDLAEDAKLQLSKDTYDDDLDNLLAQIGDQYADLFLAAKNLSDAILLSDILRVNTEITKAPLSASMIKRYDEHHQDLTLLKALVRQQLPEKYKEIFFDQSKNGYAGYIDGGASQEEFYKFIKPILEKMDGTEELLVKLNREDLLRKQRTFDNGSIPHQIHLGELHAILRRQEDFYPFLKDNREKIEKILTFRIPYYVGPLARGNSRFAWMTRKSEETITPWNFEEVVDKGASAQSFIERMTNFDKNLPNEKVLPKHSLLYEYFTVYNELTKVKYVTEGMRKPAFLSGEQKKAIVDLLFKTNRKVTVKQLKEDYFKKIECFDSVEISGVEDRFNASLGTYHDLLKIIKDKDFLDNEENEDILEDIVLTLTLFEDREMIEERLKTYAHLFDDKVMKQLKRRRYTGWGRLSRKLINGIRDKQSGKTILDFLKSDGFANRNFMQLIHDDSLTFKEDIQKAQVSGQGDSLHEHIANLAGSPAIKKGILQTVKVVDELVKVMGRHKPENIVIEMARENQTTQKGQKNSRERMKRIEEGIKELGSQILKEHPVENTQLQNEKLYLYYLQNGRDMYVDQELDINRLSDYDVDHIVPQSFLKDDSIDNKVLTRSDKARGKSDNVPSEEVVKKMKNYWRQLLNAKLITQRKFDNLTKAERGGLSELDKAGFIKRQLVETRQITKHVAQILDSRMNTKYDENDKLIREVKVITLKSKLVSDFRKDFQFYKVREINNYHHAHDAYLNAVVGTALIKKYPKLESEFVYGDYKVYDVRKMIAKSEQEIGKATAKYFFYSNIMNFFKTEITLANGEIRKRPLIETNGETGEIVWDKGRDFATVRKVLSMPQVNIVKKTEVQTGGFSKESILPKRNSDKLIARKKDWDPKKYGGFDSPTVAYSVLVVAKVEKGKSKKLKSVKELLGITIMERSSFEKNPIDFLEAKGYKEVKKDLIIKLPKYSLFELENGRKRMLASAGELQKGNELALPSKYVNFLYLASHYEKLKGSPEDNEQKQLFVEQHKHYLDEIIEQISEFSKRVILADANLDKVLSAYNKHRDKPIREQAENIIHLFTLTNLGAPAAFKYFDTTIDRKRYTSTKEVLDATLIHQSITGLYETRIDLSQLGGDGGPAPAPGGTLNIEDEYRLHETSKGPDVPLGSTWLSDFPQAWAETGGMGLAVRQAPLIIPLKATSTPVSIKQYPMSQEARLGIKPHIQRLLDQGILVPCQSPWNTPLLPVKKPGTNDYRPVQDLREVNKRVEDIHPTVPNPYNLLSGLPPSHQWYTVLDLKDAFFCLRLHPTSQSLFAFEWRDPEMGISGQLTWTRLPQGFKNSPTLFNEALHRDLADFRIQHPDLILLQYVDDLLLAATSELDCQQGTRALLQTLGDLGYRASAKKAQICQKQVKYLGYLLKEGQRWLTEARKETVMGQPTPKTPRQLREFLGTAGFCRLWIPGFAEMAAPLYPLTKPGTLFEWGPDQQKAYQEIKQALLTAPALGLPDLTKPFELFVDEKQGYAKGVLTQKLGPWRRPVAYLSKKLDPVAAGWPPCLRMVAAIAVLTKDAGKLTMGQPLVILAPHAVEALVKQPPDRWLSNARMTHYQALLLDTDRVQFGPIVALNPATLLPLPEEGLQHDCLDILAEAHGTRPDLTDQPLPDADHTWYTDGSSFLQEGQRKAGAAVTTETEVVWAKALPAGTSAQRAELIALTQALKMAEGKKLNVYTDSRYAFATAHIHGEIYRRRGWLTSEGKEIKNKDEILALLKALFLPKRLSIIHCPGHQKGNRAEARGNRMADQAAREVATRETPETSTLLAGKRTADGSEFEKRTADGSEFESPKKKAKVE

SEQ ID NO: 2449 - protein, 2098 aa, synthetic construct
MPAAKRVKLDGGDKKYSIGLDIGTNSVGWAVITDEYKVPSKKFKVLGNTDRHSIKKNLIGALLFDSGETAEATRLKRTARRRYTRRKNRICYLQEIFSNEMAKVDDSFFHRLEESFLVEEDKKHERHPIFGNIVDEVAYHEKYPTIYHLRKKLVDSTDKADLRLIYLALAHMIKFRGHFLIEGDLNPDNSDVDKLFIQLVQTYNQLFEENPINASGVDAKAILSARLSKSRRLENLIAQLPGEKKNGLFGNLIALSLGLTPNFKSNFDLAEDAKLQLSKDTYDDDLDNLLAQIGDQYADLFLAAKNLSDAILLSDILRVNTEITKAPLSASMIKRYDEHHQDLTLLKALVRQQLPEKYKEIFFDQSKNGYAGYIDGGASQEEFYKFIKPILEKMDGTEELLVKLNREDLLRKQRTFDNGSIPHQIHLGELHAILRRQEDFYPFLKDNREKIEKILTFRIPYYVGPLARGNSRFAWMTRKSEETITPWNFEEVVDKGASAQSFIERMTNFDKNLPNEKVLPKHSLLYEYFTVYNELTKVKYVTEGMRKPAFLSGEQKKAIVDLLFKTNRKVTVKQLKEDYFKKIECFDSVEISGVEDRFNASLGTYHDLLKIIKDKDFLDNEENEDILEDIVLTLTLFEDREMIEERLKTYAHLFDDKVMKQLKRRRYTGWGRLSRKLINGIRDKQSGKTILDFLKSDGFANRNFMQLIHDDSLTFKEDIQKAQVSGQGDSLHEHIANLAGSPAIKKGILQTVKVVDELVKVMGRHKPENIVIEMARENQTTQKGQKNSRERMKRIEEGIKELGSQILKEHPVENTQLQNEKLYLYYLQNGRDMYVDQELDINRLSDYDVDHIVPQSFLKDDSIDNKVLTRSDKARGKSDNVPSEEVVKKMKNYWRQLLNAKLITQRKFDNLTKAERGGLSELDKAGFIKRQLVETRQITKHVAQILDSRMNTKYDENDKLIREVKVITLKSKLVSDFRKDFQFYKVREINNYHHAHDAYLNAVVGTALIKKYPKLESEFVYGDYKVYDVRKMIAKSEQEIGKATAKYFFYSNIMNFFKTEITLANGEIRKRPLIETNGETGEIVWDKGRDFATVRKVLSMPQVNIVKKTEVQTGGFSKESILPKRNSDKLIARKKDWDPKKYGGFDSPTVAYSVLVVAKVEKGKSKKLKSVKELLGITIMERSSFEKNPIDFLEAKGYKEVKKDLIIKLPKYSLFELENGRKRMLASAGELQKGNELALPSKYVNFLYLASHYEKLKGSPEDNEQKQLFVEQHKHYLDEIIEQISEFSKRVILADANLDKVLSAYNKHRDKPIREQAENIIHLFTLTNLGAPAAFKYFDTTIDRKRYTSTKEVLDATLIHQSITGLYETRIDLSQLGGDGGPAPAPAPAPAPAPGGTLNIEDEYRLHETSKGPDVPLGSTWLSDFPQAWAETGGMGLAVRQAPLIIPLKATSTPVSIKQYPMSQEARLGIKPHIQRLLDQGILVPCQSPWNTPLLPVKKPGTNDYRPVQDLREVNKRVEDIHPTVPNPYNLLSGLPPSHQWYTVLDLKDAFFCLRLHPTSQSLFAFEWRDPEMGISGQLTWTRLPQGFKNSPTLFNEALHRDLADFRIQHPDLILLQYVDDLLLAATSELDCQQGTRALLQTLGDLGYRASAKKAQICQKQVKYLGYLLKEGQRWLTEARKETVMGQPTPKTPRQLREFLGTAGFCRLWIPGFAEMAAPLYPLTKPGTLFEWGPDQQKAYQEIKQALLTAPALGLPDLTKPFELFVDEKQGYAKGVLTQKLGPWRRPVAYLSKKLDPVAAGWPPCLRMVAAIAVLTKDAGKLTMGQPLVILAPHAVEALVKQPPDRWLSNARMTHYQALLLDTDRVQFGPIVALNPATLLPLPEEGLQHDCLDILAEAHGTRPDLTDQPLPDADHTWYTDGSSFLQEGQRKAGAAVTTETEVVWAKALPAGTSAQRAELIALTQALKMAEGKKLNVYTDSRYAFATAHIHGEIYRRRGWLTSEGKEIKNKDEILALLKALFLPKRLSIIHCPGHQKGNRAEARGNRMADQAAREVATRETPETSTLLAGKRTADGSEFEKRTADGSEFESPKKKAKVE

SEQ ID NO: 2450 - protein, 2092 aa, synthetic construct
MPAAKRVKLDGGDKKYSIGLDIGTNSVGWAVITDEYKVPSKKFKVLGNTDRHSIKKNLIGALLFDSGETAEATRLKRTARRRYTRRKNRICYLQEIFSNEMAKVDDSFFHRLEESFLVEEDKKHERHPIFGNIVDEVAYHEKYPTIYHLRKKLVDSTDKADLRLIYLALAHMIKFRGHFLIEGDLNPDNSDVDKLFIQLVQTYNQLFEENPINASGVDAKAILSARLSKSRRLENLIAQLPGEKKNGLFGNLIALSLGLTPNFKSNFDLAEDAKLQLSKDTYDDDLDNLLAQIGDQYADLFLAAKNLSDAILLSDILRVNTEITKAPLSASMIKRYDEHHQDLTLLKALVRQQLPEKYKEIFFDQSKNGYAGYIDGGASQEEFYKFIKPILEKMDGTEELLVKLNREDLLRKQRTFDNGSIPHQIHLGELHAILRRQEDFYPFLKDNREKIEKILTFRIPYYVGPLARGNSRFAWMTRKSEETITPWNFEEVVDKGASAQSFIERMTNFDKNLPNEKVLPKHSLLYEYFTVYNELTKVKYVTEGMRKPAFLSGEQKKAIVDLLFKTNRKVTVKQLKEDYFKKIECFDSVEISGVEDRFNASLGTYHDLLKIIKDKDFLDNEENEDILEDIVLTLTLFEDREMIEERLKTYAHLFDDKVMKQLKRRRYTGWGRLSRKLINGIRDKQSGKTILDFLKSDGFANRNFMQLIHDDSLTFKEDIQKAQVSGQGDSLHEHIANLAGSPAIKKGILQTVKVVDELVKVMGRHKPENIVIEMARENQTTQKGQKNSRERMKRIEEGIKELGSQILKEHPVENTQLQNEKLYLYYLQNGRDMYVDQELDINRLSDYDVDHIVPQSFLKDDSIDNKVLTRSDKARGKSDNVPSEEVVKKMKNYWRQLLNAKLITQRKFDNLTKAERGGLSELDKAGFIKRQLVETRQITKHVAQILDSRMNTKYDENDKLIREVKVITLKSKLVSDFRKDFQFYKVREINNYHHAHDAYLNAVVGTALIKKYPKLESEFVYGDYKVYDVRKMIAKSEQEIGKATAKYFFYSNIMNFFKTEITLANGEIRKRPLIETNGETGEIVWDKGRDFATVRKVLSMPQVNIVKKTEVQTGGFSKESILPKRNSDKLIARKKDWDPKKYGGFDSPTVAYSVLVVAKVEKGKSKKLKSVKELLGITIMERSSFEKNPIDFLEAKGYKEVKKDLIIKLPKYSLFELENGRKRMLASAGELQKGNELALPSKYVNFLYLASHYEKLKGSPEDNEQKQLFVEQHKHYLDEIIEQISEFSKRVILADANLDKVLSAYNKHRDKPIREQAENIIHLFTLTNLGAPAAFKYFDTTIDRKRYTSTKEVLDATLIHQSITGLYETRIDLSQLGGDGGGGGGGGGGGTLNIEDEYRLHETSKGPDVPLGSTWLSDFPQAWAETGGMGLAVRQAPLIIPLKATSTPVSIKQYPMSQEARLGIKPHIQRLLDQGILVPCQSPWNTPLLPVKKPGTNDYRPVQDLREVNKRVEDIHPTVPNPYNLLSGLPPSHQWYTVLDLKDAFFCLRLHPTSQSLFAFEWRDPEMGISGQLTWTRLPQGFKNSPTLFNEALHRDLADFRIQHPDLILLQYVDDLLLAATSELDCQQGTRALLQTLGDLGYRASAKKAQICQKQVKYLGYLLKEGQRWLTEARKETVMGQPTPKTPRQLREFLGTAGFCRLWIPGFAEMAAPLYPLTKPGTLFEWGPDQQKAYQEIKQALLTAPALGLPDLTKPFELFVDEKQGYAKGVLTQKLGPWRRPVAYLSKKLDPVAAGWPPCLRMVAAIAVLTKDAGKLTMGQPLVILAPHAVEALVKQPPDRWLSNARMTHYQALLLDTDRVQFGPIVALNPATLLPLPEEGLQHDCLDILAEAHGTRPDLTDQPLPDADHTWYTDGSSFLQEGQRKAGAAVTTETEVVWAKALPAGTSAQRAELIALTQALKMAEGKKLNVYTDSRYAFATAHIHGEIYRRRGWLTSEGKEIKNKDEILALLKALFLPKRLSIIHCPGHQKGNRAEARGNRMADQAAREVATRETPETSTLLAGKRTADGSEFEKRTADGSEFESPKKKAKVE

SEQ ID NO: 2451 - protein, 2093 aa, synthetic construct
MPAAKRVKLDGGDKKYSIGLDIGTNSVGWAVITDEYKVPSKKFKVLGNTDRHSIKKNLIGALLFDSGETAEATRLKRTARRRYTRRKNRICYLQEIFSNEMAKVDDSFFHRLEESFLVEEDKKHERHPIFGNIVDEVAYHEKYPTIYHLRKKLVDSTDKADLRLIYLALAHMIKFRGHFLIEGDLNPDNSDVDKLFIQLVQTYNQLFEENPINASGVDAKAILSARLSKSRRLENLIAQLPGEKKNGLFGNLIALSLGLTPNFKSNFDLAEDAKLQLSKDTYDDDLDNLLAQIGDQYADLFLAAKNLSDAILLSDILRVNTEITKAPLSASMIKRYDEHHQDLTLLKALVRQQLPEKYKEIFFDQSKNGYAGYIDGGASQEEFYKFIKPILEKMDGTEELLVKLNREDLLRKQRTFDNGSIPHQIHLGELHAILRRQEDFYPFLKDNREKIEKILTFRIPYYVGPLARGNSRFAWMTRKSEETITPWNFEEVVDKGASAQSFIERMTNFDKNLPNEKVLPKHSLLYEYFTVYNELTKVKYVTEGMRKPAFLSGEQKKAIVDLLFKTNRKVTVKQLKEDYFKKIECFDSVEISGVEDRFNASLGTYHDLLKIIKDKDFLDNEENEDILEDIVLTLTLFEDREMIEERLKTYAHLFDDKVMKQLKRRRYTGWGRLSRKLINGIRDKQSGKTILDFLKSDGFANRNFMQLIHDDSLTFKEDIQKAQVSGQGDSLHEHIANLAGSPAIKKGILQTVKVVDELVKVMGRHKPENIVIEMARENQTTQKGQKNSRERMKRIEEGIKELGSQILKEHPVENTQLQNEKLYLYYLQNGRDMYVDQELDINRLSDYDVDHIVPQSFLKDDSIDNKVLTRSDKARGKSDNVPSEEVVKKMKNYWRQLLNAKLITQRKFDNLTKAERGGLSELDKAGFIKRQLVETRQITKHVAQILDSRMNTKYDENDKLIREVKVITLKSKLVSDFRKDFQFYKVREINNYHHAHDAYLNAVVGTALIKKYPKLESEFVYGDYKVYDVRKMIAKSEQEIGKATAKYFFYSNIMNFFKTEITLANGEIRKRPLIETNGETGEIVWDKGRDFATVRKVLSMPQVNIVKKTEVQTGGFSKESILPKRNSDKLIARKKDWDPKKYGGFDSPTVAYSVLVVAKVEKGKSKKLKSVKELLGITIMERSSFEKNPIDFLEAKGYKEVKKDLIIKLPKYSLFELENGRKRMLASAGELQKGNELALPSKYVNFLYLASHYEKLKGSPEDNEQKQLFVEQHKHYLDEIIEQISEFSKRVILADANLDKVLSAYNKHRDKPIREQAENIIHLFTLTNLGAPAAFKYFDTTIDRKRYTSTKEVLDATLIHQSITGLYETRIDLSQLGGDGGEAAAKGSSGGTLNIEDEYRLHETSKGPDVPLGSTWLSDFPQAWAETGGMGLAVRQAPLIIPLKATSTPVSIKQYPMSQEARLGIKPHIQRLLDQGILVPCQSPWNTPLLPVKKPGTNDYRPVQDLREVNKRVEDIHPTVPNPYNLLSGLPPSHQWYTVLDLKDAFFCLRLHPTSQSLFAFEWRDPEMGISGQLTWTRLPQGFKNSPTLFNEALHRDLADFRIQHPDLILLQYVDDLLLAATSELDCQQGTRALLQTLGDLGYRASAKKAQICQKQVKYLGYLLKEGQRWLTEARKETVMGQPTPKTPRQLREFLGTAGFCRLWIPGFAEMAAPLYPLTKPGTLFEWGPDQQKAYQEIKQALLTAPALGLPDLTKPFELFVDEKQGYAKGVLTQKLGPWRRPVAYLSKKLDPVAAGWPPCLRMVAAIAVLTKDAGKLTMGQPLVILAPHAVEALVKQPPDRWLSNARMTHYQALLLDTDRVQFGPIVALNPATLLPLPEEGLQHDCLDILAEAHGTRPDLTDQPLPDADHTWYTDGSSFLQEGQRKAGAAVTTETEVVWAKALPAGTSAQRAELIALTQALKMAEGKKLNVYTDSRYAFATAHIHGEIYRRRGWLTSEGKEIKNKDEILALLKALFLPKRLSIIHCPGHQKGNRAEARGNRMADQAAREVATRETPETSTLLAGKRTADGSEFEKRTADGSEFESPKKKAKVE

SEQ ID NO: 2452 - protein, 2096 aa, synthetic construct
MPAAKRVKLDGGDKKYSIGLDIGTNSVGWAVITDEYKVPSKKFKVLGNTDRHSIKKNLIGALLFDSGETAEATRLKRTARRRYTRRKNRICYLQEIFSNEMAKVDDSFFHRLEESFLVEEDKKHERHPIFGNIVDEVAYHEKYPTIYHLRKKLVDSTDKADLRLIYLALAHMIKFRGHFLIEGDLNPDNSDVDKLFIQLVQTYNQLFEENPINASGVDAKAILSARLSKSRRLENLIAQLPGEKKNGLFGNLIALSLGLTPNFKSNFDLAEDAKLQLSKDTYDDDLDNLLAQIGDQYADLFLAAKNLSDAILLSDILRVNTEITKAPLSASMIKRYDEHHQDLTLLKALVRQQLPEKYKEIFFDQSKNGYAGYIDGGASQEEFYKFIKPILEKMDGTEELLVKLNREDLLRKQRTFDNGSIPHQIHLGELHAILRRQEDFYPFLKDNREKIEKILTFRIPYYVGPLARGNSRFAWMTRKSEETITPWNFEEVVDKGASAQSFIERMTNFDKNLPNEKVLPKHSLLYEYFTVYNELTKVKYVTEGMRKPAFLSGEQKKAIVDLLFKTNRKVTVKQLKEDYFKKIECFDSVEISGVEDRFNASLGTYHDLLKIIKDKDFLDNEENEDILEDIVLTLTLFEDREMIEERLKTYAHLFDDKVMKQLKRRRYTGWGRLSRKLINGIRDKQSGKTILDFLKSDGFANRNFMQLIHDDSLTFKEDIQKAQVSGQGDSLHEHIANLAGSPAIKKGILQTVKVVDELVKVMGRHKPENIVIEMARENQTTQKGQKNSRERMKRIEEGIKELGSQILKEHPVENTQLQNEKLYLYYLQNGRDMYVDQELDINRLSDYDVDHIVPQSFLKDDSIDNKVLTRSDKARGKSDNVPSEEVVKKMKNYWRQLLNAKLITQRKFDNLTKAERGGLSELDKAGFIKRQLVETRQITKHVAQILDSRMNTKYDENDKLIREVKVITLKSKLVSDFRKDFQFYKVREINNYHHAHDAYLNAVVGTALIKKYPKLESEFVYGDYKVYDVRKMIAKSEQEIGKATAKYFFYSNIMNFFKTEITLANGEIRKRPLIETNGETGEIVWDKGRDFATVRKVLSMPQVNIVKKTEVQTGGFSKESILPKRNSDKLIARKKDWDPKKYGGFDSPTVAYSVLVVAKVEKGKSKKLKSVKELLGITIMERSSFEKNPIDFLEAKGYKEVKKDLIIKLPKYSLFELENGRKRMLASAGELQKGNELALPSKYVNFLYLASHYEKLKGSPEDNEQKQLFVEQHKHYLDEIIEQISEFSKRVILADANLDKVLSAYNKHRDKPIREQAENIIHLFTLTNLGAPAAFKYFDTTIDRKRYTSTKEVLDATLIHQSITGLYETRIDLSQLGGDGGEAAAKGSSGGGGGTLNIEDEYRLHETSKGPDVPLGSTWLSDFPQAWAETGGMGLAVRQAPLIIPLKATSTPVSIKQYPMSQEARLGIKPHIQRLLDQGILVPCQSPWNTPLLPVKKPGTNDYRPVQDLREVNKRVEDIHPTVPNPYNLLSGLPPSHQWYTVLDLKDAFFCLRLHPTSQSLFAFEWRDPEMGISGQLTWTRLPQGFKNSPTLFNEALHRDLADFRIQHPDLILLQYVDDLLLAATSELDCQQGTRALLQTLGDLGYRASAKKAQICQKQVKYLGYLLKEGQRWLTEARKETVMGQPTPKTPRQLREFLGTAGFCRLWIPGFAEMAAPLYPLTKPGTLFEWGPDQQKAYQEIKQALLTAPALGLPDLTKPFELFVDEKQGYAKGVLTQKLGPWRRPVAYLSKKLDPVAAGWPPCLRMVAAIAVLTKDAGKLTMGQPLVILAPHAVEALVKQPPDRWLSNARMTHYQALLLDTDRVQFGPIVALNPATLLPLPEEGLQHDCLDILAEAHGTRPDLTDQPLPDADHTWYTDGSSFLQEGQRKAGAAVTTETEVVWAKALPAGTSAQRAELIALTQALKMAEGKKLNVYTDSRYAFATAHIHGEIYRRRGWLTSEGKEIKNKDEILALLKALFLPKRLSIIHCPGHQKGNRAEARGNRMADQAAREVATRETPETSTLLAGKRTADGSEFEKRTADGSEFESPKKKAKVE

SEQ ID NO: 2453 - protein, 2096 aa, synthetic construct
MPAAKRVKLDGGDKKYSIGLDIGTNSVGWAVITDEYKVPSKKFKVLGNTDRHSIKKNLIGALLFDSGETAEATRLKRTARRRYTRRKNRICYLQEIFSNEMAKVDDSFFHRLEESFLVEEDKKHERHPIFGNIVDEVAYHEKYPTIYHLRKKLVDSTDKADLRLIYLALAHMIKFRGHFLIEGDLNPDNSDVDKLFIQLVQTYNQLFEENPINASGVDAKAILSARLSKSRRLENLIAQLPGEKKNGLFGNLIALSLGLTPNFKSNFDLAEDAKLQLSKDTYDDDLDNLLAQIGDQYADLFLAAKNLSDAILLSDILRVNTEITKAPLSASMIKRYDEHHQDLTLLKALVRQQLPEKYKEIFFDQSKNGYAGYIDGGASQEEFYKFIKPILEKMDGTEELLVKLNREDLLRKQRTFDNGSIPHQIHLGELHAILRRQEDFYPFLKDNREKIEKILTFRIPYYVGPLARGNSRFAWMTRKSEETITPWNFEEVVDKGASAQSFIERMTNFDKNLPNEKVLPKHSLLYEYFTVYNELTKVKYVTEGMRKPAFLSGEQKKAIVDLLFKTNRKVTVKQLKEDYFKKIECFDSVEISGVEDRFNASLGTYHDLLKIIKDKDFLDNEENEDILEDIVLTLTLFEDREMIEERLKTYAHLFDDKVMKQLKRRRYTGWGRLSRKLINGIRDKQSGKTILDFLKSDGFANRNFMQLIHDDSLTFKEDIQKAQVSGQGDSLHEHIANLAGSPAIKKGILQTVKVVDELVKVMGRHKPENIVIEMARENQTTQKGQKNSRERMKRIEEGIKELGSQILKEHPVENTQLQNEKLYLYYLQNGRDMYVDQELDINRLSDYDVDHIVPQSFLKDDSIDNKVLTRSDKARGKSDNVPSEEVVKKMKNYWRQLLNAKLITQRKFDNLTKAERGGLSELDKAGFIKRQLVETRQITKHVAQILDSRMNTKYDENDKLIREVKVITLKSKLVSDFRKDFQFYKVREINNYHHAHDAYLNAVVGTALIKKYPKLESEFVYGDYKVYDVRKMIAKSEQEIGKATAKYFFYSNIMNFFKTEITLANGEIRKRPLIETNGETGEIVWDKGRDFATVRKVLSMPQVNIVKKTEVQTGGFSKESILPKRNSDKLIARKKDWDPKKYGGFDSPTVAYSVLVVAKVEKGKSKKLKSVKELLGITIMERSSFEKNPIDFLEAKGYKEVKKDLIIKLPKYSLFELENGRKRMLASAGELQKGNELALPSKYVNFLYLASHYEKLKGSPEDNEQKQLFVEQHKHYLDEIIEQISEFSKRVILADANLDKVLSAYNKHRDKPIREQAENIIHLFTLTNLGAPAAFKYFDTTIDRKRYTSTKEVLDATLIHQSITGLYETRIDLSQLGGDGGPAPGSSEAAAKGGTLNIEDEYRLHETSKGPDVPLGSTWLSDFPQAWAETGGMGLAVRQAPLIIPLKATSTPVSIKQYPMSQEARLGIKPHIQRLLDQGILVPCQSPWNTPLLPVKKPGTNDYRPVQDLREVNKRVEDIHPTVPNPYNLLSGLPPSHQWYTVLDLKDAFFCLRLHPTSQSLFAFEWRDPEMGISGQLTWTRLPQGFKNSPTLFNEALHRDLADFRIQHPDLILLQYVDDLLLAATSELDCQQGTRALLQTLGDLGYRASAKKAQICQKQVKYLGYLLKEGQRWLTEARKETVMGQPTPKTPRQLREFLGTAGFCRLWIPGFAEMAAPLYPLTKPGTLFEWGPDQQKAYQEIKQALLTAPALGLPDLTKPFELFVDEKQGYAKGVLTQKLGPWRRPVAYLSKKLDPVAAGWPPCLRMVAAIAVLTKDAGKLTMGQPLVILAPHAVEALVKQPPDRWLSNARMTHYQALLLDTDRVQFGPIVALNPATLLPLPEEGLQHDCLDILAEAHGTRPDLTDQPLPDADHTWYTDGSSFLQEGQRKAGAAVTTETEVVWAKALPAGTSAQRAELIALTQALKMAEGKKLNVYTDSRYAFATAHIHGEIYRRRGWLTSEGKEIKNKDEILALLKALFLPKRLSIIHCPGHQKGNRAEARGNRMADQAAREVATRETPETSTLLAGKRTADGSEFEKRTADGSEFESPKKKAKVE

SEQ ID NO: 2454 - protein, 2110 aa, synthetic construct
MPAAKRVKLDGGDKKYSIGLDIGTNSVGWAVITDEYKVPSKKFKVLGNTDRHSIKKNLIGALLFDSGETAEATRLKRTARRRYTRRKNRICYLQEIFSNEMAKVDDSFFHRLEESFLVEEDKKHERHPIFGNIVDEVAYHEKYPTIYHLRKKLVDSTDKADLRLIYLALAHMIKFRGHFLIEGDLNPDNSDVDKLFIQLVQTYNQLFEENPINASGVDAKAILSARLSKSRRLENLIAQLPGEKKNGLFGNLIALSLGLTPNFKSNFDLAEDAKLQLSKDTYDDDLDNLLAQIGDQYADLFLAAKNLSDAILLSDILRVNTEITKAPLSASMIKRYDEHHQDLTLLKALVRQQLPEKYKEIFFDQSKNGYAGYIDGGASQEEFYKFIKPILEKMDGTEELLVKLNREDLLRKQRTFDNGSIPHQIHLGELHAILRRQEDFYPFLKDNREKIEKILTFRIPYYVGPLARGNSRFAWMTRKSEETITPWNFEEVVDKGASAQSFIERMTNFDKNLPNEKVLPKHSLLYEYFTVYNELTKVKYVTEGMRKPAFLSGEQKKAIVDLLFKTNRKVTVKQLKEDYFKKIECFDSVEISGVEDRFNASLGTYHDLLKIIKDKDFLDNEENEDILEDIVLTLTLFEDREMIEERLKTYAHLFDDKVMKQLKRRRYTGWGRLSRKLINGIRDKQSGKTILDFLKSDGFANRNFMQLIHDDSLTFKEDIQKAQVSGQGDSLHEHIANLAGSPAIKKGILQTVKVVDELVKVMGRHKPENIVIEMARENQTTQKGQKNSRERMKRIEEGIKELGSQILKEHPVENTQLQNEKLYLYYLQNGRDMYVDQELDINRLSDYDVDHIVPQSFLKDDSIDNKVLTRSDKARGKSDNVPSEEVVKKMKNYWRQLLNAKLITQRKFDNLTKAERGGLSELDKAGFIKRQLVETRQITKHVAQILDSRMNTKYDENDKLIREVKVITLKSKLVSDFRKDFQFYKVREINNYHHAHDAYLNAVVGTALIKKYPKLESEFVYGDYKVYDVRKMIAKSEQEIGKATAKYFFYSNIMNFFKTEITLANGEIRKRPLIETNGETGEIVWDKGRDFATVRKVLSMPQVNIVKKTEVQTGGFSKESILPKRNSDKLIARKKDWDPKKYGGFDSPTVAYSVLVVAKVEKGKSKKLKSVKELLGITIMERSSFEKNPIDFLEAKGYKEVKKDLIIKLPKYSLFELENGRKRMLASAGELQKGNELALPSKYVNFLYLASHYEKLKGSPEDNEQKQLFVEQHKHYLDEIIEQISEFSKRVILADANLDKVLSAYNKHRDKPIREQAENIIHLFTLTNLGAPAAFKYFDTTIDRKRYTSTKEVLDATLIHQSITGLYETRIDLSQLGGDGGEAAAKEAAAKEAAAKEAAAKEAAAKGGTLNIEDEYRLHETSKGPDVPLGSTWLSDFPQAWAETGGMGLAVRQAPLIIPLKATSTPVSIKQYPMSQEARLGIKPHIQRLLDQGILVPCQSPWNTPLLPVKKPGTNDYRPVQDLREVNKRVEDIHPTVPNPYNLLSGLPPSHQWYTVLDLKDAFFCLRLHPTSQSLFAFEWRDPEMGISGQLTWTRLPQGFKNSPTLFNEALHRDLADFRIQHPDLILLQYVDDLLLAATSELDCQQGTRALLQTLGDLGYRASAKKAQICQKQVKYLGYLLKEGQRWLTEARKETVMGQPTPKTPRQLREFLGTAGFCRLWIPGFAEMAAPLYPLTKPGTLFEWGPDQQKAYQEIKQALLTAPALGLPDLTKPFELFVDEKQGYAKGVLTQKLGPWRRPVAYLSKKLDPVAAGWPPCLRMVAAIAVLTKDAGKLTMGQPLVILAPHAVEALVKQPPDRWLSNARMTHYQALLLDTDRVQFGPIVALNPATLLPLPEEGLQHDCLDILAEAHGTRPDLTDQPLPDADHTWYTDGSSFLQEGQRKAGAAVTTETEVVWAKALPAGTSAQRAELIALTQALKMAEGKKLNVYTDSRYAFATAHIHGEIYRRRGWLTSEGKEIKNKDEILALLKALFLPKRLSIIHCPGHQKGNRAEARGNRMADQAAREVATRETPETSTLLAGKRTADGSEFEKRTADGSEFESPKKKAKVE

SEQ ID NO: 2455 - protein, 2115 aa, synthetic construct
MPAAKRVKLDGGDKKYSIGLDIGTNSVGWAVITDEYKVPSKKFKVLGNTDRHSIKKNLIGALLFDSGETAEATRLKRTARRRYTRRKNRICYLQEIFSNEMAKVDDSFFHRLEESFLVEEDKKHERHPIFGNIVDEVAYHEKYPTIYHLRKKLVDSTDKADLRLIYLALAHMIKFRGHFLIEGDLNPDNSDVDKLFIQLVQTYNQLFEENPINASGVDAKAILSARLSKSRRLENLIAQLPGEKKNGLFGNLIALSLGLTPNFKSNFDLAEDAKLQLSKDTYDDDLDNLLAQIGDQYADLFLAAKNLSDAILLSDILRVNTEITKAPLSASMIKRYDEHHQDLTLLKALVRQQLPEKYKEIFFDQSKNGYAGYIDGGASQEEFYKFIKPILEKMDGTEELLVKLNREDLLRKQRTFDNGSIPHQIHLGELHAILRRQEDFYPFLKDNREKIEKILTFRIPYYVGPLARGNSRFAWMTRKSEETITPWNFEEVVDKGASAQSFIERMTNFDKNLPNEKVLPKHSLLYEYFTVYNELTKVKYVTEGMRKPAFLSGEQKKAIVDLLFKTNRKVTVKQLKEDYFKKIECFDSVEISGVEDRFNASLGTYHDLLKIIKDKDFLDNEENEDILEDIVLTLTLFEDREMIEERLKTYAHLFDDKVMKQLKRRRYTGWGRLSRKLINGIRDKQSGKTILDFLKSDGFANRNFMQLIHDDSLTFKEDIQKAQVSGQGDSLHEHIANLAGSPAIKKGILQTVKVVDELVKVMGRHKPENIVIEMARENQTTQKGQKNSRERMKRIEEGIKELGSQILKEHPVENTQLQNEKLYLYYLQNGRDMYVDQELDINRLSDYDVDHIVPQSFLKDDSIDNKVLTRSDKARGKSDNVPSEEVVKKMKNYWRQLLNAKLITQRKFDNLTKAERGGLSELDKAGFIKRQLVETRQITKHVAQILDSRMNTKYDENDKLIREVKVITLKSKLVSDFRKDFQFYKVREINNYHHAHDAYLNAVVGTALIKKYPKLESEFVYGDYKVYDVRKMIAKSEQEIGKATAKYFFYSNIMNFFKTEITLANGEIRKRPLIETNGETGEIVWDKGRDFATVRKVLSMPQVNIVKKTEVQTGGFSKESILPKRNSDKLIARKKDWDPKKYGGFDSPTVAYSVLVVAKVEKGKSKKLKSVKELLGITIMERSSFEKNPIDFLEAKGYKEVKKDLIIKLPKYSLFELENGRKRMLASAGELQKGNELALPSKYVNFLYLASHYEKLKGSPEDNEQKQLFVEQHKHYLDEIIEQISEFSKRVILADANLDKVLSAYNKHRDKPIREQAENIIHLFTLTNLGAPAAFKYFDTTIDRKRYTSTKEVLDATLIHQSITGLYETRIDLSQLGGDGGEAAAKEAAAKEAAAKEAAAKEAAAKEAAAKGGTLNIEDEYRLHETSKGPDVPLGSTWLSDFPQAWAETGGMGLAVRQAPLIIPLKATSTPVSIKQYPMSQEARLGIKPHIQRLLDQGILVPCQSPWNTPLLPVKKPGTNDYRPVQDLREVNKRVEDIHPTVPNPYNLLSGLPPSHQWYTVLDLKDAFFCLRLHPTSQSLFAFEWRDPEMGISGQLTWTRLPQGFKNSPTLFNEALHRDLADFRIQHPDLILLQYVDDLLLAATSELDCQQGTRALLQTLGDLGYRASAKKAQICQKQVKYLGYLLKEGQRWLTEARKETVMGQPTPKTPRQLREFLGTAGFCRLWIPGFAEMAAPLYPLTKPGTLFEWGPDQQKAYQEIKQALLTAPALGLPDLTKPFELFVDEKQGYAKGVLTQKLGPWRRPVAYLSKKLDPVAAGWPPCLRMVAAIAVLTKDAGKLTMGQPLVILAPHAVEALVKQPPDRWLSNARMTHYQALLLDTDRVQFGPIVALNPATLLPLPEEGLQHDCLDILAEAHGTRPDLTDQPLPDADHTWYTDGSSFLQEGQRKAGAAVTTETEVVWAKALPAGTSAQRAELIALTQALKMAEGKKLNVYTDSRYAFATAHIHGEIYRRRGWLTSEGKEIKNKDEILALLKALFLPKRLSIIHCPGHQKGNRAEARGNRMADQAAREVATRETPETSTLLAGKRTADGSEFEKRTADGSEFESPKKKAKVE

SEQ ID NO: 2456 - protein, 2093 aa, synthetic construct
MPAAKRVKLDGGDKKYSIGLDIGTNSVGWAVITDEYKVPSKKFKVLGNTDRHSIKKNLIGALLFDSGETAEATRLKRTARRRYTRRKNRICYLQEIFSNEMAKVDDSFFHRLEESFLVEEDKKHERHPIFGNIVDEVAYHEKYPTIYHLRKKLVDSTDKADLRLIYLALAHMIKFRGHFLIEGDLNPDNSDVDKLFIQLVQTYNQLFEENPINASGVDAKAILSARLSKSRRLENLIAQLPGEKKNGLFGNLIALSLGLTPNFKSNFDLAEDAKLQLSKDTYDDDLDNLLAQIGDQYADLFLAAKNLSDAILLSDILRVNTEITKAPLSASMIKRYDEHHQDLTLLKALVRQQLPEKYKEIFFDQSKNGYAGYIDGGASQEEFYKFIKPILEKMDGTEELLVKLNREDLLRKQRTFDNGSIPHQIHLGELHAILRRQEDFYPFLKDNREKIEKILTFRIPYYVGPLARGNSRFAWMTRKSEETITPWNFEEVVDKGASAQSFIERMTNFDKNLPNEKVLPKHSLLYEYFTVYNELTKVKYVTEGMRKPAFLSGEQKKAIVDLLFKTNRKVTVKQLKEDYFKKIECFDSVEISGVEDRFNASLGTYHDLLKIIKDKDFLDNEENEDILEDIVLTLTLFEDREMIEERLKTYAHLFDDKVMKQLKRRRYTGWGRLSRKLINGIRDKQSGKTILDFLKSDGFANRNFMQLIHDDSLTFKEDIQKAQVSGQGDSLHEHIANLAGSPAIKKGILQTVKVVDELVKVMGRHKPENIVIEMARENQTTQKGQKNSRERMKRIEEGIKELGSQILKEHPVENTQLQNEKLYLYYLQNGRDMYVDQELDINRLSDYDVDHIVPQSFLKDDSIDNKVLTRSDKARGKSDNVPSEEVVKKMKNYWRQLLNAKLITQRKFDNLTKAERGGLSELDKAGFIKRQLVETRQITKHVAQILDSRMNTKYDENDKLIREVKVITLKSKLVSDFRKDFQFYKVREINNYHHAHDAYLNAVVGTALIKKYPKLESEFVYGDYKVYDVRKMIAKSEQEIGKATAKYFFYSNIMNFFKTEITLANGEIRKRPLIETNGETGEIVWDKGRDFATVRKVLSMPQVNIVKKTEVQTGGFSKESILPKRNSDKLIARKKDWDPKKYGGFDSPTVAYSVLVVAKVEKGKSKKLKSVKELLGITIMERSSFEKNPIDFLEAKGYKEVKKDLIIKLPKYSLFELENGRKRMLASAGELQKGNELALPSKYVNFLYLASHYEKLKGSPEDNEQKQLFVEQHKHYLDEIIEQISEFSKRVILADANLDKVLSAYNKHRDKPIREQAENIIHLFTLTNLGAPAAFKYFDTTIDRKRYTSTKEVLDATLIHQSITGLYETRIDLSQLGGDGGEAAAKGGSGGTLNIEDEYRLHETSKGPDVPLGSTWLSDFPQAWAETGGMGLAVRQAPLIIPLKATSTPVSIKQYPMSQEARLGIKPHIQRLLDQGILVPCQSPWNTPLLPVKKPGTNDYRPVQDLREVNKRVEDIHPTVPNPYNLLSGLPPSHQWYTVLDLKDAFFCLRLHPTSQSLFAFEWRDPEMGISGQLTWTRLPQGFKNSPTLFNEALHRDLADFRIQHPDLILLQYVDDLLLAATSELDCQQGTRALLQTLGDLGYRASAKKAQICQKQVKYLGYLLKEGQRWLTEARKETVMGQPTPKTPRQLREFLGTAGFCRLWIPGFAEMAAPLYPLTKPGTLFEWGPDQQKAYQEIKQALLTAPALGLPDLTKPFELFVDEKQGYAKGVLTQKLGPWRRPVAYLSKKLDPVAAGWPPCLRMVAAIAVLTKDAGKLTMGQPLVILAPHAVEALVKQPPDRWLSNARMTHYQALLLDTDRVQFGPIVALNPATLLPLPEEGLQHDCLDILAEAHGTRPDLTDQPLPDADHTWYTDGSSFLQEGQRKAGAAVTTETEVVWAKALPAGTSAQRAELIALTQALKMAEGKKLNVYTDSRYAFATAHIHGEIYRRRGWLTSEGKEIKNKDEILALLKALFLPKRLSIIHCPGHQKGNRAEARGNRMADQAAREVATRETPETSTLLAGKRTADGSEFEKRTADGSEFESPKKKAKVE

SEQ ID NO: 2457 - protein, 2096 aa, synthetic construct
MPAAKRVKLDGGDKKYSIGLDIGTNSVGWAVITDEYKVPSKKFKVLGNTDRHSIKKNLIGALLFDSGETAEATRLKRTARRRYTRRKNRICYLQEIFSNEMAKVDDSFFHRLEESFLVEEDKKHERHPIFGNIVDEVAYHEKYPTIYHLRKKLVDSTDKADLRLIYLALAHMIKFRGHFLIEGDLNPDNSDVDKLFIQLVQTYNQLFEENPINASGVDAKAILSARLSKSRRLENLIAQLPGEKKNGLFGNLIALSLGLTPNFKSNFDLAEDAKLQLSKDTYDDDLDNLLAQIGDQYADLFLAAKNLSDAILLSDILRVNTEITKAPLSASMIKRYDEHHQDLTLLKALVRQQLPEKYKEIFFDQSKNGYAGYIDGGASQEEFYKFIKPILEKMDGTEELLVKLNREDLLRKQRTFDNGSIPHQIHLGELHAILRRQEDFYPFLKDNREKIEKILTFRIPYYVGPLARGNSRFAWMTRKSEETITPWNFEEVVDKGASAQSFIERMTNFDKNLPNEKVLPKHSLLYEYFTVYNELTKVKYVTEGMRKPAFLSGEQKKAIVDLLFKTNRKVTVKQLKEDYFKKIECFDSVEISGVEDRFNASLGTYHDLLKIIKDKDFLDNEENEDILEDIVLTLTLFEDREMIEERLKTYAHLFDDKVMKQLKRRRYTGWGRLSRKLINGIRDKQSGKTILDFLKSDGFANRNFMQLIHDDSLTFKEDIQKAQVSGQGDSLHEHIANLAGSPAIKKGILQTVKVVDELVKVMGRHKPENIVIEMARENQTTQKGQKNSRERMKRIEEGIKELGSQILKEHPVENTQLQNEKLYLYYLQNGRDMYVDQELDINRLSDYDVDHIVPQSFLKDDSIDNKVLTRSDKARGKSDNVPSEEVVKKMKNYWRQLLNAKLITQRKFDNLTKAERGGLSELDKAGFIKRQLVETRQITKHVAQILDSRMNTKYDENDKLIREVKVITLKSKLVSDFRKDFQFYKVREINNYHHAHDAYLNAVVGTALIKKYPKLESEFVYGDYKVYDVRKMIAKSEQEIGKATAKYFFYSNIMNFFKTEITLANGEIRKRPLIETNGETGEIVWDKGRDFATVRKVLSMPQVNIVKKTEVQTGGFSKESILPKRNSDKLIARKKDWDPKKYGGFDSPTVAYSVLVVAKVEKGKSKKLKSVKELLGITIMERSSFEKNPIDFLEAKGYKEVKKDLIIKLPKYSLFELENGRKRMLASAGELQKGNELALPSKYVNFLYLASHYEKLKGSPEDNEQKQLFVEQHKHYLDEIIEQISEFSKRVILADANLDKVLSAYNKHRDKPIREQAENIIHLFTLTNLGAPAAFKYFDTTIDRKRYTSTKEVLDATLIHQSITGLYETRIDLSQLGGDGGEAAAKGGGPAPGGTLNIEDEYRLHETSKGPDVPLGSTWLSDFPQAWAETGGMGLAVRQAPLIIPLKATSTPVSIKQYPMSQEARLGIKPHIQRLLDQGILVPCQSPWNTPLLPVKKPGTNDYRPVQDLREVNKRVEDIHPTVPNPYNLLSGLPPSHQWYTVLDLKDAFFCLRLHPTSQSLFAFEWRDPEMGISGQLTWTRLPQGFKNSPTLFNEALHRDLADFRIQHPDLILLQYVDDLLLAATSELDCQQGTRALLQTLGDLGYRASAKKAQICQKQVKYLGYLLKEGQRWLTEARKETVMGQPTPKTPRQLREFLGTAGFCRLWIPGFAEMAAPLYPLTKPGTLFEWGPDQQKAYQEIKQALLTAPALGLPDLTKPFELFVDEKQGYAKGVLTQKLGPWRRPVAYLSKKLDPVAAGWPPCLRMVAAIAVLTKDAGKLTMGQPLVILAPHAVEALVKQPPDRWLSNARMTHYQALLLDTDRVQFGPIVALNPATLLPLPEEGLQHDCLDILAEAHGTRPDLTDQPLPDADHTWYTDGSSFLQEGQRKAGAAVTTETEVVWAKALPAGTSAQRAELIALTQALKMAEGKKLNVYTDSRYAFATAHIHGEIYRRRGWLTSEGKEIKNKDEILALLKALFLPKRLSIIHCPGHQKGNRAEARGNRMADQAAREVATRETPETSTLLAGKRTADGSEFEKRTADGSEFESPKKKAKVE

SEQ ID NO: 2458 - protein, 2096 aa, synthetic construct
MPAAKRVKLDGGDKKYSIGLDIGTNSVGWAVITDEYKVPSKKFKVLGNTDRHSIKKNLIGALLFDSGETAEATRLKRTARRRYTRRKNRICYLQEIFSNEMAKVDDSFFHRLEESFLVEEDKKHERHPIFGNIVDEVAYHEKYPTIYHLRKKLVDSTDKADLRLIYLALAHMIKFRGHFLIEGDLNPDNSDVDKLFIQLVQTYNQLFEENPINASGVDAKAILSARLSKSRRLENLIAQLPGEKKNGLFGNLIALSLGLTPNFKSNFDLAEDAKLQLSKDTYDDDLDNLLAQIGDQYADLFLAAKNLSDAILLSDILRVNTEITKAPLSASMIKRYDEHHQDLTLLKALVRQQLPEKYKEIFFDQSKNGYAGYIDGGASQEEFYKFIKPILEKMDGTEELLVKLNREDLLRKQRTFDNGSIPHQIHLGELHAILRRQEDFYPFLKDNREKIEKILTFRIPYYVGPLARGNSRFAWMTRKSEETITPWNFEEVVDKGASAQSFIERMTNFDKNLPNEKVLPKHSLLYEYFTVYNELTKVKYVTEGMRKPAFLSGEQKKAIVDLLFKTNRKVTVKQLKEDYFKKIECFDSVEISGVEDRFNASLGTYHDLLKIIKDKDFLDNEENEDILEDIVLTLTLFEDREMIEERLKTYAHLFDDKVMKQLKRRRYTGWGRLSRKLINGIRDKQSGKTILDFLKSDGFANRNFMQLIHDDSLTFKEDIQKAQVSGQGDSLHEHIANLAGSPAIKKGILQTVKVVDELVKVMGRHKPENIVIEMARENQTTQKGQKNSRERMKRIEEGIKELGSQILKEHPVENTQLQNEKLYLYYLQNGRDMYVDQELDINRLSDYDVDHIVPQSFLKDDSIDNKVLTRSDKARGKSDNVPSEEVVKKMKNYWRQLLNAKLITQRKFDNLTKAERGGLSELDKAGFIKRQLVETRQITKHVAQILDSRMNTKYDENDKLIREVKVITLKSKLVSDFRKDFQFYKVREINNYHHAHDAYLNAVVGTALIKKYPKLESEFVYGDYKVYDVRKMIAKSEQEIGKATAKYFFYSNIMNFFKTEITLANGEIRKRPLIETNGETGEIVWDKGRDFATVRKVLSMPQVNIVKKTEVQTGGFSKESILPKRNSDKLIARKKDWDPKKYGGFDSPTVAYSVLVVAKVEKGKSKKLKSVKELLGITIMERSSFEKNPIDFLEAKGYKEVKKDLIIKLPKYSLFELENGRKRMLASAGELQKGNELALPSKYVNFLYLASHYEKLKGSPEDNEQKQLFVEQHKHYLDEIIEQISEFSKRVILADANLDKVLSAYNKHRDKPIREQAENIIHLFTLTNLGAPAAFKYFDTTIDRKRYTSTKEVLDATLIHQSITGLYETRIDLSQLGGDGGGSSEAAAKGGGGGTLNIEDEYRLHETSKGPDVPLGSTWLSDFPQAWAETGGMGLAVRQAPLIIPLKATSTPVSIKQYPMSQEARLGIKPHIQRLLDQGILVPCQSPWNTPLLPVKKPGTNDYRPVQDLREVNKRVEDIHPTVPNPYNLLSGLPPSHQWYTVLDLKDAFFCLRLHPTSQSLFAFEWRDPEMGISGQLTWTRLPQGFKNSPTLFNEALHRDLADFRIQHPDLILLQYVDDLLLAATSELDCQQGTRALLQTLGDLGYRASAKKAQICQKQVKYLGYLLKEGQRWLTEARKETVMGQPTPKTPRQLREFLGTAGFCRLWIPGFAEMAAPLYPLTKPGTLFEWGPDQQKAYQEIKQALLTAPALGLPDLTKPFELFVDEKQGYAKGVLTQKLGPWRRPVAYLSKKLDPVAAGWPPCLRMVAAIAVLTKDAGKLTMGQPLVILAPHAVEALVKQPPDRWLSNARMTHYQALLLDTDRVQFGPIVALNPATLLPLPEEGLQHDCLDILAEAHGTRPDLTDQPLPDADHTWYTDGSSFLQEGQRKAGAAVTTETEVVWAKALPAGTSAQRAELIALTQALKMAEGKKLNVYTDSRYAFATAHIHGEIYRRRGWLTSEGKEIKNKDEILALLKALFLPKRLSIIHCPGHQKGNRAEARGNRMADQAAREVATRETPETSTLLAGKRTADGSEFEKRTADGSEFESPKKKAKVE

SEQ ID NO: 2459 - protein, 2096 aa, synthetic construct
MPAAKRVKLDGGDKKYSIGLDIGTNSVGWAVITDEYKVPSKKFKVLGNTDRHSIKKNLIGALLFDSGETAEATRLKRTARRRYTRRKNRICYLQEIFSNEMAKVDDSFFHRLEESFLVEEDKKHERHPIFGNIVDEVAYHEKYPTIYHLRKKLVDSTDKADLRLIYLALAHMIKFRGHFLIEGDLNPDNSDVDKLFIQLVQTYNQLFEENPINASGVDAKAILSARLSKSRRLENLIAQLPGEKKNGLFGNLIALSLGLTPNFKSNFDLAEDAKLQLSKDTYDDDLDNLLAQIGDQYADLFLAAKNLSDAILLSDILRVNTEITKAPLSASMIKRYDEHHQDLTLLKALVRQQLPEKYKEIFFDQSKNGYAGYIDGGASQEEFYKFIKPILEKMDGTEELLVKLNREDLLRKQRTFDNGSIPHQIHLGELHAILRRQEDFYPFLKDNREKIEKILTFRIPYYVGPLARGNSRFAWMTRKSEETITPWNFEEVVDKGASAQSFIERMTNFDKNLPNEKVLPKHSLLYEYFTVYNELTKVKYVTEGMRKPAFLSGEQKKAIVDLLFKTNRKVTVKQLKEDYFKKIECFDSVEISGVEDRFNASLGTYHDLLKIIKDKDFLDNEENEDILEDIVLTLTLFEDREMIEERLKTYAHLFDDKVMKQLKRRRYTGWGRLSRKLINGIRDKQSGKTILDFLKSDGFANRNFMQLIHDDSLTFKEDIQKAQVSGQGDSLHEHIANLAGSPAIKKGILQTVKVVDELVKVMGRHKPENIVIEMARENQTTQKGQKNSRERMKRIEEGIKELGSQILKEHPVENTQLQNEKLYLYYLQNGRDMYVDQELDINRLSDYDVDHIVPQSFLKDDSIDNKVLTRSDKARGKSDNVPSEEVVKKMKNYWRQLLNAKLITQRKFDNLTKAERGGLSELDKAGFIKRQLVETRQITKHVAQILDSRMNTKYDENDKLIREVKVITLKSKLVSDFRKDFQFYKVREINNYHHAHDAYLNAVVGTALIKKYPKLESEFVYGDYKVYDVRKMIAKSEQEIGKATAKYFFYSNIMNFFKTEITLANGEIRKRPLIETNGETGEIVWDKGRDFATVRKVLSMPQVNIVKKTEVQTGGFSKESILPKRNSDKLIARKKDWDPKKYGGFDSPTVAYSVLVVAKVEKGKSKKLKSVKELLGITIMERSSFEKNPIDFLEAKGYKEVKKDLIIKLPKYSLFELENGRKRMLASAGELQKGNELALPSKYVNFLYLASHYEKLKGSPEDNEQKQLFVEQHKHYLDEIIEQISEFSKRVILADANLDKVLSAYNKHRDKPIREQAENIIHLFTLTNLGAPAAFKYFDTTIDRKRYTSTKEVLDATLIHQSITGLYETRIDLSQLGGDGGGGSGGGEAAAKGGTLNIEDEYRLHETSKGPDVPLGSTWLSDFPQAWAETGGMGLAVRQAPLIIPLKATSTPVSIKQYPMSQEARLGIKPHIQRLLDQGILVPCQSPWNTPLLPVKKPGTNDYRPVQDLREVNKRVEDIHPTVPNPYNLLSGLPPSHQWYTVLDLKDAFFCLRLHPTSQSLFAFEWRDPEMGISGQLTWTRLPQGFKNSPTLFNEALHRDLADFRIQHPDLILLQYVDDLLLAATSELDCQQGTRALLQTLGDLGYRASAKKAQICQKQVKYLGYLLKEGQRWLTEARKETVMGQPTPKTPRQLREFLGTAGFCRLWIPGFAEMAAPLYPLTKPGTLFEWGPDQQKAYQEIKQALLTAPALGLPDLTKPFELFVDEKQGYAKGVLTQKLGPWRRPVAYLSKKLDPVAAGWPPCLRMVAAIAVLTKDAGKLTMGQPLVILAPHAVEALVKQPPDRWLSNARMTHYQALLLDTDRVQFGPIVALNPATLLPLPEEGLQHDCLDILAEAHGTRPDLTDQPLPDADHTWYTDGSSFLQEGQRKAGAAVTTETEVVWAKALPAGTSAQRAELIALTQALKMAEGKKLNVYTDSRYAFATAHIHGEIYRRRGWLTSEGKEIKNKDEILALLKALFLPKRLSIIHCPGHQKGNRAEARGNRMADQAAREVATRETPETSTLLAGKRTADGSEFEKRTADGSEFESPKKKAKVE

SEQ ID NO: 2460 - protein, 2096 aa, synthetic construct
MPAAKRVKLDGGDKKYSIGLDIGTNSVGWAVITDEYKVPSKKFKVLGNTDRHSIKKNLIGALLFDSGETAEATRLKRTARRRYTRRKNRICYLQEIFSNEMAKVDDSFFHRLEESFLVEEDKKHERHPIFGNIVDEVAYHEKYPTIYHLRKKLVDSTDKADLRLIYLALAHMIKFRGHFLIEGDLNPDNSDVDKLFIQLVQTYNQLFEENPINASGVDAKAILSARLSKSRRLENLIAQLPGEKKNGLFGNLIALSLGLTPNFKSNFDLAEDAKLQLSKDTYDDDLDNLLAQIGDQYADLFLAAKNLSDAILLSDILRVNTEITKAPLSASMIKRYDEHHQDLTLLKALVRQQLPEKYKEIFFDQSKNGYAGYIDGGASQEEFYKFIKPILEKMDGTEELLVKLNREDLLRKQRTFDNGSIPHQIHLGELHAILRRQEDFYPFLKDNREKIEKILTFRIPYYVGPLARGNSRFAWMTRKSEETITPWNFEEVVDKGASAQSFIERMTNFDKNLPNEKVLPKHSLLYEYFTVYNELTKVKYVTEGMRKPAFLSGEQKKAIVDLLFKTNRKVTVKQLKEDYFKKIECFDSVEISGVEDRFNASLGTYHDLLKIIKDKDFLDNEENEDILEDIVLTLTLFEDREMIEERLKTYAHLFDDKVMKQLKRRRYTGWGRLSRKLINGIRDKQSGKTILDFLKSDGFANRNFMQLIHDDSLTFKEDIQKAQVSGQGDSLHEHIANLAGSPAIKKGILQTVKVVDELVKVMGRHKPENIVIEMARENQTTQKGQKNSRERMKRIEEGIKELGSQILKEHPVENTQLQNEKLYLYYLQNGRDMYVDQELDINRLSDYDVDHIVPQSFLKDDSIDNKVLTRSDKARGKSDNVPSEEVVKKMKNYWRQLLNAKLITQRKFDNLTKAERGGLSELDKAGFIKRQLVETRQITKHVAQILDSRMNTKYDENDKLIREVKVITLKSKLVSDFRKDFQFYKVREINNYHHAHDAYLNAVVGTALIKKYPKLESEFVYGDYKVYDVRKMIAKSEQEIGKATAKYFFYSNIMNFFKTEITLANGEIRKRPLIETNGETGEIVWDKGRDFATVRKVLSMPQVNIVKKTEVQTGGFSKESILPKRNSDKLIARKKDWDPKKYGGFDSPTVAYSVLVVAKVEKGKSKKLKSVKELLGITIMERSSFEKNPIDFLEAKGYKEVKKDLIIKLPKYSLFELENGRKRMLASAGELQKGNELALPSKYVNFLYLASHYEKLKGSPEDNEQKQLFVEQHKHYLDEIIEQISEFSKRVILADANLDKVLSAYNKHRDKPIREQAENIIHLFTLTNLGAPAAFKYFDTTIDRKRYTSTKEVLDATLIHQSITGLYETRIDLSQLGGDGGEAAAKGGSGSSGGTLNIEDEYRLHETSKGPDVPLGSTWLSDFPQAWAETGGMGLAVRQAPLIIPLKATSTPVSIKQYPMSQEARLGIKPHIQRLLDQGILVPCQSPWNTPLLPVKKPGTNDYRPVQDLREVNKRVEDIHPTVPNPYNLLSGLPPSHQWYTVLDLKDAFFCLRLHPTSQSLFAFEWRDPEMGISGQLTWTRLPQGFKNSPTLFNEALHRDLADFRIQHPDLILLQYVDDLLLAATSELDCQQGTRALLQTLGDLGYRASAKKAQICQKQVKYLGYLLKEGQRWLTEARKETVMGQPTPKTPRQLREFLGTAGFCRLWIPGFAEMAAPLYPLTKPGTLFEWGPDQQKAYQEIKQALLTAPALGLPDLTKPFELFVDEKQGYAKGVLTQKLGPWRRPVAYLSKKLDPVAAGWPPCLRMVAAIAVLTKDAGKLTMGQPLVILAPHAVEALVKQPPDRWLSNARMTHYQALLLDTDRVQFGPIVALNPATLLPLPEEGLQHDCLDILAEAHGTRPDLTDQPLPDADHTWYTDGSSFLQEGQRKAGAAVTTETEVVWAKALPAGTSAQRAELIALTQALKMAEGKKLNVYTDSRYAFATAHIHGEIYRRRGWLTSEGKEIKNKDEILALLKALFLPKRLSIIHCPGHQKGNRAEARGNRMADQAAREVATRETPETSTLLAGKRTADGSEFEKRTADGSEFESPKKKAKVE

SEQ ID NO: 2461 - protein, 2096 aa, synthetic construct
MPAAKRVKLDGGDKKYSIGLDIGTNSVGWAVITDEYKVPSKKFKVLGNTDRHSIKKNLIGALLFDSGETAEATRLKRTARRRYTRRKNRICYLQEIFSNEMAKVDDSFFHRLEESFLVEEDKKHERHPIFGNIVDEVAYHEKYPTIYHLRKKLVDSTDKADLRLIYLALAHMIKFRGHFLIEGDLNPDNSDVDKLFIQLVQTYNQLFEENPINASGVDAKAILSARLSKSRRLENLIAQLPGEKKNGLFGNLIALSLGLTPNFKSNFDLAEDAKLQLSKDTYDDDLDNLLAQIGDQYADLFLAAKNLSDAILLSDILRVNTEITKAPLSASMIKRYDEHHQDLTLLKALVRQQLPEKYKEIFFDQSKNGYAGYIDGGASQEEFYKFIKPILEKMDGTEELLVKLNREDLLRKQRTFDNGSIPHQIHLGELHAILRRQEDFYPFLKDNREKIEKILTFRIPYYVGPLARGNSRFAWMTRKSEETITPWNFEEVVDKGASAQSFIERMTNFDKNLPNEKVLPKHSLLYEYFTVYNELTKVKYVTEGMRKPAFLSGEQKKAIVDLLFKTNRKVTVKQLKEDYFKKIECFDSVEISGVEDRFNASLGTYHDLLKIIKDKDFLDNEENEDILEDIVLTLTLFEDREMIEERLKTYAHLFDDKVMKQLKRRRYTGWGRLSRKLINGIRDKQSGKTILDFLKSDGFANRNFMQLIHDDSLTFKEDIQKAQVSGQGDSLHEHIANLAGSPAIKKGILQTVKVVDELVKVMGRHKPENIVIEMARENQTTQKGQKNSRERMKRIEEGIKELGSQILKEHPVENTQLQNEKLYLYYLQNGRDMYVDQELDINRLSDYDVDHIVPQSFLKDDSIDNKVLTRSDKARGKSDNVPSEEVVKKMKNYWRQLLNAKLITQRKFDNLTKAERGGLSELDKAGFIKRQLVETRQITKHVAQILDSRMNTKYDENDKLIREVKVITLKSKLVSDFRKDFQFYKVREINNYHHAHDAYLNAVVGTALIKKYPKLESEFVYGDYKVYDVRKMIAKSEQEIGKATAKYFFYSNIMNFFKTEITLANGEIRKRPLIETNGETGEIVWDKGRDFATVRKVLSMPQVNIVKKTEVQTGGFSKESILPKRNSDKLIARKKDWDPKKYGGFDSPTVAYSVLVVAKVEKGKSKKLKSVKELLGITIMERSSFEKNPIDFLEAKGYKEVKKDLIIKLPKYSLFELENGRKRMLASAGELQKGNELALPSKYVNFLYLASHYEKLKGSPEDNEQKQLFVEQHKHYLDEIIEQISEFSKRVILADANLDKVLSAYNKHRDKPIREQAENIIHLFTLTNLGAPAAFKYFDTTIDRKRYTSTKEVLDATLIHQSITGLYETRIDLSQLGGDGGGGGGSSEAAAKGGTLNIEDEYRLHETSKGPDVPLGSTWLSDFPQAWAETGGMGLAVRQAPLIIPLKATSTPVSIKQYPMSQEARLGIKPHIQRLLDQGILVPCQSPWNTPLLPVKKPGTNDYRPVQDLREVNKRVEDIHPTVPNPYNLLSGLPPSHQWYTVLDLKDAFFCLRLHPTSQSLFAFEWRDPEMGISGQLTWTRLPQGFKNSPTLFNEALHRDLADFRIQHPDLILLQYVDDLLLAATSELDCQQGTRALLQTLGDLGYRASAKKAQICQKQVKYLGYLLKEGQRWLTEARKETVMGQPTPKTPRQLREFLGTAGFCRLWIPGFAEMAAPLYPLTKPGTLFEWGPDQQKAYQEIKQALLTAPALGLPDLTKPFELFVDEKQGYAKGVLTQKLGPWRRPVAYLSKKLDPVAAGWPPCLRMVAAIAVLTKDAGKLTMGQPLVILAPHAVEALVKQPPDRWLSNARMTHYQALLLDTDRVQFGPIVALNPATLLPLPEEGLQHDCLDILAEAHGTRPDLTDQPLPDADHTWYTDGSSFLQEGQRKAGAAVTTETEVVWAKALPAGTSAQRAELIALTQALKMAEGKKLNVYTDSRYAFATAHIHGEIYRRRGWLTSEGKEIKNKDEILALLKALFLPKRLSIIHCPGHQKGNRAEARGNRMADQAAREVATRETPETSTLLAGKRTADGSEFEKRTADGSEFESPKKKAKVE

SEQ ID NO: 2462 - protein, 2096 aa, synthetic construct
MPAAKRVKLDGGDKKYSIGLDIGTNSVGWAVITDEYKVPSKKFKVLGNTDRHSIKKNLIGALLFDSGETAEATRLKRTARRRYTRRKNRICYLQEIFSNEMAKVDDSFFHRLEESFLVEEDKKHERHPIFGNIVDEVAYHEKYPTIYHLRKKLVDSTDKADLRLIYLALAHMIKFRGHFLIEGDLNPDNSDVDKLFIQLVQTYNQLFEENPINASGVDAKAILSARLSKSRRLENLIAQLPGEKKNGLFGNLIALSLGLTPNFKSNFDLAEDAKLQLSKDTYDDDLDNLLAQIGDQYADLFLAAKNLSDAILLSDILRVNTEITKAPLSASMIKRYDEHHQDLTLLKALVRQQLPEKYKEIFFDQSKNGYAGYIDGGASQEEFYKFIKPILEKMDGTEELLVKLNREDLLRKQRTFDNGSIPHQIHLGELHAILRRQEDFYPFLKDNREKIEKILTFRIPYYVGPLARGNSRFAWMTRKSEETITPWNFEEVVDKGASAQSFIERMTNFDKNLPNEKVLPKHSLLYEYFTVYNELTKVKYVTEGMRKPAFLSGEQKKAIVDLLFKTNRKVTVKQLKEDYFKKIECFDSVEISGVEDRFNASLGTYHDLLKIIKDKDFLDNEENEDILEDIVLTLTLFEDREMIEERLKTYAHLFDDKVMKQLKRRRYTGWGRLSRKLINGIRDKQSGKTILDFLKSDGFANRNFMQLIHDDSLTFKEDIQKAQVSGQGDSLHEHIANLAGSPAIKKGILQTVKVVDELVKVMGRHKPENIVIEMARENQTTQKGQKNSRERMKRIEEGIKELGSQILKEHPVENTQLQNEKLYLYYLQNGRDMYVDQELDINRLSDYDVDHIVPQSFLKDDSIDNKVLTRSDKARGKSDNVPSEEVVKKMKNYWRQLLNAKLITQRKFDNLTKAERGGLSELDKAGFIKRQLVETRQITKHVAQILDSRMNTKYDENDKLIREVKVITLKSKLVSDFRKDFQFYKVREINNYHHAHDAYLNAVVGTALIKKYPKLESEFVYGDYKVYDVRKMIAKSEQEIGKATAKYFFYSNIMNFFKTEITLANGEIRKRPLIETNGETGEIVWDKGRDFATVRKVLSMPQVNIVKKTEVQTGGFSKESILPKRNSDKLIARKKDWDPKKYGGFDSPTVAYSVLVVAKVEKGKSKKLKSVKELLGITIMERSSFEKNPIDFLEAKGYKEVKKDLIIKLPKYSLFELENGRKRMLASAGELQKGNELALPSKYVNFLYLASHYEKLKGSPEDNEQKQLFVEQHKHYLDEIIEQISEFSKRVILADANLDKVLSAYNKHRDKPIREQAENIIHLFTLTNLGAPAAFKYFDTTIDRKRYTSTKEVLDATLIHQSITGLYETRIDLSQLGGDGGEAAAKGGGGSSGGTLNIEDEYRLHETSKGPDVPLGSTWLSDFPQAWAETGGMGLAVRQAPLIIPLKATSTPVSIKQYPMSQEARLGIKPHIQRLLDQGILVPCQSPWNTPLLPVKKPGTNDYRPVQDLREVNKRVEDIHPTVPNPYNLLSGLPPSHQWYTVLDLKDAFFCLRLHPTSQSLFAFEWRDPEMGISGQLTWTRLPQGFKNSPTLFNEALHRDLADFRIQHPDLILLQYVDDLLLAATSELDCQQGTRALLQTLGDLGYRASAKKAQICQKQVKYLGYLLKEGQRWLTEARKETVMGQPTPKTPRQLREFLGTAGFCRLWIPGFAEMAAPLYPLTKPGTLFEWGPDQQKAYQEIKQALLTAPALGLPDLTKPFELFVDEKQGYAKGVLTQKLGPWRRPVAYLSKKLDPVAAGWPPCLRMVAAIAVLTKDAGKLTMGQPLVILAPHAVEALVKQPPDRWLSNARMTHYQALLLDTDRVQFGPIVALNPATLLPLPEEGLQHDCLDILAEAHGTRPDLTDQPLPDADHTWYTDGSSFLQEGQRKAGAAVTTETEVVWAKALPAGTSAQRAELIALTQALKMAEGKKLNVYTDSRYAFATAHIHGEIYRRRGWLTSEGKEIKNKDEILALLKALFLPKRLSIIHCPGHQKGNRAEARGNRMADQAAREVATRETPETSTLLAGKRTADGSEFEKRTADGSEFESPKKKAKVE

SEQ ID NO: 2463 - protein, 2094 aa, synthetic construct
MPAAKRVKLDGGDKKYSIGLDIGTNSVGWAVITDEYKVPSKKFKVLGNTDRHSIKKNLIGALLFDSGETAEATRLKRTARRRYTRRKNRICYLQEIFSNEMAKVDDSFFHRLEESFLVEEDKKHERHPIFGNIVDEVAYHEKYPTIYHLRKKLVDSTDKADLRLIYLALAHMIKFRGHFLIEGDLNPDNSDVDKLFIQLVQTYNQLFEENPINASGVDAKAILSARLSKSRRLENLIAQLPGEKKNGLFGNLIALSLGLTPNFKSNFDLAEDAKLQLSKDTYDDDLDNLLAQIGDQYADLFLAAKNLSDAILLSDILRVNTEITKAPLSASMIKRYDEHHQDLTLLKALVRQQLPEKYKEIFFDQSKNGYAGYIDGGASQEEFYKFIKPILEKMDGTEELLVKLNREDLLRKQRTFDNGSIPHQIHLGELHAILRRQEDFYPFLKDNREKIEKILTFRIPYYVGPLARGNSRFAWMTRKSEETITPWNFEEVVDKGASAQSFIERMTNFDKNLPNEKVLPKHSLLYEYFTVYNELTKVKYVTEGMRKPAFLSGEQKKAIVDLLFKTNRKVTVKQLKEDYFKKIECFDSVEISGVEDRFNASLGTYHDLLKIIKDKDFLDNEENEDILEDIVLTLTLFEDREMIEERLKTYAHLFDDKVMKQLKRRRYTGWGRLSRKLINGIRDKQSGKTILDFLKSDGFANRNFMQLIHDDSLTFKEDIQKAQVSGQGDSLHEHIANLAGSPAIKKGILQTVKVVDELVKVMGRHKPENIVIEMARENQTTQKGQKNSRERMKRIEEGIKELGSQILKEHPVENTQLQNEKLYLYYLQNGRDMYVDQELDINRLSDYDVDHIVPQSFLKDDSIDNKVLTRSDKARGKSDNVPSEEVVKKMKNYWRQLLNAKLITQRKFDNLTKAERGGLSELDKAGFIKRQLVETRQITKHVAQILDSRMNTKYDENDKLIREVKVITLKSKLVSDFRKDFQFYKVREINNYHHAHDAYLNAVVGTALIKKYPKLESEFVYGDYKVYDVRKMIAKSEQEIGKATAKYFFYSNIMNFFKTEITLANGEIRKRPLIETNGETGEIVWDKGRDFATVRKVLSMPQVNIVKKTEVQTGGFSKESILPKRNSDKLIARKKDWDPKKYGGFDSPTVAYSVLVVAKVEKGKSKKLKSVKELLGITIMERSSFEKNPIDFLEAKGYKEVKKDLIIKLPKYSLFELENGRKRMLASAGELQKGNELALPSKYVNFLYLASHYEKLKGSPEDNEQKQLFVEQHKHYLDEIIEQISEFSKRVILADANLDKVLSAYNKHRDKPIREQAENIIHLFTLTNLGAPAAFKYFDTTIDRKRYTSTKEVLDATLIHQSITGLYETRIDLSQLGGDGGGSSGGSGGGGGTLNIEDEYRLHETSKGPDVPLGSTWLSDFPQAWAETGGMGLAVRQAPLIIPLKATSTPVSIKQYPMSQEARLGIKPHIQRLLDQGILVPCQSPWNTPLLPVKKPGTNDYRPVQDLREVNKRVEDIHPTVPNPYNLLSGLPPSHQWYTVLDLKDAFFCLRLHPTSQSLFAFEWRDPEMGISGQLTWTRLPQGFKNSPTLFNEALHRDLADFRIQHPDLILLQYVDDLLLAATSELDCQQGTRALLQTLGDLGYRASAKKAQICQKQVKYLGYLLKEGQRWLTEARKETVMGQPTPKTPRQLREFLGTAGFCRLWIPGFAEMAAPLYPLTKPGTLFEWGPDQQKAYQEIKQALLTAPALGLPDLTKPFELFVDEKQGYAKGVLTQKLGPWRRPVAYLSKKLDPVAAGWPPCLRMVAAIAVLTKDAGKLTMGQPLVILAPHAVEALVKQPPDRWLSNARMTHYQALLLDTDRVQFGPIVALNPATLLPLPEEGLQHDCLDILAEAHGTRPDLTDQPLPDADHTWYTDGSSFLQEGQRKAGAAVTTETEVVWAKALPAGTSAQRAELIALTQALKMAEGKKLNVYTDSRYAFATAHIHGEIYRRRGWLTSEGKEIKNKDEILALLKALFLPKRLSIIHCPGHQKGNRAEARGNRMADQAAREVATRETPETSTLLAGKRTADGSEFEKRTADGSEFESPKKKAKVE

SEQ ID NO: 2464 - protein, 2105 aa, synthetic construct
MPAAKRVKLDGGDKKYSIGLDIGTNSVGWAVITDEYKVPSKKFKVLGNTDRHSIKKNLIGALLFDSGETAEATRLKRTARRRYTRRKNRICYLQEIFSNEMAKVDDSFFHRLEESFLVEEDKKHERHPIFGNIVDEVAYHEKYPTIYHLRKKLVDSTDKADLRLIYLALAHMIKFRGHFLIEGDLNPDNSDVDKLFIQLVQTYNQLFEENPINASGVDAKAILSARLSKSRRLENLIAQLPGEKKNGLFGNLIALSLGLTPNFKSNFDLAEDAKLQLSKDTYDDDLDNLLAQIGDQYADLFLAAKNLSDAILLSDILRVNTEITKAPLSASMIKRYDEHHQDLTLLKALVRQQLPEKYKEIFFDQSKNGYAGYIDGGASQEEFYKFIKPILEKMDGTEELLVKLNREDLLRKQRTFDNGSIPHQIHLGELHAILRRQEDFYPFLKDNREKIEKILTFRIPYYVGPLARGNSRFAWMTRKSEETITPWNFEEVVDKGASAQSFIERMTNFDKNLPNEKVLPKHSLLYEYFTVYNELTKVKYVTEGMRKPAFLSGEQKKAIVDLLFKTNRKVTVKQLKEDYFKKIECFDSVEISGVEDRFNASLGTYHDLLKIIKDKDFLDNEENEDILEDIVLTLTLFEDREMIEERLKTYAHLFDDKVMKQLKRRRYTGWGRLSRKLINGIRDKQSGKTILDFLKSDGFANRNFMQLIHDDSLTFKEDIQKAQVSGQGDSLHEHIANLAGSPAIKKGILQTVKVVDELVKVMGRHKPENIVIEMARENQTTQKGQKNSRERMKRIEEGIKELGSQILKEHPVENTQLQNEKLYLYYLQNGRDMYVDQELDINRLSDYDVDHIVPQSFLKDDSIDNKVLTRSDKARGKSDNVPSEEVVKKMKNYWRQLLNAKLITQRKFDNLTKAERGGLSELDKAGFIKRQLVETRQITKHVAQILDSRMNTKYDENDKLIREVKVITLKSKLVSDFRKDFQFYKVREINNYHHAHDAYLNAVVGTALIKKYPKLESEFVYGDYKVYDVRKMIAKSEQEIGKATAKYFFYSNIMNFFKTEITLANGEIRKRPLIETNGETGEIVWDKGRDFATVRKVLSMPQVNIVKKTEVQTGGFSKESILPKRNSDKLIARKKDWDPKKYGGFDSPTVAYSVLVVAKVEKGKSKKLKSVKELLGITIMERSSFEKNPIDFLEAKGYKEVKKDLIIKLPKYSLFELENGRKRMLASAGELQKGNELALPSKYVNFLYLASHYEKLKGSPEDNEQKQLFVEQHKHYLDEIIEQISEFSKRVILADANLDKVLSAYNKHRDKPIREQAENIIHLFTLTNLGAPAAFKYFDTTIDRKRYTSTKEVLDATLIHQSITGLYETRIDLSQLGGDGGGGGGSGGGGSGGGGSGGGGSGGTLNIEDEYRLHETSKGPDVPLGSTWLSDFPQAWAETGGMGLAVRQAPLIIPLKATSTPVSIKQYPMSQEARLGIKPHIQRLLDQGILVPCQSPWNTPLLPVKKPGTNDYRPVQDLREVNKRVEDIHPTVPNPYNLLSGLPPSHQWYTVLDLKDAFFCLRLHPTSQSLFAFEWRDPEMGISGQLTWTRLPQGFKNSPTLFNEALHRDLADFRIQHPDLILLQYVDDLLLAATSELDCQQGTRALLQTLGDLGYRASAKKAQICQKQVKYLGYLLKEGQRWLTEARKETVMGQPTPKTPRQLREFLGTAGFCRLWIPGFAEMAAPLYPLTKPGTLFEWGPDQQKAYQEIKQALLTAPALGLPDLTKPFELFVDEKQGYAKGVLTQKLGPWRRPVAYLSKKLDPVAAGWPPCLRMVAAIAVLTKDAGKLTMGQPLVILAPHAVEALVKQPPDRWLSNARMTHYQALLLDTDRVQFGPIVALNPATLLPLPEEGLQHDCLDILAEAHGTRPDLTDQPLPDADHTWYTDGSSFLQEGQRKAGAAVTTETEVVWAKALPAGTSAQRAELIALTQALKMAEGKKLNVYTDSRYAFATAHIHGEIYRRRGWLTSEGKEIKNKDEILALLKALFLPKRLSIIHCPGHQKGNRAEARGNRMADQAAREVATRETPETSTLLAGKRTADGSEFEKRTADGSEFESPKKKAKVE

SEQ ID NO: 2465 - protein, 2100 aa, synthetic construct
MPAAKRVKLDGGDKKYSIGLDIGTNSVGWAVITDEYKVPSKKFKVLGNTDRHSIKKNLIGALLFDSGETAEATRLKRTARRRYTRRKNRICYLQEIFSNEMAKVDDSFFHRLEESFLVEEDKKHERHPIFGNIVDEVAYHEKYPTIYHLRKKLVDSTDKADLRLIYLALAHMIKFRGHFLIEGDLNPDNSDVDKLFIQLVQTYNQLFEENPINASGVDAKAILSARLSKSRRLENLIAQLPGEKKNGLFGNLIALSLGLTPNFKSNFDLAEDAKLQLSKDTYDDDLDNLLAQIGDQYADLFLAAKNLSDAILLSDILRVNTEITKAPLSASMIKRYDEHHQDLTLLKALVRQQLPEKYKEIFFDQSKNGYAGYIDGGASQEEFYKFIKPILEKMDGTEELLVKLNREDLLRKQRTFDNGSIPHQIHLGELHAILRRQEDFYPFLKDNREKIEKILTFRIPYYVGPLARGNSRFAWMTRKSEETITPWNFEEVVDKGASAQSFIERMTNFDKNLPNEKVLPKHSLLYEYFTVYNELTKVKYVTEGMRKPAFLSGEQKKAIVDLLFKTNRKVTVKQLKEDYFKKIECFDSVEISGVEDRFNASLGTYHDLLKIIKDKDFLDNEENEDILEDIVLTLTLFEDREMIEERLKTYAHLFDDKVMKQLKRRRYTGWGRLSRKLINGIRDKQSGKTILDFLKSDGFANRNFMQLIHDDSLTFKEDIQKAQVSGQGDSLHEHIANLAGSPAIKKGILQTVKVVDELVKVMGRHKPENIVIEMARENQTTQKGQKNSRERMKRIEEGIKELGSQILKEHPVENTQLQNEKLYLYYLQNGRDMYVDQELDINRLSDYDVDHIVPQSFLKDDSIDNKVLTRSDKARGKSDNVPSEEVVKKMKNYWRQLLNAKLITQRKFDNLTKAERGGLSELDKAGFIKRQLVETRQITKHVAQILDSRMNTKYDENDKLIREVKVITLKSKLVSDFRKDFQFYKVREINNYHHAHDAYLNAVVGTALIKKYPKLESEFVYGDYKVYDVRKMIAKSEQEIGKATAKYFFYSNIMNFFKTEITLANGEIRKRPLIETNGETGEIVWDKGRDFATVRKVLSMPQVNIVKKTEVQTGGFSKESILPKRNSDKLIARKKDWDPKKYGGFDSPTVAYSVLVVAKVEKGKSKKLKSVKELLGITIMERSSFEKNPIDFLEAKGYKEVKKDLIIKLPKYSLFELENGRKRMLASAGELQKGNELALPSKYVNFLYLASHYEKLKGSPEDNEQKQLFVEQHKHYLDEIIEQISEFSKRVILADANLDKVLSAYNKHRDKPIREQAENIIHLFTLTNLGAPAAFKYFDTTIDRKRYTSTKEVLDATLIHQSITGLYETRIDLSQLGGDGGGGSGGSGGSGGSGGSGGTLNIEDEYRLHETSKGPDVPLGSTWLSDFPQAWAETGGMGLAVRQAPLIIPLKATSTPVSIKQYPMSQEARLGIKPHIQRLLDQGILVPCQSPWNTPLLPVKKPGTNDYRPVQDLREVNKRVEDIHPTVPNPYNLLSGLPPSHQWYTVLDLKDAFFCLRLHPTSQSLFAFEWRDPEMGISGQLTWTRLPQGFKNSPTLFNEALHRDLADFRIQHPDLILLQYVDDLLLAATSELDCQQGTRALLQTLGDLGYRASAKKAQICQKQVKYLGYLLKEGQRWLTEARKETVMGQPTPKTPRQLREFLGTAGFCRLWIPGFAEMAAPLYPLTKPGTLFEWGPDQQKAYQEIKQALLTAPALGLPDLTKPFELFVDEKQGYAKGVLTQKLGPWRRPVAYLSKKLDPVAAGWPPCLRMVAAIAVLTKDAGKLTMGQPLVILAPHAVEALVKQPPDRWLSNARMTHYQALLLDTDRVQFGPIVALNPATLLPLPEEGLQHDCLDILAEAHGTRPDLTDQPLPDADHTWYTDGSSFLQEGQRKAGAAVTTETEVVWAKALPAGTSAQRAELIALTQALKMAEGKKLNVYTDSRYAFATAHIHGEIYRRRGWLTSEGKEIKNKDEILALLKALFLPKRLSIIHCPGHQKGNRAEARGNRMADQAAREVATRETPETSTLLAGKRTADGSEFEKRTADGSEFESPKKKAKVE

SEQ ID NO: 2466 - protein, 2096 aa, synthetic construct
MPAAKRVKLDGGDKKYSIGLDIGTNSVGWAVITDEYKVPSKKFKVLGNTDRHSIKKNLIGALLFDSGETAEATRLKRTARRRYTRRKNRICYLQEIFSNEMAKVDDSFFHRLEESFLVEEDKKHERHPIFGNIVDEVAYHEKYPTIYHLRKKLVDSTDKADLRLIYLALAHMIKFRGHFLIEGDLNPDNSDVDKLFIQLVQTYNQLFEENPINASGVDAKAILSARLSKSRRLENLIAQLPGEKKNGLFGNLIALSLGLTPNFKSNFDLAEDAKLQLSKDTYDDDLDNLLAQIGDQYADLFLAAKNLSDAILLSDILRVNTEITKAPLSASMIKRYDEHHQDLTLLKALVRQQLPEKYKEIFFDQSKNGYAGYIDGGASQEEFYKFIKPILEKMDGTEELLVKLNREDLLRKQRTFDNGSIPHQIHLGELHAILRRQEDFYPFLKDNREKIEKILTFRIPYYVGPLARGNSRFAWMTRKSEETITPWNFEEVVDKGASAQSFIERMTNFDKNLPNEKVLPKHSLLYEYFTVYNELTKVKYVTEGMRKPAFLSGEQKKAIVDLLFKTNRKVTVKQLKEDYFKKIECFDSVEISGVEDRFNASLGTYHDLLKIIKDKDFLDNEENEDILEDIVLTLTLFEDREMIEERLKTYAHLFDDKVMKQLKRRRYTGWGRLSRKLINGIRDKQSGKTILDFLKSDGFANRNFMQLIHDDSLTFKEDIQKAQVSGQGDSLHEHIANLAGSPAIKKGILQTVKVVDELVKVMGRHKPENIVIEMARENQTTQKGQKNSRERMKRIEEGIKELGSQILKEHPVENTQLQNEKLYLYYLQNGRDMYVDQELDINRLSDYDVDHIVPQSFLKDDSIDNKVLTRSDKARGKSDNVPSEEVVKKMKNYWRQLLNAKLITQRKFDNLTKAERGGLSELDKAGFIKRQLVETRQITKHVAQILDSRMNTKYDENDKLIREVKVITLKSKLVSDFRKDFQFYKVREINNYHHAHDAYLNAVVGTALIKKYPKLESEFVYGDYKVYDVRKMIAKSEQEIGKATAKYFFYSNIMNFFKTEITLANGEIRKRPLIETNGETGEIVWDKGRDFATVRKVLSMPQVNIVKKTEVQTGGFSKESILPKRNSDKLIARKKDWDPKKYGGFDSPTVAYSVLVVAKVEKGKSKKLKSVKELLGITIMERSSFEKNPIDFLEAKGYKEVKKDLIIKLPKYSLFELENGRKRMLASAGELQKGNELALPSKYVNFLYLASHYEKLKGSPEDNEQKQLFVEQHKHYLDEIIEQISEFSKRVILADANLDKVLSAYNKHRDKPIREQAENIIHLFTLTNLGAPAAFKYFDTTIDRKRYTSTKEVLDATLIHQSITGLYETRIDLSQLGGDGGPAPEAAAKGSSGGTLNIEDEYRLHETSKGPDVPLGSTWLSDFPQAWAETGGMGLAVRQAPLIIPLKATSTPVSIKQYPMSQEARLGIKPHIQRLLDQGILVPCQSPWNTPLLPVKKPGTNDYRPVQDLREVNKRVEDIHPTVPNPYNLLSGLPPSHQWYTVLDLKDAFFCLRLHPTSQSLFAFEWRDPEMGISGQLTWTRLPQGFKNSPTLFNEALHRDLADFRIQHPDLILLQYVDDLLLAATSELDCQQGTRALLQTLGDLGYRASAKKAQICQKQVKYLGYLLKEGQRWLTEARKETVMGQPTPKTPRQLREFLGTAGFCRLWIPGFAEMAAPLYPLTKPGTLFEWGPDQQKAYQEIKQALLTAPALGLPDLTKPFELFVDEKQGYAKGVLTQKLGPWRRPVAYLSKKLDPVAAGWPPCLRMVAAIAVLTKDAGKLTMGQPLVILAPHAVEALVKQPPDRWLSNARMTHYQALLLDTDRVQFGPIVALNPATLLPLPEEGLQHDCLDILAEAHGTRPDLTDQPLPDADHTWYTDGSSFLQEGQRKAGAAVTTETEVVWAKALPAGTSAQRAELIALTQALKMAEGKKLNVYTDSRYAFATAHIHGEIYRRRGWLTSEGKEIKNKDEILALLKALFLPKRLSIIHCPGHQKGNRAEARGNRMADQAAREVATRETPETSTLLAGKRTADGSEFEKRTADGSEFESPKKKAKVE

SEQ ID NO: 2467 - protein, 2094 aa, synthetic construct
MPAAKRVKLDGGDKKYSIGLDIGTNSVGWAVITDEYKVPSKKFKVLGNTDRHSIKKNLIGALLFDSGETAEATRLKRTARRRYTRRKNRICYLQEIFSNEMAKVDDSFFHRLEESFLVEEDKKHERHPIFGNIVDEVAYHEKYPTIYHLRKKLVDSTDKADLRLIYLALAHMIKFRGHFLIEGDLNPDNSDVDKLFIQLVQTYNQLFEENPINASGVDAKAILSARLSKSRRLENLIAQLPGEKKNGLFGNLIALSLGLTPNFKSNFDLAEDAKLQLSKDTYDDDLDNLLAQIGDQYADLFLAAKNLSDAILLSDILRVNTEITKAPLSASMIKRYDEHHQDLTLLKALVRQQLPEKYKEIFFDQSKNGYAGYIDGGASQEEFYKFIKPILEKMDGTEELLVKLNREDLLRKQRTFDNGSIPHQIHLGELHAILRRQEDFYPFLKDNREKIEKILTFRIPYYVGPLARGNSRFAWMTRKSEETITPWNFEEVVDKGASAQSFIERMTNFDKNLPNEKVLPKHSLLYEYFTVYNELTKVKYVTEGMRKPAFLSGEQKKAIVDLLFKTNRKVTVKQLKEDYFKKIECFDSVEISGVEDRFNASLGTYHDLLKIIKDKDFLDNEENEDILEDIVLTLTLFEDREMIEERLKTYAHLFDDKVMKQLKRRRYTGWGRLSRKLINGIRDKQSGKTILDFLKSDGFANRNFMQLIHDDSLTFKEDIQKAQVSGQGDSLHEHIANLAGSPAIKKGILQTVKVVDELVKVMGRHKPENIVIEMARENQTTQKGQKNSRERMKRIEEGIKELGSQILKEHPVENTQLQNEKLYLYYLQNGRDMYVDQELDINRLSDYDVDHIVPQSFLKDDSIDNKVLTRSDKARGKSDNVPSEEVVKKMKNYWRQLLNAKLITQRKFDNLTKAERGGLSELDKAGFIKRQLVETRQITKHVAQILDSRMNTKYDENDKLIREVKVITLKSKLVSDFRKDFQFYKVREINNYHHAHDAYLNAVVGTALIKKYPKLESEFVYGDYKVYDVRKMIAKSEQEIGKATAKYFFYSNIMNFFKTEITLANGEIRKRPLIETNGETGEIVWDKGRDFATVRKVLSMPQVNIVKKTEVQTGGFSKESILPKRNSDKLIARKKDWDPKKYGGFDSPTVAYSVLVVAKVEKGKSKKLKSVKELLGITIMERSSFEKNPIDFLEAKGYKEVKKDLIIKLPKYSLFELENGRKRMLASAGELQKGNELALPSKYVNFLYLASHYEKLKGSPEDNEQKQLFVEQHKHYLDEIIEQISEFSKRVILADANLDKVLSAYNKHRDKPIREQAENIIHLFTLTNLGAPAAFKYFDTTIDRKRYTSTKEVLDATLIHQSITGLYETRIDLSQLGGDGGPAPGGSGSSGGTLNIEDEYRLHETSKGPDVPLGSTWLSDFPQAWAETGGMGLAVRQAPLIIPLKATSTPVSIKQYPMSQEARLGIKPHIQRLLDQGILVPCQSPWNTPLLPVKKPGTNDYRPVQDLREVNKRVEDIHPTVPNPYNLLSGLPPSHQWYTVLDLKDAFFCLRLHPTSQSLFAFEWRDPEMGISGQLTWTRLPQGFKNSPTLFNEALHRDLADFRIQHPDLILLQYVDDLLLAATSELDCQQGTRALLQTLGDLGYRASAKKAQICQKQVKYLGYLLKEGQRWLTEARKETVMGQPTPKTPRQLREFLGTAGFCRLWIPGFAEMAAPLYPLTKPGTLFEWGPDQQKAYQEIKQALLTAPALGLPDLTKPFELFVDEKQGYAKGVLTQKLGPWRRPVAYLSKKLDPVAAGWPPCLRMVAAIAVLTKDAGKLTMGQPLVILAPHAVEALVKQPPDRWLSNARMTHYQALLLDTDRVQFGPIVALNPATLLPLPEEGLQHDCLDILAEAHGTRPDLTDQPLPDADHTWYTDGSSFLQEGQRKAGAAVTTETEVVWAKALPAGTSAQRAELIALTQALKMAEGKKLNVYTDSRYAFATAHIHGEIYRRRGWLTSEGKEIKNKDEILALLKALFLPKRLSIIHCPGHQKGNRAEARGNRMADQAAREVATRETPETSTLLAGKRTADGSEFEKRTADGSEFESPKKKAKVE

SEQ ID NO: 2468 - protein, 2091 aa, synthetic construct
MPAAKRVKLDGGDKKYSIGLDIGTNSVGWAVITDEYKVPSKKFKVLGNTDRHSIKKNLIGALLFDSGETAEATRLKRTARRRYTRRKNRICYLQEIFSNEMAKVDDSFFHRLEESFLVEEDKKHERHPIFGNIVDEVAYHEKYPTIYHLRKKLVDSTDKADLRLIYLALAHMIKFRGHFLIEGDLNPDNSDVDKLFIQLVQTYNQLFEENPINASGVDAKAILSARLSKSRRLENLIAQLPGEKKNGLFGNLIALSLGLTPNFKSNFDLAEDAKLQLSKDTYDDDLDNLLAQIGDQYADLFLAAKNLSDAILLSDILRVNTEITKAPLSASMIKRYDEHHQDLTLLKALVRQQLPEKYKEIFFDQSKNGYAGYIDGGASQEEFYKFIKPILEKMDGTEELLVKLNREDLLRKQRTFDNGSIPHQIHLGELHAILRRQEDFYPFLKDNREKIEKILTFRIPYYVGPLARGNSRFAWMTRKSEETITPWNFEEVVDKGASAQSFIERMTNFDKNLPNEKVLPKHSLLYEYFTVYNELTKVKYVTEGMRKPAFLSGEQKKAIVDLLFKTNRKVTVKQLKEDYFKKIECFDSVEISGVEDRFNASLGTYHDLLKIIKDKDFLDNEENEDILEDIVLTLTLFEDREMIEERLKTYAHLFDDKVMKQLKRRRYTGWGRLSRKLINGIRDKQSGKTILDFLKSDGFANRNFMQLIHDDSLTFKEDIQKAQVSGQGDSLHEHIANLAGSPAIKKGILQTVKVVDELVKVMGRHKPENIVIEMARENQTTQKGQKNSRERMKRIEEGIKELGSQILKEHPVENTQLQNEKLYLYYLQNGRDMYVDQELDINRLSDYDVDHIVPQSFLKDDSIDNKVLTRSDKARGKSDNVPSEEVVKKMKNYWRQLLNAKLITQRKFDNLTKAERGGLSELDKAGFIKRQLVETRQITKHVAQILDSRMNTKYDENDKLIREVKVITLKSKLVSDFRKDFQFYKVREINNYHHAHDAYLNAVVGTALIKKYPKLESEFVYGDYKVYDVRKMIAKSEQEIGKATAKYFFYSNIMNFFKTEITLANGEIRKRPLIETNGETGEIVWDKGRDFATVRKVLSMPQVNIVKKTEVQTGGFSKESILPKRNSDKLIARKKDWDPKKYGGFDSPTVAYSVLVVAKVEKGKSKKLKSVKELLGITIMERSSFEKNPIDFLEAKGYKEVKKDLIIKLPKYSLFELENGRKRMLASAGELQKGNELALPSKYVNFLYLASHYEKLKGSPEDNEQKQLFVEQHKHYLDEIIEQISEFSKRVILADANLDKVLSAYNKHRDKPIREQAENIIHLFTLTNLGAPAAFKYFDTTIDRKRYTSTKEVLDATLIHQSITGLYETRIDLSQLGGDGGGGGGSSGGTLNIEDEYRLHETSKGPDVPLGSTWLSDFPQAWAETGGMGLAVRQAPLIIPLKATSTPVSIKQYPMSQEARLGIKPHIQRLLDQGILVPCQSPWNTPLLPVKKPGTNDYRPVQDLREVNKRVEDIHPTVPNPYNLLSGLPPSHQWYTVLDLKDAFFCLRLHPTSQSLFAFEWRDPEMGISGQLTWTRLPQGFKNSPTLFNEALHRDLADFRIQHPDLILLQYVDDLLLAATSELDCQQGTRALLQTLGDLGYRASAKKAQICQKQVKYLGYLLKEGQRWLTEARKETVMGQPTPKTPRQLREFLGTAGFCRLWIPGFAEMAAPLYPLTKPGTLFEWGPDQQKAYQEIKQALLTAPALGLPDLTKPFELFVDEKQGYAKGVLTQKLGPWRRPVAYLSKKLDPVAAGWPPCLRMVAAIAVLTKDAGKLTMGQPLVILAPHAVEALVKQPPDRWLSNARMTHYQALLLDTDRVQFGPIVALNPATLLPLPEEGLQHDCLDILAEAHGTRPDLTDQPLPDADHTWYTDGSSFLQEGQRKAGAAVTTETEVVWAKALPAGTSAQRAELIALTQALKMAEGKKLNVYTDSRYAFATAHIHGEIYRRRGWLTSEGKEIKNKDEILALLKALFLPKRLSIIHCPGHQKGNRAEARGNRMADQAAREVATRETPETSTLLAGKRTADGSEFEKRTADGSEFESPKKKAKVE

SEQ ID NO: 2469 - protein, 2096 aa, synthetic construct
MPAAKRVKLDGGDKKYSIGLDIGTNSVGWAVITDEYKVPSKKFKVLGNTDRHSIKKNLIGALLFDSGETAEATRLKRTARRRYTRRKNRICYLQEIFSNEMAKVDDSFFHRLEESFLVEEDKKHERHPIFGNIVDEVAYHEKYPTIYHLRKKLVDSTDKADLRLIYLALAHMIKFRGHFLIEGDLNPDNSDVDKLFIQLVQTYNQLFEENPINASGVDAKAILSARLSKSRRLENLIAQLPGEKKNGLFGNLIALSLGLTPNFKSNFDLAEDAKLQLSKDTYDDDLDNLLAQIGDQYADLFLAAKNLSDAILLSDILRVNTEITKAPLSASMIKRYDEHHQDLTLLKALVRQQLPEKYKEIFFDQSKNGYAGYIDGGASQEEFYKFIKPILEKMDGTEELLVKLNREDLLRKQRTFDNGSIPHQIHLGELHAILRRQEDFYPFLKDNREKIEKILTFRIPYYVGPLARGNSRFAWMTRKSEETITPWNFEEVVDKGASAQSFIERMTNFDKNLPNEKVLPKHSLLYEYFTVYNELTKVKYVTEGMRKPAFLSGEQKKAIVDLLFKTNRKVTVKQLKEDYFKKIECFDSVEISGVEDRFNASLGTYHDLLKIIKDKDFLDNEENEDILEDIVLTLTLFEDREMIEERLKTYAHLFDDKVMKQLKRRRYTGWGRLSRKLINGIRDKQSGKTILDFLKSDGFANRNFMQLIHDDSLTFKEDIQKAQVSGQGDSLHEHIANLAGSPAIKKGILQTVKVVDELVKVMGRHKPENIVIEMARENQTTQKGQKNSRERMKRIEEGIKELGSQILKEHPVENTQLQNEKLYLYYLQNGRDMYVDQELDINRLSDYDVDHIVPQSFLKDDSIDNKVLTRSDKARGKSDNVPSEEVVKKMKNYWRQLLNAKLITQRKFDNLTKAERGGLSELDKAGFIKRQLVETRQITKHVAQILDSRMNTKYDENDKLIREVKVITLKSKLVSDFRKDFQFYKVREINNYHHAHDAYLNAVVGTALIKKYPKLESEFVYGDYKVYDVRKMIAKSEQEIGKATAKYFFYSNIMNFFKTEITLANGEIRKRPLIETNGETGEIVWDKGRDFATVRKVLSMPQVNIVKKTEVQTGGFSKESILPKRNSDKLIARKKDWDPKKYGGFDSPTVAYSVLVVAKVEKGKSKKLKSVKELLGITIMERSSFEKNPIDFLEAKGYKEVKKDLIIKLPKYSLFELENGRKRMLASAGELQKGNELALPSKYVNFLYLASHYEKLKGSPEDNEQKQLFVEQHKHYLDEIIEQISEFSKRVILADANLDKVLSAYNKHRDKPIREQAENIIHLFTLTNLGAPAAFKYFDTTIDRKRYTSTKEVLDATLIHQSITGLYETRIDLSQLGGDGGEAAAKGSSPAPGGTLNIEDEYRLHETSKGPDVPLGSTWLSDFPQAWAETGGMGLAVRQAPLIIPLKATSTPVSIKQYPMSQEARLGIKPHIQRLLDQGILVPCQSPWNTPLLPVKKPGTNDYRPVQDLREVNKRVEDIHPTVPNPYNLLSGLPPSHQWYTVLDLKDAFFCLRLHPTSQSLFAFEWRDPEMGISGQLTWTRLPQGFKNSPTLFNEALHRDLADFRIQHPDLILLQYVDDLLLAATSELDCQQGTRALLQTLGDLGYRASAKKAQICQKQVKYLGYLLKEGQRWLTEARKETVMGQPTPKTPRQLREFLGTAGFCRLWIPGFAEMAAPLYPLTKPGTLFEWGPDQQKAYQEIKQALLTAPALGLPDLTKPFELFVDEKQGYAKGVLTQKLGPWRRPVAYLSKKLDPVAAGWPPCLRMVAAIAVLTKDAGKLTMGQPLVILAPHAVEALVKQPPDRWLSNARMTHYQALLLDTDRVQFGPIVALNPATLLPLPEEGLQHDCLDILAEAHGTRPDLTDQPLPDADHTWYTDGSSFLQEGQRKAGAAVTTETEVVWAKALPAGTSAQRAELIALTQALKMAEGKKLNVYTDSRYAFATAHIHGEIYRRRGWLTSEGKEIKNKDEILALLKALFLPKRLSIIHCPGHQKGNRAEARGNRMADQAAREVATRETPETSTLLAGKRTADGSEFEKRTADGSEFESPKKKAKVE

SEQ ID NO: 2470 - protein, 2096 aa, synthetic construct
MPAAKRVKLDGGDKKYSIGLDIGTNSVGWAVITDEYKVPSKKFKVLGNTDRHSIKKNLIGALLFDSGETAEATRLKRTARRRYTRRKNRICYLQEIFSNEMAKVDDSFFHRLEESFLVEEDKKHERHPIFGNIVDEVAYHEKYPTIYHLRKKLVDSTDKADLRLIYLALAHMIKFRGHFLIEGDLNPDNSDVDKLFIQLVQTYNQLFEENPINASGVDAKAILSARLSKSRRLENLIAQLPGEKKNGLFGNLIALSLGLTPNFKSNFDLAEDAKLQLSKDTYDDDLDNLLAQIGDQYADLFLAAKNLSDAILLSDILRVNTEITKAPLSASMIKRYDEHHQDLTLLKALVRQQLPEKYKEIFFDQSKNGYAGYIDGGASQEEFYKFIKPILEKMDGTEELLVKLNREDLLRKQRTFDNGSIPHQIHLGELHAILRRQEDFYPFLKDNREKIEKILTFRIPYYVGPLARGNSRFAWMTRKSEETITPWNFEEVVDKGASAQSFIERMTNFDKNLPNEKVLPKHSLLYEYFTVYNELTKVKYVTEGMRKPAFLSGEQKKAIVDLLFKTNRKVTVKQLKEDYFKKIECFDSVEISGVEDRFNASLGTYHDLLKIIKDKDFLDNEENEDILEDIVLTLTLFEDREMIEERLKTYAHLFDDKVMKQLKRRRYTGWGRLSRKLINGIRDKQSGKTILDFLKSDGFANRNFMQLIHDDSLTFKEDIQKAQVSGQGDSLHEHIANLAGSPAIKKGILQTVKVVDELVKVMGRHKPENIVIEMARENQTTQKGQKNSRERMKRIEEGIKELGSQILKEHPVENTQLQNEKLYLYYLQNGRDMYVDQELDINRLSDYDVDHIVPQSFLKDDSIDNKVLTRSDKARGKSDNVPSEEVVKKMKNYWRQLLNAKLITQRKFDNLTKAERGGLSELDKAGFIKRQLVETRQITKHVAQILDSRMNTKYDENDKLIREVKVITLKSKLVSDFRKDFQFYKVREINNYHHAHDAYLNAVVGTALIKKYPKLESEFVYGDYKVYDVRKMIAKSEQEIGKATAKYFFYSNIMNFFKTEITLANGEIRKRPLIETNGETGEIVWDKGRDFATVRKVLSMPQVNIVKKTEVQTGGFSKESILPKRNSDKLIARKKDWDPKKYGGFDSPTVAYSVLVVAKVEKGKSKKLKSVKELLGITIMERSSFEKNPIDFLEAKGYKEVKKDLIIKLPKYSLFELENGRKRMLASAGELQKGNELALPSKYVNFLYLASHYEKLKGSPEDNEQKQLFVEQHKHYLDEIIEQISEFSKRVILADANLDKVLSAYNKHRDKPIREQAENIIHLFTLTNLGAPAAFKYFDTTIDRKRYTSTKEVLDATLIHQSITGLYETRIDLSQLGGDGGGGSGSSEAAAKGGTLNIEDEYRLHETSKGPDVPLGSTWLSDFPQAWAETGGMGLAVRQAPLIIPLKATSTPVSIKQYPMSQEARLGIKPHIQRLLDQGILVPCQSPWNTPLLPVKKPGTNDYRPVQDLREVNKRVEDIHPTVPNPYNLLSGLPPSHQWYTVLDLKDAFFCLRLHPTSQSLFAFEWRDPEMGISGQLTWTRLPQGFKNSPTLFNEALHRDLADFRIQHPDLILLQYVDDLLLAATSELDCQQGTRALLQTLGDLGYRASAKKAQICQKQVKYLGYLLKEGQRWLTEARKETVMGQPTPKTPRQLREFLGTAGFCRLWIPGFAEMAAPLYPLTKPGTLFEWGPDQQKAYQEIKQALLTAPALGLPDLTKPFELFVDEKQGYAKGVLTQKLGPWRRPVAYLSKKLDPVAAGWPPCLRMVAAIAVLTKDAGKLTMGQPLVILAPHAVEALVKQPPDRWLSNARMTHYQALLLDTDRVQFGPIVALNPATLLPLPEEGLQHDCLDILAEAHGTRPDLTDQPLPDADHTWYTDGSSFLQEGQRKAGAAVTTETEVVWAKALPAGTSAQRAELIALTQALKMAEGKKLNVYTDSRYAFATAHIHGEIYRRRGWLTSEGKEIKNKDEILALLKALFLPKRLSIIHCPGHQKGNRAEARGNRMADQAAREVATRETPETSTLLAGKRTADGSEFEKRTADGSEFESPKKKAKVE

SEQ ID NO: 2471 - protein, 2094 aa, synthetic construct
MPAAKRVKLDGGDKKYSIGLDIGTNSVGWAVITDEYKVPSKKFKVLGNTDRHSIKKNLIGALLFDSGETAEATRLKRTARRRYTRRKNRICYLQEIFSNEMAKVDDSFFHRLEESFLVEEDKKHERHPIFGNIVDEVAYHEKYPTIYHLRKKLVDSTDKADLRLIYLALAHMIKFRGHFLIEGDLNPDNSDVDKLFIQLVQTYNQLFEENPINASGVDAKAILSARLSKSRRLENLIAQLPGEKKNGLFGNLIALSLGLTPNFKSNFDLAEDAKLQLSKDTYDDDLDNLLAQIGDQYADLFLAAKNLSDAILLSDILRVNTEITKAPLSASMIKRYDEHHQDLTLLKALVRQQLPEKYKEIFFDQSKNGYAGYIDGGASQEEFYKFIKPILEKMDGTEELLVKLNREDLLRKQRTFDNGSIPHQIHLGELHAILRRQEDFYPFLKDNREKIEKILTFRIPYYVGPLARGNSRFAWMTRKSEETITPWNFEEVVDKGASAQSFIERMTNFDKNLPNEKVLPKHSLLYEYFTVYNELTKVKYVTEGMRKPAFLSGEQKKAIVDLLFKTNRKVTVKQLKEDYFKKIECFDSVEISGVEDRFNASLGTYHDLLKIIKDKDFLDNEENEDILEDIVLTLTLFEDREMIEERLKTYAHLFDDKVMKQLKRRRYTGWGRLSRKLINGIRDKQSGKTILDFLKSDGFANRNFMQLIHDDSLTFKEDIQKAQVSGQGDSLHEHIANLAGSPAIKKGILQTVKVVDELVKVMGRHKPENIVIEMARENQTTQKGQKNSRERMKRIEEGIKELGSQILKEHPVENTQLQNEKLYLYYLQNGRDMYVDQELDINRLSDYDVDHIVPQSFLKDDSIDNKVLTRSDKARGKSDNVPSEEVVKKMKNYWRQLLNAKLITQRKFDNLTKAERGGLSELDKAGFIKRQLVETRQITKHVAQILDSRMNTKYDENDKLIREVKVITLKSKLVSDFRKDFQFYKVREINNYHHAHDAYLNAVVGTALIKKYPKLESEFVYGDYKVYDVRKMIAKSEQEIGKATAKYFFYSNIMNFFKTEITLANGEIRKRPLIETNGETGEIVWDKGRDFATVRKVLSMPQVNIVKKTEVQTGGFSKESILPKRNSDKLIARKKDWDPKKYGGFDSPTVAYSVLVVAKVEKGKSKKLKSVKELLGITIMERSSFEKNPIDFLEAKGYKEVKKDLIIKLPKYSLFELENGRKRMLASAGELQKGNELALPSKYVNFLYLASHYEKLKGSPEDNEQKQLFVEQHKHYLDEIIEQISEFSKRVILADANLDKVLSAYNKHRDKPIREQAENIIHLFTLTNLGAPAAFKYFDTTIDRKRYTSTKEVLDATLIHQSITGLYETRIDLSQLGGDGGGSSGSSGSSGGTLNIEDEYRLHETSKGPDVPLGSTWLSDFPQAWAETGGMGLAVRQAPLIIPLKATSTPVSIKQYPMSQEARLGIKPHIQRLLDQGILVPCQSPWNTPLLPVKKPGTNDYRPVQDLREVNKRVEDIHPTVPNPYNLLSGLPPSHQWYTVLDLKDAFFCLRLHPTSQSLFAFEWRDPEMGISGQLTWTRLPQGFKNSPTLFNEALHRDLADFRIQHPDLILLQYVDDLLLAATSELDCQQGTRALLQTLGDLGYRASAKKAQICQKQVKYLGYLLKEGQRWLTEARKETVMGQPTPKTPRQLREFLGTAGFCRLWIPGFAEMAAPLYPLTKPGTLFEWGPDQQKAYQEIKQALLTAPALGLPDLTKPFELFVDEKQGYAKGVLTQKLGPWRRPVAYLSKKLDPVAAGWPPCLRMVAAIAVLTKDAGKLTMGQPLVILAPHAVEALVKQPPDRWLSNARMTHYQALLLDTDRVQFGPIVALNPATLLPLPEEGLQHDCLDILAEAHGTRPDLTDQPLPDADHTWYTDGSSFLQEGQRKAGAAVTTETEVVWAKALPAGTSAQRAELIALTQALKMAEGKKLNVYTDSRYAFATAHIHGEIYRRRGWLTSEGKEIKNKDEILALLKALFLPKRLSIIHCPGHQKGNRAEARGNRMADQAAREVATRETPETSTLLAGKRTADGSEFEKRTADGSEFESPKKKAKVE

SEQ ID NO: 2472 - protein, 2096 aa, synthetic construct
MPAAKRVKLDGGDKKYSIGLDIGTNSVGWAVITDEYKVPSKKFKVLGNTDRHSIKKNLIGALLFDSGETAEATRLKRTARRRYTRRKNRICYLQEIFSNEMAKVDDSFFHRLEESFLVEEDKKHERHPIFGNIVDEVAYHEKYPTIYHLRKKLVDSTDKADLRLIYLALAHMIKFRGHFLIEGDLNPDNSDVDKLFIQLVQTYNQLFEENPINASGVDAKAILSARLSKSRRLENLIAQLPGEKKNGLFGNLIALSLGLTPNFKSNFDLAEDAKLQLSKDTYDDDLDNLLAQIGDQYADLFLAAKNLSDAILLSDILRVNTEITKAPLSASMIKRYDEHHQDLTLLKALVRQQLPEKYKEIFFDQSKNGYAGYIDGGASQEEFYKFIKPILEKMDGTEELLVKLNREDLLRKQRTFDNGSIPHQIHLGELHAILRRQEDFYPFLKDNREKIEKILTFRIPYYVGPLARGNSRFAWMTRKSEETITPWNFEEVVDKGASAQSFIERMTNFDKNLPNEKVLPKHSLLYEYFTVYNELTKVKYVTEGMRKPAFLSGEQKKAIVDLLFKTNRKVTVKQLKEDYFKKIECFDSVEISGVEDRFNASLGTYHDLLKIIKDKDFLDNEENEDILEDIVLTLTLFEDREMIEERLKTYAHLFDDKVMKQLKRRRYTGWGRLSRKLINGIRDKQSGKTILDFLKSDGFANRNFMQLIHDDSLTFKEDIQKAQVSGQGDSLHEHIANLAGSPAIKKGILQTVKVVDELVKVMGRHKPENIVIEMARENQTTQKGQKNSRERMKRIEEGIKELGSQILKEHPVENTQLQNEKLYLYYLQNGRDMYVDQELDINRLSDYDVDHIVPQSFLKDDSIDNKVLTRSDKARGKSDNVPSEEVVKKMKNYWRQLLNAKLITQRKFDNLTKAERGGLSELDKAGFIKRQLVETRQITKHVAQILDSRMNTKYDENDKLIREVKVITLKSKLVSDFRKDFQFYKVREINNYHHAHDAYLNAVVGTALIKKYPKLESEFVYGDYKVYDVRKMIAKSEQEIGKATAKYFFYSNIMNFFKTEITLANGEIRKRPLIETNGETGEIVWDKGRDFATVRKVLSMPQVNIVKKTEVQTGGFSKESILPKRNSDKLIARKKDWDPKKYGGFDSPTVAYSVLVVAKVEKGKSKKLKSVKELLGITIMERSSFEKNPIDFLEAKGYKEVKKDLIIKLPKYSLFELENGRKRMLASAGELQKGNELALPSKYVNFLYLASHYEKLKGSPEDNEQKQLFVEQHKHYLDEIIEQISEFSKRVILADANLDKVLSAYNKHRDKPIREQAENIIHLFTLTNLGAPAAFKYFDTTIDRKRYTSTKEVLDATLIHQSITGLYETRIDLSQLGGDGGGGGPAPEAAAKGGTLNIEDEYRLHETSKGPDVPLGSTWLSDFPQAWAETGGMGLAVRQAPLIIPLKATSTPVSIKQYPMSQEARLGIKPHIQRLLDQGILVPCQSPWNTPLLPVKKPGTNDYRPVQDLREVNKRVEDIHPTVPNPYNLLSGLPPSHQWYTVLDLKDAFFCLRLHPTSQSLFAFEWRDPEMGISGQLTWTRLPQGFKNSPTLFNEALHRDLADFRIQHPDLILLQYVDDLLLAATSELDCQQGTRALLQTLGDLGYRASAKKAQICQKQVKYLGYLLKEGQRWLTEARKETVMGQPTPKTPRQLREFLGTAGFCRLWIPGFAEMAAPLYPLTKPGTLFEWGPDQQKAYQEIKQALLTAPALGLPDLTKPFELFVDEKQGYAKGVLTQKLGPWRRPVAYLSKKLDPVAAGWPPCLRMVAAIAVLTKDAGKLTMGQPLVILAPHAVEALVKQPPDRWLSNARMTHYQALLLDTDRVQFGPIVALNPATLLPLPEEGLQHDCLDILAEAHGTRPDLTDQPLPDADHTWYTDGSSFLQEGQRKAGAAVTTETEVVWAKALPAGTSAQRAELIALTQALKMAEGKKLNVYTDSRYAFATAHIHGEIYRRRGWLTSEGKEIKNKDEILALLKALFLPKRLSIIHCPGHQKGNRAEARGNRMADQAAREVATRETPETSTLLAGKRTADGSEFEKRTADGSEFESPKKKAKVE

SEQ ID NO: 2473 - protein, 2096 aa, synthetic construct
MPAAKRVKLDGGDKKYSIGLDIGTNSVGWAVITDEYKVPSKKFKVLGNTDRHSIKKNLIGALLFDSGETAEATRLKRTARRRYTRRKNRICYLQEIFSNEMAKVDDSFFHRLEESFLVEEDKKHERHPIFGNIVDEVAYHEKYPTIYHLRKKLVDSTDKADLRLIYLALAHMIKFRGHFLIEGDLNPDNSDVDKLFIQLVQTYNQLFEENPINASGVDAKAILSARLSKSRRLENLIAQLPGEKKNGLFGNLIALSLGLTPNFKSNFDLAEDAKLQLSKDTYDDDLDNLLAQIGDQYADLFLAAKNLSDAILLSDILRVNTEITKAPLSASMIKRYDEHHQDLTLLKALVRQQLPEKYKEIFFDQSKNGYAGYIDGGASQEEFYKFIKPILEKMDGTEELLVKLNREDLLRKQRTFDNGSIPHQIHLGELHAILRRQEDFYPFLKDNREKIEKILTFRIPYYVGPLARGNSRFAWMTRKSEETITPWNFEEVVDKGASAQSFIERMTNFDKNLPNEKVLPKHSLLYEYFTVYNELTKVKYVTEGMRKPAFLSGEQKKAIVDLLFKTNRKVTVKQLKEDYFKKIECFDSVEISGVEDRFNASLGTYHDLLKIIKDKDFLDNEENEDILEDIVLTLTLFEDREMIEERLKTYAHLFDDKVMKQLKRRRYTGWGRLSRKLINGIRDKQSGKTILDFLKSDGFANRNFMQLIHDDSLTFKEDIQKAQVSGQGDSLHEHIANLAGSPAIKKGILQTVKVVDELVKVMGRHKPENIVIEMARENQTTQKGQKNSRERMKRIEEGIKELGSQILKEHPVENTQLQNEKLYLYYLQNGRDMYVDQELDINRLSDYDVDHIVPQSFLKDDSIDNKVLTRSDKARGKSDNVPSEEVVKKMKNYWRQLLNAKLITQRKFDNLTKAERGGLSELDKAGFIKRQLVETRQITKHVAQILDSRMNTKYDENDKLIREVKVITLKSKLVSDFRKDFQFYKVREINNYHHAHDAYLNAVVGTALIKKYPKLESEFVYGDYKVYDVRKMIAKSEQEIGKATAKYFFYSNIMNFFKTEITLANGEIRKRPLIETNGETGEIVWDKGRDFATVRKVLSMPQVNIVKKTEVQTGGFSKESILPKRNSDKLIARKKDWDPKKYGGFDSPTVAYSVLVVAKVEKGKSKKLKSVKELLGITIMERSSFEKNPIDFLEAKGYKEVKKDLIIKLPKYSLFELENGRKRMLASAGELQKGNELALPSKYVNFLYLASHYEKLKGSPEDNEQKQLFVEQHKHYLDEIIEQISEFSKRVILADANLDKVLSAYNKHRDKPIREQAENIIHLFTLTNLGAPAAFKYFDTTIDRKRYTSTKEVLDATLIHQSITGLYETRIDLSQLGGDGGEAAAKPAPGSSGGTLNIEDEYRLHETSKGPDVPLGSTWLSDFPQAWAETGGMGLAVRQAPLIIPLKATSTPVSIKQYPMSQEARLGIKPHIQRLLDQGILVPCQSPWNTPLLPVKKPGTNDYRPVQDLREVNKRVEDIHPTVPNPYNLLSGLPPSHQWYTVLDLKDAFFCLRLHPTSQSLFAFEWRDPEMGISGQLTWTRLPQGFKNSPTLFNEALHRDLADFRIQHPDLILLQYVDDLLLAATSELDCQQGTRALLQTLGDLGYRASAKKAQICQKQVKYLGYLLKEGQRWLTEARKETVMGQPTPKTPRQLREFLGTAGFCRLWIPGFAEMAAPLYPLTKPGTLFEWGPDQQKAYQEIKQALLTAPALGLPDLTKPFELFVDEKQGYAKGVLTQKLGPWRRPVAYLSKKLDPVAAGWPPCLRMVAAIAVLTKDAGKLTMGQPLVILAPHAVEALVKQPPDRWLSNARMTHYQALLLDTDRVQFGPIVALNPATLLPLPEEGLQHDCLDILAEAHGTRPDLTDQPLPDADHTWYTDGSSFLQEGQRKAGAAVTTETEVVWAKALPAGTSAQRAELIALTQALKMAEGKKLNVYTDSRYAFATAHIHGEIYRRRGWLTSEGKEIKNKDEILALLKALFLPKRLSIIHCPGHQKGNRAEARGNRMADQAAREVATRETPETSTLLAGKRTADGSEFEKRTADGSEFESPKKKAKVE

SEQ ID NO: 2474 - protein, 2096 aa, synthetic construct
MPAAKRVKLDGGDKKYSIGLDIGTNSVGWAVITDEYKVPSKKFKVLGNTDRHSIKKNLIGALLFDSGETAEATRLKRTARRRYTRRKNRICYLQEIFSNEMAKVDDSFFHRLEESFLVEEDKKHERHPIFGNIVDEVAYHEKYPTIYHLRKKLVDSTDKADLRLIYLALAHMIKFRGHFLIEGDLNPDNSDVDKLFIQLVQTYNQLFEENPINASGVDAKAILSARLSKSRRLENLIAQLPGEKKNGLFGNLIALSLGLTPNFKSNFDLAEDAKLQLSKDTYDDDLDNLLAQIGDQYADLFLAAKNLSDAILLSDILRVNTEITKAPLSASMIKRYDEHHQDLTLLKALVRQQLPEKYKEIFFDQSKNGYAGYIDGGASQEEFYKFIKPILEKMDGTEELLVKLNREDLLRKQRTFDNGSIPHQIHLGELHAILRRQEDFYPFLKDNREKIEKILTFRIPYYVGPLARGNSRFAWMTRKSEETITPWNFEEVVDKGASAQSFIERMTNFDKNLPNEKVLPKHSLLYEYFTVYNELTKVKYVTEGMRKPAFLSGEQKKAIVDLLFKTNRKVTVKQLKEDYFKKIECFDSVEISGVEDRFNASLGTYHDLLKIIKDKDFLDNEENEDILEDIVLTLTLFEDREMIEERLKTYAHLFDDKVMKQLKRRRYTGWGRLSRKLINGIRDKQSGKTILDFLKSDGFANRNFMQLIHDDSLTFKEDIQKAQVSGQGDSLHEHIANLAGSPAIKKGILQTVKVVDELVKVMGRHKPENIVIEMARENQTTQKGQKNSRERMKRIEEGIKELGSQILKEHPVENTQLQNEKLYLYYLQNGRDMYVDQELDINRLSDYDVDHIVPQSFLKDDSIDNKVLTRSDKARGKSDNVPSEEVVKKMKNYWRQLLNAKLITQRKFDNLTKAERGGLSELDKAGFIKRQLVETRQITKHVAQILDSRMNTKYDENDKLIREVKVITLKSKLVSDFRKDFQFYKVREINNYHHAHDAYLNAVVGTALIKKYPKLESEFVYGDYKVYDVRKMIAKSEQEIGKATAKYFFYSNIMNFFKTEITLANGEIRKRPLIETNGETGEIVWDKGRDFATVRKVLSMPQVNIVKKTEVQTGGFSKESILPKRNSDKLIARKKDWDPKKYGGFDSPTVAYSVLVVAKVEKGKSKKLKSVKELLGITIMERSSFEKNPIDFLEAKGYKEVKKDLIIKLPKYSLFELENGRKRMLASAGELQKGNELALPSKYVNFLYLASHYEKLKGSPEDNEQKQLFVEQHKHYLDEIIEQISEFSKRVILADANLDKVLSAYNKHRDKPIREQAENIIHLFTLTNLGAPAAFKYFDTTIDRKRYTSTKEVLDATLIHQSITGLYETRIDLSQLGGDGGEAAAKGGSPAPGGTLNIEDEYRLHETSKGPDVPLGSTWLSDFPQAWAETGGMGLAVRQAPLIIPLKATSTPVSIKQYPMSQEARLGIKPHIQRLLDQGILVPCQSPWNTPLLPVKKPGTNDYRPVQDLREVNKRVEDIHPTVPNPYNLLSGLPPSHQWYTVLDLKDAFFCLRLHPTSQSLFAFEWRDPEMGISGQLTWTRLPQGFKNSPTLFNEALHRDLADFRIQHPDLILLQYVDDLLLAATSELDCQQGTRALLQTLGDLGYRASAKKAQICQKQVKYLGYLLKEGQRWLTEARKETVMGQPTPKTPRQLREFLGTAGFCRLWIPGFAEMAAPLYPLTKPGTLFEWGPDQQKAYQEIKQALLTAPALGLPDLTKPFELFVDEKQGYAKGVLTQKLGPWRRPVAYLSKKLDPVAAGWPPCLRMVAAIAVLTKDAGKLTMGQPLVILAPHAVEALVKQPPDRWLSNARMTHYQALLLDTDRVQFGPIVALNPATLLPLPEEGLQHDCLDILAEAHGTRPDLTDQPLPDADHTWYTDGSSFLQEGQRKAGAAVTTETEVVWAKALPAGTSAQRAELIALTQALKMAEGKKLNVYTDSRYAFATAHIHGEIYRRRGWLTSEGKEIKNKDEILALLKALFLPKRLSIIHCPGHQKGNRAEARGNRMADQAAREVATRETPETSTLLAGKRTADGSEFEKRTADGSEFESPKKKAKVE

SEQ ID NO: 2475 - protein, 2093 aa, synthetic construct
MPAAKRVKLDGGDKKYSIGLDIGTNSVGWAVITDEYKVPSKKFKVLGNTDRHSIKKNLIGALLFDSGETAEATRLKRTARRRYTRRKNRICYLQEIFSNEMAKVDDSFFHRLEESFLVEEDKKHERHPIFGNIVDEVAYHEKYPTIYHLRKKLVDSTDKADLRLIYLALAHMIKFRGHFLIEGDLNPDNSDVDKLFIQLVQTYNQLFEENPINASGVDAKAILSARLSKSRRLENLIAQLPGEKKNGLFGNLIALSLGLTPNFKSNFDLAEDAKLQLSKDTYDDDLDNLLAQIGDQYADLFLAAKNLSDAILLSDILRVNTEITKAPLSASMIKRYDEHHQDLTLLKALVRQQLPEKYKEIFFDQSKNGYAGYIDGGASQEEFYKFIKPILEKMDGTEELLVKLNREDLLRKQRTFDNGSIPHQIHLGELHAILRRQEDFYPFLKDNREKIEKILTFRIPYYVGPLARGNSRFAWMTRKSEETITPWNFEEVVDKGASAQSFIERMTNFDKNLPNEKVLPKHSLLYEYFTVYNELTKVKYVTEGMRKPAFLSGEQKKAIVDLLFKTNRKVTVKQLKEDYFKKIECFDSVEISGVEDRFNASLGTYHDLLKIIKDKDFLDNEENEDILEDIVLTLTLFEDREMIEERLKTYAHLFDDKVMKQLKRRRYTGWGRLSRKLINGIRDKQSGKTILDFLKSDGFANRNFMQLIHDDSLTFKEDIQKAQVSGQGDSLHEHIANLAGSPAIKKGILQTVKVVDELVKVMGRHKPENIVIEMARENQTTQKGQKNSRERMKRIEEGIKELGSQILKEHPVENTQLQNEKLYLYYLQNGRDMYVDQELDINRLSDYDVDHIVPQSFLKDDSIDNKVLTRSDKARGKSDNVPSEEVVKKMKNYWRQLLNAKLITQRKFDNLTKAERGGLSELDKAGFIKRQLVETRQITKHVAQILDSRMNTKYDENDKLIREVKVITLKSKLVSDFRKDFQFYKVREINNYHHAHDAYLNAVVGTALIKKYPKLESEFVYGDYKVYDVRKMIAKSEQEIGKATAKYFFYSNIMNFFKTEITLANGEIRKRPLIETNGETGEIVWDKGRDFATVRKVLSMPQVNIVKKTEVQTGGFSKESILPKRNSDKLIARKKDWDPKKYGGFDSPTVAYSVLVVAKVEKGKSKKLKSVKELLGITIMERSSFEKNPIDFLEAKGYKEVKKDLIIKLPKYSLFELENGRKRMLASAGELQKGNELALPSKYVNFLYLASHYEKLKGSPEDNEQKQLFVEQHKHYLDEIIEQISEFSKRVILADANLDKVLSAYNKHRDKPIREQAENIIHLFTLTNLGAPAAFKYFDTTIDRKRYTSTKEVLDATLIHQSITGLYETRIDLSQLGGDGGGSSEAAAKGGTLNIEDEYRLHETSKGPDVPLGSTWLSDFPQAWAETGGMGLAVRQAPLIIPLKATSTPVSIKQYPMSQEARLGIKPHIQRLLDQGILVPCQSPWNTPLLPVKKPGTNDYRPVQDLREVNKRVEDIHPTVPNPYNLLSGLPPSHQWYTVLDLKDAFFCLRLHPTSQSLFAFEWRDPEMGISGQLTWTRLPQGFKNSPTLFNEALHRDLADFRIQHPDLILLQYVDDLLLAATSELDCQQGTRALLQTLGDLGYRASAKKAQICQKQVKYLGYLLKEGQRWLTEARKETVMGQPTPKTPRQLREFLGTAGFCRLWIPGFAEMAAPLYPLTKPGTLFEWGPDQQKAYQEIKQALLTAPALGLPDLTKPFELFVDEKQGYAKGVLTQKLGPWRRPVAYLSKKLDPVAAGWPPCLRMVAAIAVLTKDAGKLTMGQPLVILAPHAVEALVKQPPDRWLSNARMTHYQALLLDTDRVQFGPIVALNPATLLPLPEEGLQHDCLDILAEAHGTRPDLTDQPLPDADHTWYTDGSSFLQEGQRKAGAAVTTETEVVWAKALPAGTSAQRAELIALTQALKMAEGKKLNVYTDSRYAFATAHIHGEIYRRRGWLTSEGKEIKNKDEILALLKALFLPKRLSIIHCPGHQKGNRAEARGNRMADQAAREVATRETPETSTLLAGKRTADGSEFEKRTADGSEFESPKKKAKVE

SEQ ID NO: 2476 - protein, 2094 aa, synthetic construct
MPAAKRVKLDGGDKKYSIGLDIGTNSVGWAVITDEYKVPSKKFKVLGNTDRHSIKKNLIGALLFDSGETAEATRLKRTARRRYTRRKNRICYLQEIFSNEMAKVDDSFFHRLEESFLVEEDKKHERHPIFGNIVDEVAYHEKYPTIYHLRKKLVDSTDKADLRLIYLALAHMIKFRGHFLIEGDLNPDNSDVDKLFIQLVQTYNQLFEENPINASGVDAKAILSARLSKSRRLENLIAQLPGEKKNGLFGNLIALSLGLTPNFKSNFDLAEDAKLQLSKDTYDDDLDNLLAQIGDQYADLFLAAKNLSDAILLSDILRVNTEITKAPLSASMIKRYDEHHQDLTLLKALVRQQLPEKYKEIFFDQSKNGYAGYIDGGASQEEFYKFIKPILEKMDGTEELLVKLNREDLLRKQRTFDNGSIPHQIHLGELHAILRRQEDFYPFLKDNREKIEKILTFRIPYYVGPLARGNSRFAWMTRKSEETITPWNFEEVVDKGASAQSFIERMTNFDKNLPNEKVLPKHSLLYEYFTVYNELTKVKYVTEGMRKPAFLSGEQKKAIVDLLFKTNRKVTVKQLKEDYFKKIECFDSVEISGVEDRFNASLGTYHDLLKIIKDKDFLDNEENEDILEDIVLTLTLFEDREMIEERLKTYAHLFDDKVMKQLKRRRYTGWGRLSRKLINGIRDKQSGKTILDFLKSDGFANRNFMQLIHDDSLTFKEDIQKAQVSGQGDSLHEHIANLAGSPAIKKGILQTVKVVDELVKVMGRHKPENIVIEMARENQTTQKGQKNSRERMKRIEEGIKELGSQILKEHPVENTQLQNEKLYLYYLQNGRDMYVDQELDINRLSDYDVDHIVPQSFLKDDSIDNKVLTRSDKARGKSDNVPSEEVVKKMKNYWRQLLNAKLITQRKFDNLTKAERGGLSELDKAGFIKRQLVETRQITKHVAQILDSRMNTKYDENDKLIREVKVITLKSKLVSDFRKDFQFYKVREINNYHHAHDAYLNAVVGTALIKKYPKLESEFVYGDYKVYDVRKMIAKSEQEIGKATAKYFFYSNIMNFFKTEITLANGEIRKRPLIETNGETGEIVWDKGRDFATVRKVLSMPQVNIVKKTEVQTGGFSKESILPKRNSDKLIARKKDWDPKKYGGFDSPTVAYSVLVVAKVEKGKSKKLKSVKELLGITIMERSSFEKNPIDFLEAKGYKEVKKDLIIKLPKYSLFELENGRKRMLASAGELQKGNELALPSKYVNFLYLASHYEKLKGSPEDNEQKQLFVEQHKHYLDEIIEQISEFSKRVILADANLDKVLSAYNKHRDKPIREQAENIIHLFTLTNLGAPAAFKYFDTTIDRKRYTSTKEVLDATLIHQSITGLYETRIDLSQLGGDGGGGSPAPGGGGGTLNIEDEYRLHETSKGPDVPLGSTWLSDFPQAWAETGGMGLAVRQAPLIIPLKATSTPVSIKQYPMSQEARLGIKPHIQRLLDQGILVPCQSPWNTPLLPVKKPGTNDYRPVQDLREVNKRVEDIHPTVPNPYNLLSGLPPSHQWYTVLDLKDAFFCLRLHPTSQSLFAFEWRDPEMGISGQLTWTRLPQGFKNSPTLFNEALHRDLADFRIQHPDLILLQYVDDLLLAATSELDCQQGTRALLQTLGDLGYRASAKKAQICQKQVKYLGYLLKEGQRWLTEARKETVMGQPTPKTPRQLREFLGTAGFCRLWIPGFAEMAAPLYPLTKPGTLFEWGPDQQKAYQEIKQALLTAPALGLPDLTKPFELFVDEKQGYAKGVLTQKLGPWRRPVAYLSKKLDPVAAGWPPCLRMVAAIAVLTKDAGKLTMGQPLVILAPHAVEALVKQPPDRWLSNARMTHYQALLLDTDRVQFGPIVALNPATLLPLPEEGLQHDCLDILAEAHGTRPDLTDQPLPDADHTWYTDGSSFLQEGQRKAGAAVTTETEVVWAKALPAGTSAQRAELIALTQALKMAEGKKLNVYTDSRYAFATAHIHGEIYRRRGWLTSEGKEIKNKDEILALLKALFLPKRLSIIHCPGHQKGNRAEARGNRMADQAAREVATRETPETSTLLAGKRTADGSEFEKRTADGSEFESPKKKAKVE

SEQ ID NO: 2477 - protein, 2091 aa, synthetic construct
MPAAKRVKLDGGDKKYSIGLDIGTNSVGWAVITDEYKVPSKKFKVLGNTDRHSIKKNLIGALLFDSGETAEATRLKRTARRRYTRRKNRICYLQEIFSNEMAKVDDSFFHRLEESFLVEEDKKHERHPIFGNIVDEVAYHEKYPTIYHLRKKLVDSTDKADLRLIYLALAHMIKFRGHFLIEGDLNPDNSDVDKLFIQLVQTYNQLFEENPINASGVDAKAILSARLSKSRRLENLIAQLPGEKKNGLFGNLIALSLGLTPNFKSNFDLAEDAKLQLSKDTYDDDLDNLLAQIGDQYADLFLAAKNLSDAILLSDILRVNTEITKAPLSASMIKRYDEHHQDLTLLKALVRQQLPEKYKEIFFDQSKNGYAGYIDGGASQEEFYKFIKPILEKMDGTEELLVKLNREDLLRKQRTFDNGSIPHQIHLGELHAILRRQEDFYPFLKDNREKIEKILTFRIPYYVGPLARGNSRFAWMTRKSEETITPWNFEEVVDKGASAQSFIERMTNFDKNLPNEKVLPKHSLLYEYFTVYNELTKVKYVTEGMRKPAFLSGEQKKAIVDLLFKTNRKVTVKQLKEDYFKKIECFDSVEISGVEDRFNASLGTYHDLLKIIKDKDFLDNEENEDILEDIVLTLTLFEDREMIEERLKTYAHLFDDKVMKQLKRRRYTGWGRLSRKLINGIRDKQSGKTILDFLKSDGFANRNFMQLIHDDSLTFKEDIQKAQVSGQGDSLHEHIANLAGSPAIKKGILQTVKVVDELVKVMGRHKPENIVIEMARENQTTQKGQKNSRERMKRIEEGIKELGSQILKEHPVENTQLQNEKLYLYYLQNGRDMYVDQELDINRLSDYDVDHIVPQSFLKDDSIDNKVLTRSDKARGKSDNVPSEEVVKKMKNYWRQLLNAKLITQRKFDNLTKAERGGLSELDKAGFIKRQLVETRQITKHVAQILDSRMNTKYDENDKLIREVKVITLKSKLVSDFRKDFQFYKVREINNYHHAHDAYLNAVVGTALIKKYPKLESEFVYGDYKVYDVRKMIAKSEQEIGKATAKYFFYSNIMNFFKTEITLANGEIRKRPLIETNGETGEIVWDKGRDFATVRKVLSMPQVNIVKKTEVQTGGFSKESILPKRNSDKLIARKKDWDPKKYGGFDSPTVAYSVLVVAKVEKGKSKKLKSVKELLGITIMERSSFEKNPIDFLEAKGYKEVKKDLIIKLPKYSLFELENGRKRMLASAGELQKGNELALPSKYVNFLYLASHYEKLKGSPEDNEQKQLFVEQHKHYLDEIIEQISEFSKRVILADANLDKVLSAYNKHRDKPIREQAENIIHLFTLTNLGAPAAFKYFDTTIDRKRYTSTKEVLDATLIHQSITGLYETRIDLSQLGGDGGGSSPAPGGTLNIEDEYRLHETSKGPDVPLGSTWLSDFPQAWAETGGMGLAVRQAPLIIPLKATSTPVSIKQYPMSQEARLGIKPHIQRLLDQGILVPCQSPWNTPLLPVKKPGTNDYRPVQDLREVNKRVEDIHPTVPNPYNLLSGLPPSHQWYTVLDLKDAFFCLRLHPTSQSLFAFEWRDPEMGISGQLTWTRLPQGFKNSPTLFNEALHRDLADFRIQHPDLILLQYVDDLLLAATSELDCQQGTRALLQTLGDLGYRASAKKAQICQKQVKYLGYLLKEGQRWLTEARKETVMGQPTPKTPRQLREFLGTAGFCRLWIPGFAEMAAPLYPLTKPGTLFEWGPDQQKAYQEIKQALLTAPALGLPDLTKPFELFVDEKQGYAKGVLTQKLGPWRRPVAYLSKKLDPVAAGWPPCLRMVAAIAVLTKDAGKLTMGQPLVILAPHAVEALVKQPPDRWLSNARMTHYQALLLDTDRVQFGPIVALNPATLLPLPEEGLQHDCLDILAEAHGTRPDLTDQPLPDADHTWYTDGSSFLQEGQRKAGAAVTTETEVVWAKALPAGTSAQRAELIALTQALKMAEGKKLNVYTDSRYAFATAHIHGEIYRRRGWLTSEGKEIKNKDEILALLKALFLPKRLSIIHCPGHQKGNRAEARGNRMADQAAREVATRETPETSTLLAGKRTADGSEFEKRTADGSEFESPKKKAKVE

SEQ ID NO: 2478 - protein, 2091 aa, synthetic construct
MPAAKRVKLDGGDKKYSIGLDIGTNSVGWAVITDEYKVPSKKFKVLGNTDRHSIKKNLIGALLFDSGETAEATRLKRTARRRYTRRKNRICYLQEIFSNEMAKVDDSFFHRLEESFLVEEDKKHERHPIFGNIVDEVAYHEKYPTIYHLRKKLVDSTDKADLRLIYLALAHMIKFRGHFLIEGDLNPDNSDVDKLFIQLVQTYNQLFEENPINASGVDAKAILSARLSKSRRLENLIAQLPGEKKNGLFGNLIALSLGLTPNFKSNFDLAEDAKLQLSKDTYDDDLDNLLAQIGDQYADLFLAAKNLSDAILLSDILRVNTEITKAPLSASMIKRYDEHHQDLTLLKALVRQQLPEKYKEIFFDQSKNGYAGYIDGGASQEEFYKFIKPILEKMDGTEELLVKLNREDLLRKQRTFDNGSIPHQIHLGELHAILRRQEDFYPFLKDNREKIEKILTFRIPYYVGPLARGNSRFAWMTRKSEETITPWNFEEVVDKGASAQSFIERMTNFDKNLPNEKVLPKHSLLYEYFTVYNELTKVKYVTEGMRKPAFLSGEQKKAIVDLLFKTNRKVTVKQLKEDYFKKIECFDSVEISGVEDRFNASLGTYHDLLKIIKDKDFLDNEENEDILEDIVLTLTLFEDREMIEERLKTYAHLFDDKVMKQLKRRRYTGWGRLSRKLINGIRDKQSGKTILDFLKSDGFANRNFMQLIHDDSLTFKEDIQKAQVSGQGDSLHEHIANLAGSPAIKKGILQTVKVVDELVKVMGRHKPENIVIEMARENQTTQKGQKNSRERMKRIEEGIKELGSQILKEHPVENTQLQNEKLYLYYLQNGRDMYVDQELDINRLSDYDVDHIVPQSFLKDDSIDNKVLTRSDKARGKSDNVPSEEVVKKMKNYWRQLLNAKLITQRKFDNLTKAERGGLSELDKAGFIKRQLVETRQITKHVAQILDSRMNTKYDENDKLIREVKVITLKSKLVSDFRKDFQFYKVREINNYHHAHDAYLNAVVGTALIKKYPKLESEFVYGDYKVYDVRKMIAKSEQEIGKATAKYFFYSNIMNFFKTEITLANGEIRKRPLIETNGETGEIVWDKGRDFATVRKVLSMPQVNIVKKTEVQTGGFSKESILPKRNSDKLIARKKDWDPKKYGGFDSPTVAYSVLVVAKVEKGKSKKLKSVKELLGITIMERSSFEKNPIDFLEAKGYKEVKKDLIIKLPKYSLFELENGRKRMLASAGELQKGNELALPSKYVNFLYLASHYEKLKGSPEDNEQKQLFVEQHKHYLDEIIEQISEFSKRVILADANLDKVLSAYNKHRDKPIREQAENIIHLFTLTNLGAPAAFKYFDTTIDRKRYTSTKEVLDATLIHQSITGLYETRIDLSQLGGDGGGGSGGGGGTLNIEDEYRLHETSKGPDVPLGSTWLSDFPQAWAETGGMGLAVRQAPLIIPLKATSTPVSIKQYPMSQEARLGIKPHIQRLLDQGILVPCQSPWNTPLLPVKKPGTNDYRPVQDLREVNKRVEDIHPTVPNPYNLLSGLPPSHQWYTVLDLKDAFFCLRLHPTSQSLFAFEWRDPEMGISGQLTWTRLPQGFKNSPTLFNEALHRDLADFRIQHPDLILLQYVDDLLLAATSELDCQQGTRALLQTLGDLGYRASAKKAQICQKQVKYLGYLLKEGQRWLTEARKETVMGQPTPKTPRQLREFLGTAGFCRLWIPGFAEMAAPLYPLTKPGTLFEWGPDQQKAYQEIKQALLTAPALGLPDLTKPFELFVDEKQGYAKGVLTQKLGPWRRPVAYLSKKLDPVAAGWPPCLRMVAAIAVLTKDAGKLTMGQPLVILAPHAVEALVKQPPDRWLSNARMTHYQALLLDTDRVQFGPIVALNPATLLPLPEEGLQHDCLDILAEAHGTRPDLTDQPLPDADHTWYTDGSSFLQEGQRKAGAAVTTETEVVWAKALPAGTSAQRAELIALTQALKMAEGKKLNVYTDSRYAFATAHIHGEIYRRRGWLTSEGKEIKNKDEILALLKALFLPKRLSIIHCPGHQKGNRAEARGNRMADQAAREVATRETPETSTLLAGKRTADGSEFEKRTADGSEFESPKKKAKVE

SEQ ID NO: 2479 - protein, 2094 aa, synthetic construct
MPAAKRVKLDGGDKKYSIGLDIGTNSVGWAVITDEYKVPSKKFKVLGNTDRHSIKKNLIGALLFDSGETAEATRLKRTARRRYTRRKNRICYLQEIFSNEMAKVDDSFFHRLEESFLVEEDKKHERHPIFGNIVDEVAYHEKYPTIYHLRKKLVDSTDKADLRLIYLALAHMIKFRGHFLIEGDLNPDNSDVDKLFIQLVQTYNQLFEENPINASGVDAKAILSARLSKSRRLENLIAQLPGEKKNGLFGNLIALSLGLTPNFKSNFDLAEDAKLQLSKDTYDDDLDNLLAQIGDQYADLFLAAKNLSDAILLSDILRVNTEITKAPLSASMIKRYDEHHQDLTLLKALVRQQLPEKYKEIFFDQSKNGYAGYIDGGASQEEFYKFIKPILEKMDGTEELLVKLNREDLLRKQRTFDNGSIPHQIHLGELHAILRRQEDFYPFLKDNREKIEKILTFRIPYYVGPLARGNSRFAWMTRKSEETITPWNFEEVVDKGASAQSFIERMTNFDKNLPNEKVLPKHSLLYEYFTVYNELTKVKYVTEGMRKPAFLSGEQKKAIVDLLFKTNRKVTVKQLKEDYFKKIECFDSVEISGVEDRFNASLGTYHDLLKIIKDKDFLDNEENEDILEDIVLTLTLFEDREMIEERLKTYAHLFDDKVMKQLKRRRYTGWGRLSRKLINGIRDKQSGKTILDFLKSDGFANRNFMQLIHDDSLTFKEDIQKAQVSGQGDSLHEHIANLAGSPAIKKGILQTVKVVDELVKVMGRHKPENIVIEMARENQTTQKGQKNSRERMKRIEEGIKELGSQILKEHPVENTQLQNEKLYLYYLQNGRDMYVDQELDINRLSDYDVDHIVPQSFLKDDSIDNKVLTRSDKARGKSDNVPSEEVVKKMKNYWRQLLNAKLITQRKFDNLTKAERGGLSELDKAGFIKRQLVETRQITKHVAQILDSRMNTKYDENDKLIREVKVITLKSKLVSDFRKDFQFYKVREINNYHHAHDAYLNAVVGTALIKKYPKLESEFVYGDYKVYDVRKMIAKSEQEIGKATAKYFFYSNIMNFFKTEITLANGEIRKRPLIETNGETGEIVWDKGRDFATVRKVLSMPQVNIVKKTEVQTGGFSKESILPKRNSDKLIARKKDWDPKKYGGFDSPTVAYSVLVVAKVEKGKSKKLKSVKELLGITIMERSSFEKNPIDFLEAKGYKEVKKDLIIKLPKYSLFELENGRKRMLASAGELQKGNELALPSKYVNFLYLASHYEKLKGSPEDNEQKQLFVEQHKHYLDEIIEQISEFSKRVILADANLDKVLSAYNKHRDKPIREQAENIIHLFTLTNLGAPAAFKYFDTTIDRKRYTSTKEVLDATLIHQSITGLYETRIDLSQLGGDGGGGSGGGGSSGGTLNIEDEYRLHETSKGPDVPLGSTWLSDFPQAWAETGGMGLAVRQAPLIIPLKATSTPVSIKQYPMSQEARLGIKPHIQRLLDQGILVPCQSPWNTPLLPVKKPGTNDYRPVQDLREVNKRVEDIHPTVPNPYNLLSGLPPSHQWYTVLDLKDAFFCLRLHPTSQSLFAFEWRDPEMGISGQLTWTRLPQGFKNSPTLFNEALHRDLADFRIQHPDLILLQYVDDLLLAATSELDCQQGTRALLQTLGDLGYRASAKKAQICQKQVKYLGYLLKEGQRWLTEARKETVMGQPTPKTPRQLREFLGTAGFCRLWIPGFAEMAAPLYPLTKPGTLFEWGPDQQKAYQEIKQALLTAPALGLPDLTKPFELFVDEKQGYAKGVLTQKLGPWRRPVAYLSKKLDPVAAGWPPCLRMVAAIAVLTKDAGKLTMGQPLVILAPHAVEALVKQPPDRWLSNARMTHYQALLLDTDRVQFGPIVALNPATLLPLPEEGLQHDCLDILAEAHGTRPDLTDQPLPDADHTWYTDGSSFLQEGQRKAGAAVTTETEVVWAKALPAGTSAQRAELIALTQALKMAEGKKLNVYTDSRYAFATAHIHGEIYRRRGWLTSEGKEIKNKDEILALLKALFLPKRLSIIHCPGHQKGNRAEARGNRMADQAAREVATRETPETSTLLAGKRTADGSEFEKRTADGSEFESPKKKAKVE

SEQ ID NO: 2480 - protein, 2096 aa, synthetic construct
MPAAKRVKLDGGDKKYSIGLDIGTNSVGWAVITDEYKVPSKKFKVLGNTDRHSIKKNLIGALLFDSGETAEATRLKRTARRRYTRRKNRICYLQEIFSNEMAKVDDSFFHRLEESFLVEEDKKHERHPIFGNIVDEVAYHEKYPTIYHLRKKLVDSTDKADLRLIYLALAHMIKFRGHFLIEGDLNPDNSDVDKLFIQLVQTYNQLFEENPINASGVDAKAILSARLSKSRRLENLIAQLPGEKKNGLFGNLIALSLGLTPNFKSNFDLAEDAKLQLSKDTYDDDLDNLLAQIGDQYADLFLAAKNLSDAILLSDILRVNTEITKAPLSASMIKRYDEHHQDLTLLKALVRQQLPEKYKEIFFDQSKNGYAGYIDGGASQEEFYKFIKPILEKMDGTEELLVKLNREDLLRKQRTFDNGSIPHQIHLGELHAILRRQEDFYPFLKDNREKIEKILTFRIPYYVGPLARGNSRFAWMTRKSEETITPWNFEEVVDKGASAQSFIERMTNFDKNLPNEKVLPKHSLLYEYFTVYNELTKVKYVTEGMRKPAFLSGEQKKAIVDLLFKTNRKVTVKQLKEDYFKKIECFDSVEISGVEDRFNASLGTYHDLLKIIKDKDFLDNEENEDILEDIVLTLTLFEDREMIEERLKTYAHLFDDKVMKQLKRRRYTGWGRLSRKLINGIRDKQSGKTILDFLKSDGFANRNFMQLIHDDSLTFKEDIQKAQVSGQGDSLHEHIANLAGSPAIKKGILQTVKVVDELVKVMGRHKPENIVIEMARENQTTQKGQKNSRERMKRIEEGIKELGSQILKEHPVENTQLQNEKLYLYYLQNGRDMYVDQELDINRLSDYDVDHIVPQSFLKDDSIDNKVLTRSDKARGKSDNVPSEEVVKKMKNYWRQLLNAKLITQRKFDNLTKAERGGLSELDKAGFIKRQLVETRQITKHVAQILDSRMNTKYDENDKLIREVKVITLKSKLVSDFRKDFQFYKVREINNYHHAHDAYLNAVVGTALIKKYPKLESEFVYGDYKVYDVRKMIAKSEQEIGKATAKYFFYSNIMNFFKTEITLANGEIRKRPLIETNGETGEIVWDKGRDFATVRKVLSMPQVNIVKKTEVQTGGFSKESILPKRNSDKLIARKKDWDPKKYGGFDSPTVAYSVLVVAKVEKGKSKKLKSVKELLGITIMERSSFEKNPIDFLEAKGYKEVKKDLIIKLPKYSLFELENGRKRMLASAGELQKGNELALPSKYVNFLYLASHYEKLKGSPEDNEQKQLFVEQHKHYLDEIIEQISEFSKRVILADANLDKVLSAYNKHRDKPIREQAENIIHLFTLTNLGAPAAFKYFDTTIDRKRYTSTKEVLDATLIHQSITGLYETRIDLSQLGGDGGGSSPAPEAAAKGGTLNIEDEYRLHETSKGPDVPLGSTWLSDFPQAWAETGGMGLAVRQAPLIIPLKATSTPVSIKQYPMSQEARLGIKPHIQRLLDQGILVPCQSPWNTPLLPVKKPGTNDYRPVQDLREVNKRVEDIHPTVPNPYNLLSGLPPSHQWYTVLDLKDAFFCLRLHPTSQSLFAFEWRDPEMGISGQLTWTRLPQGFKNSPTLFNEALHRDLADFRIQHPDLILLQYVDDLLLAATSELDCQQGTRALLQTLGDLGYRASAKKAQICQKQVKYLGYLLKEGQRWLTEARKETVMGQPTPKTPRQLREFLGTAGFCRLWIPGFAEMAAPLYPLTKPGTLFEWGPDQQKAYQEIKQALLTAPALGLPDLTKPFELFVDEKQGYAKGVLTQKLGPWRRPVAYLSKKLDPVAAGWPPCLRMVAAIAVLTKDAGKLTMGQPLVILAPHAVEALVKQPPDRWLSNARMTHYQALLLDTDRVQFGPIVALNPATLLPLPEEGLQHDCLDILAEAHGTRPDLTDQPLPDADHTWYTDGSSFLQEGQRKAGAAVTTETEVVWAKALPAGTSAQRAELIALTQALKMAEGKKLNVYTDSRYAFATAHIHGEIYRRRGWLTSEGKEIKNKDEILALLKALFLPKRLSIIHCPGHQKGNRAEARGNRMADQAAREVATRETPETSTLLAGKRTADGSEFEKRTADGSEFESPKKKAKVE

SEQ ID NO: 2481 - protein, 2091 aa, synthetic construct
MPAAKRVKLDGGDKKYSIGLDIGTNSVGWAVITDEYKVPSKKFKVLGNTDRHSIKKNLIGALLFDSGETAEATRLKRTARRRYTRRKNRICYLQEIFSNEMAKVDDSFFHRLEESFLVEEDKKHERHPIFGNIVDEVAYHEKYPTIYHLRKKLVDSTDKADLRLIYLALAHMIKFRGHFLIEGDLNPDNSDVDKLFIQLVQTYNQLFEENPINASGVDAKAILSARLSKSRRLENLIAQLPGEKKNGLFGNLIALSLGLTPNFKSNFDLAEDAKLQLSKDTYDDDLDNLLAQIGDQYADLFLAAKNLSDAILLSDILRVNTEITKAPLSASMIKRYDEHHQDLTLLKALVRQQLPEKYKEIFFDQSKNGYAGYIDGGASQEEFYKFIKPILEKMDGTEELLVKLNREDLLRKQRTFDNGSIPHQIHLGELHAILRRQEDFYPFLKDNREKIEKILTFRIPYYVGPLARGNSRFAWMTRKSEETITPWNFEEVVDKGASAQSFIERMTNFDKNLPNEKVLPKHSLLYEYFTVYNELTKVKYVTEGMRKPAFLSGEQKKAIVDLLFKTNRKVTVKQLKEDYFKKIECFDSVEISGVEDRFNASLGTYHDLLKIIKDKDFLDNEENEDILEDIVLTLTLFEDREMIEERLKTYAHLFDDKVMKQLKRRRYTGWGRLSRKLINGIRDKQSGKTILDFLKSDGFANRNFMQLIHDDSLTFKEDIQKAQVSGQGDSLHEHIANLAGSPAIKKGILQTVKVVDELVKVMGRHKPENIVIEMARENQTTQKGQKNSRERMKRIEEGIKELGSQILKEHPVENTQLQNEKLYLYYLQNGRDMYVDQELDINRLSDYDVDHIVPQSFLKDDSIDNKVLTRSDKARGKSDNVPSEEVVKKMKNYWRQLLNAKLITQRKFDNLTKAERGGLSELDKAGFIKRQLVETRQITKHVAQILDSRMNTKYDENDKLIREVKVITLKSKLVSDFRKDFQFYKVREINNYHHAHDAYLNAVVGTALIKKYPKLESEFVYGDYKVYDVRKMIAKSEQEIGKATAKYFFYSNIMNFFKTEITLANGEIRKRPLIETNGETGEIVWDKGRDFATVRKVLSMPQVNIVKKTEVQTGGFSKESILPKRNSDKLIARKKDWDPKKYGGFDSPTVAYSVLVVAKVEKGKSKKLKSVKELLGITIMERSSFEKNPIDFLEAKGYKEVKKDLIIKLPKYSLFELENGRKRMLASAGELQKGNELALPSKYVNFLYLASHYEKLKGSPEDNEQKQLFVEQHKHYLDEIIEQISEFSKRVILADANLDKVLSAYNKHRDKPIREQAENIIHLFTLTNLGAPAAFKYFDTTIDRKRYTSTKEVLDATLIHQSITGLYETRIDLSQLGGDGGGGSPAPGGTLNIEDEYRLHETSKGPDVPLGSTWLSDFPQAWAETGGMGLAVRQAPLIIPLKATSTPVSIKQYPMSQEARLGIKPHIQRLLDQGILVPCQSPWNTPLLPVKKPGTNDYRPVQDLREVNKRVEDIHPTVPNPYNLLSGLPPSHQWYTVLDLKDAFFCLRLHPTSQSLFAFEWRDPEMGISGQLTWTRLPQGFKNSPTLFNEALHRDLADFRIQHPDLILLQYVDDLLLAATSELDCQQGTRALLQTLGDLGYRASAKKAQICQKQVKYLGYLLKEGQRWLTEARKETVMGQPTPKTPRQLREFLGTAGFCRLWIPGFAEMAAPLYPLTKPGTLFEWGPDQQKAYQEIKQALLTAPALGLPDLTKPFELFVDEKQGYAKGVLTQKLGPWRRPVAYLSKKLDPVAAGWPPCLRMVAAIAVLTKDAGKLTMGQPLVILAPHAVEALVKQPPDRWLSNARMTHYQALLLDTDRVQFGPIVALNPATLLPLPEEGLQHDCLDILAEAHGTRPDLTDQPLPDADHTWYTDGSSFLQEGQRKAGAAVTTETEVVWAKALPAGTSAQRAELIALTQALKMAEGKKLNVYTDSRYAFATAHIHGEIYRRRGWLTSEGKEIKNKDEILALLKALFLPKRLSIIHCPGHQKGNRAEARGNRMADQAAREVATRETPETSTLLAGKRTADGSEFEKRTADGSEFESPKKKAKVE

SEQ ID NO: 2482 - protein, 2090 aa, synthetic construct
MPAAKRVKLDGGDKKYSIGLDIGTNSVGWAVITDEYKVPSKKFKVLGNTDRHSIKKNLIGALLFDSGETAEATRLKRTARRRYTRRKNRICYLQEIFSNEMAKVDDSFFHRLEESFLVEEDKKHERHPIFGNIVDEVAYHEKYPTIYHLRKKLVDSTDKADLRLIYLALAHMIKFRGHFLIEGDLNPDNSDVDKLFIQLVQTYNQLFEENPINASGVDAKAILSARLSKSRRLENLIAQLPGEKKNGLFGNLIALSLGLTPNFKSNFDLAEDAKLQLSKDTYDDDLDNLLAQIGDQYADLFLAAKNLSDAILLSDILRVNTEITKAPLSASMIKRYDEHHQDLTLLKALVRQQLPEKYKEIFFDQSKNGYAGYIDGGASQEEFYKFIKPILEKMDGTEELLVKLNREDLLRKQRTFDNGSIPHQIHLGELHAILRRQEDFYPFLKDNREKIEKILTFRIPYYVGPLARGNSRFAWMTRKSEETITPWNFEEVVDKGASAQSFIERMTNFDKNLPNEKVLPKHSLLYEYFTVYNELTKVKYVTEGMRKPAFLSGEQKKAIVDLLFKTNRKVTVKQLKEDYFKKIECFDSVEISGVEDRFNASLGTYHDLLKIIKDKDFLDNEENEDILEDIVLTLTLFEDREMIEERLKTYAHLFDDKVMKQLKRRRYTGWGRLSRKLINGIRDKQSGKTILDFLKSDGFANRNFMQLIHDDSLTFKEDIQKAQVSGQGDSLHEHIANLAGSPAIKKGILQTVKVVDELVKVMGRHKPENIVIEMARENQTTQKGQKNSRERMKRIEEGIKELGSQILKEHPVENTQLQNEKLYLYYLQNGRDMYVDQELDINRLSDYDVDHIVPQSFLKDDSIDNKVLTRSDKARGKSDNVPSEEVVKKMKNYWRQLLNAKLITQRKFDNLTKAERGGLSELDKAGFIKRQLVETRQITKHVAQILDSRMNTKYDENDKLIREVKVITLKSKLVSDFRKDFQFYKVREINNYHHAHDAYLNAVVGTALIKKYPKLESEFVYGDYKVYDVRKMIAKSEQEIGKATAKYFFYSNIMNFFKTEITLANGEIRKRPLIETNGETGEIVWDKGRDFATVRKVLSMPQVNIVKKTEVQTGGFSKESILPKRNSDKLIARKKDWDPKKYGGFDSPTVAYSVLVVAKVEKGKSKKLKSVKELLGITIMERSSFEKNPIDFLEAKGYKEVKKDLIIKLPKYSLFELENGRKRMLASAGELQKGNELALPSKYVNFLYLASHYEKLKGSPEDNEQKQLFVEQHKHYLDEIIEQISEFSKRVILADANLDKVLSAYNKHRDKPIREQAENIIHLFTLTNLGAPAAFKYFDTTIDRKRYTSTKEVLDATLIHQSITGLYETRIDLSQLGGDGGGGGGSGGTLNIEDEYRLHETSKGPDVPLGSTWLSDFPQAWAETGGMGLAVRQAPLIIPLKATSTPVSIKQYPMSQEARLGIKPHIQRLLDQGILVPCQSPWNTPLLPVKKPGTNDYRPVQDLREVNKRVEDIHPTVPNPYNLLSGLPPSHQWYTVLDLKDAFFCLRLHPTSQSLFAFEWRDPEMGISGQLTWTRLPQGFKNSPTLFNEALHRDLADFRIQHPDLILLQYVDDLLLAATSELDCQQGTRALLQTLGDLGYRASAKKAQICQKQVKYLGYLLKEGQRWLTEARKETVMGQPTPKTPRQLREFLGTAGFCRLWIPGFAEMAAPLYPLTKPGTLFEWGPDQQKAYQEIKQALLTAPALGLPDLTKPFELFVDEKQGYAKGVLTQKLGPWRRPVAYLSKKLDPVAAGWPPCLRMVAAIAVLTKDAGKLTMGQPLVILAPHAVEALVKQPPDRWLSNARMTHYQALLLDTDRVQFGPIVALNPATLLPLPEEGLQHDCLDILAEAHGTRPDLTDQPLPDADHTWYTDGSSFLQEGQRKAGAAVTTETEVVWAKALPAGTSAQRAELIALTQALKMAEGKKLNVYTDSRYAFATAHIHGEIYRRRGWLTSEGKEIKNKDEILALLKALFLPKRLSIIHCPGHQKGNRAEARGNRMADQAAREVATRETPETSTLLAGKRTADGSEFEKRTADGSEFESPKKKAKVE

SEQ ID NO: 2483 - protein, 2096 aa, synthetic construct
MPAAKRVKLDGGDKKYSIGLDIGTNSVGWAVITDEYKVPSKKFKVLGNTDRHSIKKNLIGALLFDSGETAEATRLKRTARRRYTRRKNRICYLQEIFSNEMAKVDDSFFHRLEESFLVEEDKKHERHPIFGNIVDEVAYHEKYPTIYHLRKKLVDSTDKADLRLIYLALAHMIKFRGHFLIEGDLNPDNSDVDKLFIQLVQTYNQLFEENPINASGVDAKAILSARLSKSRRLENLIAQLPGEKKNGLFGNLIALSLGLTPNFKSNFDLAEDAKLQLSKDTYDDDLDNLLAQIGDQYADLFLAAKNLSDAILLSDILRVNTEITKAPLSASMIKRYDEHHQDLTLLKALVRQQLPEKYKEIFFDQSKNGYAGYIDGGASQEEFYKFIKPILEKMDGTEELLVKLNREDLLRKQRTFDNGSIPHQIHLGELHAILRRQEDFYPFLKDNREKIEKILTFRIPYYVGPLARGNSRFAWMTRKSEETITPWNFEEVVDKGASAQSFIERMTNFDKNLPNEKVLPKHSLLYEYFTVYNELTKVKYVTEGMRKPAFLSGEQKKAIVDLLFKTNRKVTVKQLKEDYFKKIECFDSVEISGVEDRFNASLGTYHDLLKIIKDKDFLDNEENEDILEDIVLTLTLFEDREMIEERLKTYAHLFDDKVMKQLKRRRYTGWGRLSRKLINGIRDKQSGKTILDFLKSDGFANRNFMQLIHDDSLTFKEDIQKAQVSGQGDSLHEHIANLAGSPAIKKGILQTVKVVDELVKVMGRHKPENIVIEMARENQTTQKGQKNSRERMKRIEEGIKELGSQILKEHPVENTQLQNEKLYLYYLQNGRDMYVDQELDINRLSDYDVDHIVPQSFLKDDSIDNKVLTRSDKARGKSDNVPSEEVVKKMKNYWRQLLNAKLITQRKFDNLTKAERGGLSELDKAGFIKRQLVETRQITKHVAQILDSRMNTKYDENDKLIREVKVITLKSKLVSDFRKDFQFYKVREINNYHHAHDAYLNAVVGTALIKKYPKLESEFVYGDYKVYDVRKMIAKSEQEIGKATAKYFFYSNIMNFFKTEITLANGEIRKRPLIETNGETGEIVWDKGRDFATVRKVLSMPQVNIVKKTEVQTGGFSKESILPKRNSDKLIARKKDWDPKKYGGFDSPTVAYSVLVVAKVEKGKSKKLKSVKELLGITIMERSSFEKNPIDFLEAKGYKEVKKDLIIKLPKYSLFELENGRKRMLASAGELQKGNELALPSKYVNFLYLASHYEKLKGSPEDNEQKQLFVEQHKHYLDEIIEQISEFSKRVILADANLDKVLSAYNKHRDKPIREQAENIIHLFTLTNLGAPAAFKYFDTTIDRKRYTSTKEVLDATLIHQSITGLYETRIDLSQLGGDGGEAAAKGGGGGSGGTLNIEDEYRLHETSKGPDVPLGSTWLSDFPQAWAETGGMGLAVRQAPLIIPLKATSTPVSIKQYPMSQEARLGIKPHIQRLLDQGILVPCQSPWNTPLLPVKKPGTNDYRPVQDLREVNKRVEDIHPTVPNPYNLLSGLPPSHQWYTVLDLKDAFFCLRLHPTSQSLFAFEWRDPEMGISGQLTWTRLPQGFKNSPTLFNEALHRDLADFRIQHPDLILLQYVDDLLLAATSELDCQQGTRALLQTLGDLGYRASAKKAQICQKQVKYLGYLLKEGQRWLTEARKETVMGQPTPKTPRQLREFLGTAGFCRLWIPGFAEMAAPLYPLTKPGTLFEWGPDQQKAYQEIKQALLTAPALGLPDLTKPFELFVDEKQGYAKGVLTQKLGPWRRPVAYLSKKLDPVAAGWPPCLRMVAAIAVLTKDAGKLTMGQPLVILAPHAVEALVKQPPDRWLSNARMTHYQALLLDTDRVQFGPIVALNPATLLPLPEEGLQHDCLDILAEAHGTRPDLTDQPLPDADHTWYTDGSSFLQEGQRKAGAAVTTETEVVWAKALPAGTSAQRAELIALTQALKMAEGKKLNVYTDSRYAFATAHIHGEIYRRRGWLTSEGKEIKNKDEILALLKALFLPKRLSIIHCPGHQKGNRAEARGNRMADQAAREVATRETPETSTLLAGKRTADGSEFEKRTADGSEFESPKKKAKVE

SEQ ID NO: 2484 - protein, 2095 aa, synthetic construct
MPAAKRVKLDGGDKKYSIGLDIGTNSVGWAVITDEYKVPSKKFKVLGNTDRHSIKKNLIGALLFDSGETAEATRLKRTARRRYTRRKNRICYLQEIFSNEMAKVDDSFFHRLEESFLVEEDKKHERHPIFGNIVDEVAYHEKYPTIYHLRKKLVDSTDKADLRLIYLALAHMIKFRGHFLIEGDLNPDNSDVDKLFIQLVQTYNQLFEENPINASGVDAKAILSARLSKSRRLENLIAQLPGEKKNGLFGNLIALSLGLTPNFKSNFDLAEDAKLQLSKDTYDDDLDNLLAQIGDQYADLFLAAKNLSDAILLSDILRVNTEITKAPLSASMIKRYDEHHQDLTLLKALVRQQLPEKYKEIFFDQSKNGYAGYIDGGASQEEFYKFIKPILEKMDGTEELLVKLNREDLLRKQRTFDNGSIPHQIHLGELHAILRRQEDFYPFLKDNREKIEKILTFRIPYYVGPLARGNSRFAWMTRKSEETITPWNFEEVVDKGASAQSFIERMTNFDKNLPNEKVLPKHSLLYEYFTVYNELTKVKYVTEGMRKPAFLSGEQKKAIVDLLFKTNRKVTVKQLKEDYFKKIECFDSVEISGVEDRFNASLGTYHDLLKIIKDKDFLDNEENEDILEDIVLTLTLFEDREMIEERLKTYAHLFDDKVMKQLKRRRYTGWGRLSRKLINGIRDKQSGKTILDFLKSDGFANRNFMQLIHDDSLTFKEDIQKAQVSGQGDSLHEHIANLAGSPAIKKGILQTVKVVDELVKVMGRHKPENIVIEMARENQTTQKGQKNSRERMKRIEEGIKELGSQILKEHPVENTQLQNEKLYLYYLQNGRDMYVDQELDINRLSDYDVDHIVPQSFLKDDSIDNKVLTRSDKARGKSDNVPSEEVVKKMKNYWRQLLNAKLITQRKFDNLTKAERGGLSELDKAGFIKRQLVETRQITKHVAQILDSRMNTKYDENDKLIREVKVITLKSKLVSDFRKDFQFYKVREINNYHHAHDAYLNAVVGTALIKKYPKLESEFVYGDYKVYDVRKMIAKSEQEIGKATAKYFFYSNIMNFFKTEITLANGEIRKRPLIETNGETGEIVWDKGRDFATVRKVLSMPQVNIVKKTEVQTGGFSKESILPKRNSDKLIARKKDWDPKKYGGFDSPTVAYSVLVVAKVEKGKSKKLKSVKELLGITIMERSSFEKNPIDFLEAKGYKEVKKDLIIKLPKYSLFELENGRKRMLASAGELQKGNELALPSKYVNFLYLASHYEKLKGSPEDNEQKQLFVEQHKHYLDEIIEQISEFSKRVILADANLDKVLSAYNKHRDKPIREQAENIIHLFTLTNLGAPAAFKYFDTTIDRKRYTSTKEVLDATLIHQSITGLYETRIDLSQLGGDGGEAAAKEAAAKGGTLNIEDEYRLHETSKGPDVPLGSTWLSDFPQAWAETGGMGLAVRQAPLIIPLKATSTPVSIKQYPMSQEARLGIKPHIQRLLDQGILVPCQSPWNTPLLPVKKPGTNDYRPVQDLREVNKRVEDIHPTVPNPYNLLSGLPPSHQWYTVLDLKDAFFCLRLHPTSQSLFAFEWRDPEMGISGQLTWTRLPQGFKNSPTLFNEALHRDLADFRIQHPDLILLQYVDDLLLAATSELDCQQGTRALLQTLGDLGYRASAKKAQICQKQVKYLGYLLKEGQRWLTEARKETVMGQPTPKTPRQLREFLGTAGFCRLWIPGFAEMAAPLYPLTKPGTLFEWGPDQQKAYQEIKQALLTAPALGLPDLTKPFELFVDEKQGYAKGVLTQKLGPWRRPVAYLSKKLDPVAAGWPPCLRMVAAIAVLTKDAGKLTMGQPLVILAPHAVEALVKQPPDRWLSNARMTHYQALLLDTDRVQFGPIVALNPATLLPLPEEGLQHDCLDILAEAHGTRPDLTDQPLPDADHTWYTDGSSFLQEGQRKAGAAVTTETEVVWAKALPAGTSAQRAELIALTQALKMAEGKKLNVYTDSRYAFATAHIHGEIYRRRGWLTSEGKEIKNKDEILALLKALFLPKRLSIIHCPGHQKGNRAEARGNRMADQAAREVATRETPETSTLLAGKRTADGSEFEKRTADGSEFESPKKKAKVE

SEQ ID NO: 2485 - protein, 2096 aa, synthetic construct
MPAAKRVKLDGGDKKYSIGLDIGTNSVGWAVITDEYKVPSKKFKVLGNTDRHSIKKNLIGALLFDSGETAEATRLKRTARRRYTRRKNRICYLQEIFSNEMAKVDDSFFHRLEESFLVEEDKKHERHPIFGNIVDEVAYHEKYPTIYHLRKKLVDSTDKADLRLIYLALAHMIKFRGHFLIEGDLNPDNSDVDKLFIQLVQTYNQLFEENPINASGVDAKAILSARLSKSRRLENLIAQLPGEKKNGLFGNLIALSLGLTPNFKSNFDLAEDAKLQLSKDTYDDDLDNLLAQIGDQYADLFLAAKNLSDAILLSDILRVNTEITKAPLSASMIKRYDEHHQDLTLLKALVRQQLPEKYKEIFFDQSKNGYAGYIDGGASQEEFYKFIKPILEKMDGTEELLVKLNREDLLRKQRTFDNGSIPHQIHLGELHAILRRQEDFYPFLKDNREKIEKILTFRIPYYVGPLARGNSRFAWMTRKSEETITPWNFEEVVDKGASAQSFIERMTNFDKNLPNEKVLPKHSLLYEYFTVYNELTKVKYVTEGMRKPAFLSGEQKKAIVDLLFKTNRKVTVKQLKEDYFKKIECFDSVEISGVEDRFNASLGTYHDLLKIIKDKDFLDNEENEDILEDIVLTLTLFEDREMIEERLKTYAHLFDDKVMKQLKRRRYTGWGRLSRKLINGIRDKQSGKTILDFLKSDGFANRNFMQLIHDDSLTFKEDIQKAQVSGQGDSLHEHIANLAGSPAIKKGILQTVKVVDELVKVMGRHKPENIVIEMARENQTTQKGQKNSRERMKRIEEGIKELGSQILKEHPVENTQLQNEKLYLYYLQNGRDMYVDQELDINRLSDYDVDHIVPQSFLKDDSIDNKVLTRSDKARGKSDNVPSEEVVKKMKNYWRQLLNAKLITQRKFDNLTKAERGGLSELDKAGFIKRQLVETRQITKHVAQILDSRMNTKYDENDKLIREVKVITLKSKLVSDFRKDFQFYKVREINNYHHAHDAYLNAVVGTALIKKYPKLESEFVYGDYKVYDVRKMIAKSEQEIGKATAKYFFYSNIMNFFKTEITLANGEIRKRPLIETNGETGEIVWDKGRDFATVRKVLSMPQVNIVKKTEVQTGGFSKESILPKRNSDKLIARKKDWDPKKYGGFDSPTVAYSVLVVAKVEKGKSKKLKSVKELLGITIMERSSFEKNPIDFLEAKGYKEVKKDLIIKLPKYSLFELENGRKRMLASAGELQKGNELALPSKYVNFLYLASHYEKLKGSPEDNEQKQLFVEQHKHYLDEIIEQISEFSKRVILADANLDKVLSAYNKHRDKPIREQAENIIHLFTLTNLGAPAAFKYFDTTIDRKRYTSTKEVLDATLIHQSITGLYETRIDLSQLGGDGGGSSEAAAKPAPGGTLNIEDEYRLHETSKGPDVPLGSTWLSDFPQAWAETGGMGLAVRQAPLIIPLKATSTPVSIKQYPMSQEARLGIKPHIQRLLDQGILVPCQSPWNTPLLPVKKPGTNDYRPVQDLREVNKRVEDIHPTVPNPYNLLSGLPPSHQWYTVLDLKDAFFCLRLHPTSQSLFAFEWRDPEMGISGQLTWTRLPQGFKNSPTLFNEALHRDLADFRIQHPDLILLQYVDDLLLAATSELDCQQGTRALLQTLGDLGYRASAKKAQICQKQVKYLGYLLKEGQRWLTEARKETVMGQPTPKTPRQLREFLGTAGFCRLWIPGFAEMAAPLYPLTKPGTLFEWGPDQQKAYQEIKQALLTAPALGLPDLTKPFELFVDEKQGYAKGVLTQKLGPWRRPVAYLSKKLDPVAAGWPPCLRMVAAIAVLTKDAGKLTMGQPLVILAPHAVEALVKQPPDRWLSNARMTHYQALLLDTDRVQFGPIVALNPATLLPLPEEGLQHDCLDILAEAHGTRPDLTDQPLPDADHTWYTDGSSFLQEGQRKAGAAVTTETEVVWAKALPAGTSAQRAELIALTQALKMAEGKKLNVYTDSRYAFATAHIHGEIYRRRGWLTSEGKEIKNKDEILALLKALFLPKRLSIIHCPGHQKGNRAEARGNRMADQAAREVATRETPETSTLLAGKRTADGSEFEKRTADGSEFESPKKKAKVE

SEQ ID NO: 2486 - protein, 2096 aa, synthetic construct
MPAAKRVKLDGGDKKYSIGLDIGTNSVGWAVITDEYKVPSKKFKVLGNTDRHSIKKNLIGALLFDSGETAEATRLKRTARRRYTRRKNRICYLQEIFSNEMAKVDDSFFHRLEESFLVEEDKKHERHPIFGNIVDEVAYHEKYPTIYHLRKKLVDSTDKADLRLIYLALAHMIKFRGHFLIEGDLNPDNSDVDKLFIQLVQTYNQLFEENPINASGVDAKAILSARLSKSRRLENLIAQLPGEKKNGLFGNLIALSLGLTPNFKSNFDLAEDAKLQLSKDTYDDDLDNLLAQIGDQYADLFLAAKNLSDAILLSDILRVNTEITKAPLSASMIKRYDEHHQDLTLLKALVRQQLPEKYKEIFFDQSKNGYAGYIDGGASQEEFYKFIKPILEKMDGTEELLVKLNREDLLRKQRTFDNGSIPHQIHLGELHAILRRQEDFYPFLKDNREKIEKILTFRIPYYVGPLARGNSRFAWMTRKSEETITPWNFEEVVDKGASAQSFIERMTNFDKNLPNEKVLPKHSLLYEYFTVYNELTKVKYVTEGMRKPAFLSGEQKKAIVDLLFKTNRKVTVKQLKEDYFKKIECFDSVEISGVEDRFNASLGTYHDLLKIIKDKDFLDNEENEDILEDIVLTLTLFEDREMIEERLKTYAHLFDDKVMKQLKRRRYTGWGRLSRKLINGIRDKQSGKTILDFLKSDGFANRNFMQLIHDDSLTFKEDIQKAQVSGQGDSLHEHIANLAGSPAIKKGILQTVKVVDELVKVMGRHKPENIVIEMARENQTTQKGQKNSRERMKRIEEGIKELGSQILKEHPVENTQLQNEKLYLYYLQNGRDMYVDQELDINRLSDYDVDHIVPQSFLKDDSIDNKVLTRSDKARGKSDNVPSEEVVKKMKNYWRQLLNAKLITQRKFDNLTKAERGGLSELDKAGFIKRQLVETRQITKHVAQILDSRMNTKYDENDKLIREVKVITLKSKLVSDFRKDFQFYKVREINNYHHAHDAYLNAVVGTALIKKYPKLESEFVYGDYKVYDVRKMIAKSEQEIGKATAKYFFYSNIMNFFKTEITLANGEIRKRPLIETNGETGEIVWDKGRDFATVRKVLSMPQVNIVKKTEVQTGGFSKESILPKRNSDKLIARKKDWDPKKYGGFDSPTVAYSVLVVAKVEKGKSKKLKSVKELLGITIMERSSFEKNPIDFLEAKGYKEVKKDLIIKLPKYSLFELENGRKRMLASAGELQKGNELALPSKYVNFLYLASHYEKLKGSPEDNEQKQLFVEQHKHYLDEIIEQISEFSKRVILADANLDKVLSAYNKHRDKPIREQAENIIHLFTLTNLGAPAAFKYFDTTIDRKRYTSTKEVLDATLIHQSITGLYETRIDLSQLGGDGGGGSEAAAKPAPGGTLNIEDEYRLHETSKGPDVPLGSTWLSDFPQAWAETGGMGLAVRQAPLIIPLKATSTPVSIKQYPMSQEARLGIKPHIQRLLDQGILVPCQSPWNTPLLPVKKPGTNDYRPVQDLREVNKRVEDIHPTVPNPYNLLSGLPPSHQWYTVLDLKDAFFCLRLHPTSQSLFAFEWRDPEMGISGQLTWTRLPQGFKNSPTLFNEALHRDLADFRIQHPDLILLQYVDDLLLAATSELDCQQGTRALLQTLGDLGYRASAKKAQICQKQVKYLGYLLKEGQRWLTEARKETVMGQPTPKTPRQLREFLGTAGFCRLWIPGFAEMAAPLYPLTKPGTLFEWGPDQQKAYQEIKQALLTAPALGLPDLTKPFELFVDEKQGYAKGVLTQKLGPWRRPVAYLSKKLDPVAAGWPPCLRMVAAIAVLTKDAGKLTMGQPLVILAPHAVEALVKQPPDRWLSNARMTHYQALLLDTDRVQFGPIVALNPATLLPLPEEGLQHDCLDILAEAHGTRPDLTDQPLPDADHTWYTDGSSFLQEGQRKAGAAVTTETEVVWAKALPAGTSAQRAELIALTQALKMAEGKKLNVYTDSRYAFATAHIHGEIYRRRGWLTSEGKEIKNKDEILALLKALFLPKRLSIIHCPGHQKGNRAEARGNRMADQAAREVATRETPETSTLLAGKRTADGSEFEKRTADGSEFESPKKKAKVE

SEQ ID NO: 2487 - protein, 2091 aa, synthetic construct
MPAAKRVKLDGGDKKYSIGLDIGTNSVGWAVITDEYKVPSKKFKVLGNTDRHSIKKNLIGALLFDSGETAEATRLKRTARRRYTRRKNRICYLQEIFSNEMAKVDDSFFHRLEESFLVEEDKKHERHPIFGNIVDEVAYHEKYPTIYHLRKKLVDSTDKADLRLIYLALAHMIKFRGHFLIEGDLNPDNSDVDKLFIQLVQTYNQLFEENPINASGVDAKAILSARLSKSRRLENLIAQLPGEKKNGLFGNLIALSLGLTPNFKSNFDLAEDAKLQLSKDTYDDDLDNLLAQIGDQYADLFLAAKNLSDAILLSDILRVNTEITKAPLSASMIKRYDEHHQDLTLLKALVRQQLPEKYKEIFFDQSKNGYAGYIDGGASQEEFYKFIKPILEKMDGTEELLVKLNREDLLRKQRTFDNGSIPHQIHLGELHAILRRQEDFYPFLKDNREKIEKILTFRIPYYVGPLARGNSRFAWMTRKSEETITPWNFEEVVDKGASAQSFIERMTNFDKNLPNEKVLPKHSLLYEYFTVYNELTKVKYVTEGMRKPAFLSGEQKKAIVDLLFKTNRKVTVKQLKEDYFKKIECFDSVEISGVEDRFNASLGTYHDLLKIIKDKDFLDNEENEDILEDIVLTLTLFEDREMIEERLKTYAHLFDDKVMKQLKRRRYTGWGRLSRKLINGIRDKQSGKTILDFLKSDGFANRNFMQLIHDDSLTFKEDIQKAQVSGQGDSLHEHIANLAGSPAIKKGILQTVKVVDELVKVMGRHKPENIVIEMARENQTTQKGQKNSRERMKRIEEGIKELGSQILKEHPVENTQLQNEKLYLYYLQNGRDMYVDQELDINRLSDYDVDHIVPQSFLKDDSIDNKVLTRSDKARGKSDNVPSEEVVKKMKNYWRQLLNAKLITQRKFDNLTKAERGGLSELDKAGFIKRQLVETRQITKHVAQILDSRMNTKYDENDKLIREVKVITLKSKLVSDFRKDFQFYKVREINNYHHAHDAYLNAVVGTALIKKYPKLESEFVYGDYKVYDVRKMIAKSEQEIGKATAKYFFYSNIMNFFKTEITLANGEIRKRPLIETNGETGEIVWDKGRDFATVRKVLSMPQVNIVKKTEVQTGGFSKESILPKRNSDKLIARKKDWDPKKYGGFDSPTVAYSVLVVAKVEKGKSKKLKSVKELLGITIMERSSFEKNPIDFLEAKGYKEVKKDLIIKLPKYSLFELENGRKRMLASAGELQKGNELALPSKYVNFLYLASHYEKLKGSPEDNEQKQLFVEQHKHYLDEIIEQISEFSKRVILADANLDKVLSAYNKHRDKPIREQAENIIHLFTLTNLGAPAAFKYFDTTIDRKRYTSTKEVLDATLIHQSITGLYETRIDLSQLGGDGGGGSGSSGGTLNIEDEYRLHETSKGPDVPLGSTWLSDFPQAWAETGGMGLAVRQAPLIIPLKATSTPVSIKQYPMSQEARLGIKPHIQRLLDQGILVPCQSPWNTPLLPVKKPGTNDYRPVQDLREVNKRVEDIHPTVPNPYNLLSGLPPSHQWYTVLDLKDAFFCLRLHPTSQSLFAFEWRDPEMGISGQLTWTRLPQGFKNSPTLFNEALHRDLADFRIQHPDLILLQYVDDLLLAATSELDCQQGTRALLQTLGDLGYRASAKKAQICQKQVKYLGYLLKEGQRWLTEARKETVMGQPTPKTPRQLREFLGTAGFCRLWIPGFAEMAAPLYPLTKPGTLFEWGPDQQKAYQEIKQALLTAPALGLPDLTKPFELFVDEKQGYAKGVLTQKLGPWRRPVAYLSKKLDPVAAGWPPCLRMVAAIAVLTKDAGKLTMGQPLVILAPHAVEALVKQPPDRWLSNARMTHYQALLLDTDRVQFGPIVALNPATLLPLPEEGLQHDCLDILAEAHGTRPDLTDQPLPDADHTWYTDGSSFLQEGQRKAGAAVTTETEVVWAKALPAGTSAQRAELIALTQALKMAEGKKLNVYTDSRYAFATAHIHGEIYRRRGWLTSEGKEIKNKDEILALLKALFLPKRLSIIHCPGHQKGNRAEARGNRMADQAAREVATRETPETSTLLAGKRTADGSEFEKRTADGSEFESPKKKAKVE

SEQ ID NO: 2488 - protein, 2096 aa, synthetic construct
MPAAKRVKLDGGDKKYSIGLDIGTNSVGWAVITDEYKVPSKKFKVLGNTDRHSIKKNLIGALLFDSGETAEATRLKRTARRRYTRRKNRICYLQEIFSNEMAKVDDSFFHRLEESFLVEEDKKHERHPIFGNIVDEVAYHEKYPTIYHLRKKLVDSTDKADLRLIYLALAHMIKFRGHFLIEGDLNPDNSDVDKLFIQLVQTYNQLFEENPINASGVDAKAILSARLSKSRRLENLIAQLPGEKKNGLFGNLIALSLGLTPNFKSNFDLAEDAKLQLSKDTYDDDLDNLLAQIGDQYADLFLAAKNLSDAILLSDILRVNTEITKAPLSASMIKRYDEHHQDLTLLKALVRQQLPEKYKEIFFDQSKNGYAGYIDGGASQEEFYKFIKPILEKMDGTEELLVKLNREDLLRKQRTFDNGSIPHQIHLGELHAILRRQEDFYPFLKDNREKIEKILTFRIPYYVGPLARGNSRFAWMTRKSEETITPWNFEEVVDKGASAQSFIERMTNFDKNLPNEKVLPKHSLLYEYFTVYNELTKVKYVTEGMRKPAFLSGEQKKAIVDLLFKTNRKVTVKQLKEDYFKKIECFDSVEISGVEDRFNASLGTYHDLLKIIKDKDFLDNEENEDILEDIVLTLTLFEDREMIEERLKTYAHLFDDKVMKQLKRRRYTGWGRLSRKLINGIRDKQSGKTILDFLKSDGFANRNFMQLIHDDSLTFKEDIQKAQVSGQGDSLHEHIANLAGSPAIKKGILQTVKVVDELVKVMGRHKPENIVIEMARENQTTQKGQKNSRERMKRIEEGIKELGSQILKEHPVENTQLQNEKLYLYYLQNGRDMYVDQELDINRLSDYDVDHIVPQSFLKDDSIDNKVLTRSDKARGKSDNVPSEEVVKKMKNYWRQLLNAKLITQRKFDNLTKAERGGLSELDKAGFIKRQLVETRQITKHVAQILDSRMNTKYDENDKLIREVKVITLKSKLVSDFRKDFQFYKVREINNYHHAHDAYLNAVVGTALIKKYPKLESEFVYGDYKVYDVRKMIAKSEQEIGKATAKYFFYSNIMNFFKTEITLANGEIRKRPLIETNGETGEIVWDKGRDFATVRKVLSMPQVNIVKKTEVQTGGFSKESILPKRNSDKLIARKKDWDPKKYGGFDSPTVAYSVLVVAKVEKGKSKKLKSVKELLGITIMERSSFEKNPIDFLEAKGYKEVKKDLIIKLPKYSLFELENGRKRMLASAGELQKGNELALPSKYVNFLYLASHYEKLKGSPEDNEQKQLFVEQHKHYLDEIIEQISEFSKRVILADANLDKVLSAYNKHRDKPIREQAENIIHLFTLTNLGAPAAFKYFDTTIDRKRYTSTKEVLDATLIHQSITGLYETRIDLSQLGGDGGGSSGGSEAAAKGGTLNIEDEYRLHETSKGPDVPLGSTWLSDFPQAWAETGGMGLAVRQAPLIIPLKATSTPVSIKQYPMSQEARLGIKPHIQRLLDQGILVPCQSPWNTPLLPVKKPGTNDYRPVQDLREVNKRVEDIHPTVPNPYNLLSGLPPSHQWYTVLDLKDAFFCLRLHPTSQSLFAFEWRDPEMGISGQLTWTRLPQGFKNSPTLFNEALHRDLADFRIQHPDLILLQYVDDLLLAATSELDCQQGTRALLQTLGDLGYRASAKKAQICQKQVKYLGYLLKEGQRWLTEARKETVMGQPTPKTPRQLREFLGTAGFCRLWIPGFAEMAAPLYPLTKPGTLFEWGPDQQKAYQEIKQALLTAPALGLPDLTKPFELFVDEKQGYAKGVLTQKLGPWRRPVAYLSKKLDPVAAGWPPCLRMVAAIAVLTKDAGKLTMGQPLVILAPHAVEALVKQPPDRWLSNARMTHYQALLLDTDRVQFGPIVALNPATLLPLPEEGLQHDCLDILAEAHGTRPDLTDQPLPDADHTWYTDGSSFLQEGQRKAGAAVTTETEVVWAKALPAGTSAQRAELIALTQALKMAEGKKLNVYTDSRYAFATAHIHGEIYRRRGWLTSEGKEIKNKDEILALLKALFLPKRLSIIHCPGHQKGNRAEARGNRMADQAAREVATRETPETSTLLAGKRTADGSEFEKRTADGSEFESPKKKAKVE

SEQ ID NO: 2489 - protein, 2101 aa, synthetic construct
MPAAKRVKLDGGDKKYSIGLDIGTNSVGWAVITDEYKVPSKKFKVLGNTDRHSIKKNLIGALLFDSGETAEATRLKRTARRRYTRRKNRICYLQEIFSNEMAKVDDSFFHRLEESFLVEEDKKHERHPIFGNIVDEVAYHEKYPTIYHLRKKLVDSTDKADLRLIYLALAHMIKFRGHFLIEGDLNPDNSDVDKLFIQLVQTYNQLFEENPINASGVDAKAILSARLSKSRRLENLIAQLPGEKKNGLFGNLIALSLGLTPNFKSNFDLAEDAKLQLSKDTYDDDLDNLLAQIGDQYADLFLAAKNLSDAILLSDILRVNTEITKAPLSASMIKRYDEHHQDLTLLKALVRQQLPEKYKEIFFDQSKNGYAGYIDGGASQEEFYKFIKPILEKMDGTEELLVKLNREDLLRKQRTFDNGSIPHQIHLGELHAILRRQEDFYPFLKDNREKIEKILTFRIPYYVGPLARGNSRFAWMTRKSEETITPWNFEEVVDKGASAQSFIERMTNFDKNLPNEKVLPKHSLLYEYFTVYNELTKVKYVTEGMRKPAFLSGEQKKAIVDLLFKTNRKVTVKQLKEDYFKKIECFDSVEISGVEDRFNASLGTYHDLLKIIKDKDFLDNEENEDILEDIVLTLTLFEDREMIEERLKTYAHLFDDKVMKQLKRRRYTGWGRLSRKLINGIRDKQSGKTILDFLKSDGFANRNFMQLIHDDSLTFKEDIQKAQVSGQGDSLHEHIANLAGSPAIKKGILQTVKVVDELVKVMGRHKPENIVIEMARENQTTQKGQKNSRERMKRIEEGIKELGSQILKEHPVENTQLQNEKLYLYYLQNGRDMYVDQELDINRLSDYDVDHIVPQSFLKDDSIDNKVLTRSDKARGKSDNVPSEEVVKKMKNYWRQLLNAKLITQRKFDNLTKAERGGLSELDKAGFIKRQLVETRQITKHVAQILDSRMNTKYDENDKLIREVKVITLKSKLVSDFRKDFQFYKVREINNYHHAHDAYLNAVVGTALIKKYPKLESEFVYGDYKVYDVRKMIAKSEQEIGKATAKYFFYSNIMNFFKTEITLANGEIRKRPLIETNGETGEIVWDKGRDFATVRKVLSMPQVNIVKKTEVQTGGFSKESILPKRNSDKLIARKKDWDPKKYGGFDSPTVAYSVLVVAKVEKGKSKKLKSVKELLGITIMERSSFEKNPIDFLEAKGYKEVKKDLIIKLPKYSLFELENGRKRMLASAGELQKGNELALPSKYVNFLYLASHYEKLKGSPEDNEQKQLFVEQHKHYLDEIIEQISEFSKRVILADANLDKVLSAYNKHRDKPIREQAENIIHLFTLTNLGAPAAFKYFDTTIDRKRYTSTKEVLDATLIHQSITGLYETRIDLSQLGGDGGSGSETPGTSESATPESGGTLNIEDEYRLHETSKGPDVPLGSTWLSDFPQAWAETGGMGLAVRQAPLIIPLKATSTPVSIKQYPMSQEARLGIKPHIQRLLDQGILVPCQSPWNTPLLPVKKPGTNDYRPVQDLREVNKRVEDIHPTVPNPYNLLSGLPPSHQWYTVLDLKDAFFCLRLHPTSQSLFAFEWRDPEMGISGQLTWTRLPQGFKNSPTLFNEALHRDLADFRIQHPDLILLQYVDDLLLAATSELDCQQGTRALLQTLGDLGYRASAKKAQICQKQVKYLGYLLKEGQRWLTEARKETVMGQPTPKTPRQLREFLGTAGFCRLWIPGFAEMAAPLYPLTKPGTLFEWGPDQQKAYQEIKQALLTAPALGLPDLTKPFELFVDEKQGYAKGVLTQKLGPWRRPVAYLSKKLDPVAAGWPPCLRMVAAIAVLTKDAGKLTMGQPLVILAPHAVEALVKQPPDRWLSNARMTHYQALLLDTDRVQFGPIVALNPATLLPLPEEGLQHDCLDILAEAHGTRPDLTDQPLPDADHTWYTDGSSFLQEGQRKAGAAVTTETEVVWAKALPAGTSAQRAELIALTQALKMAEGKKLNVYTDSRYAFATAHIHGEIYRRRGWLTSEGKEIKNKDEILALLKALFLPKRLSIIHCPGHQKGNRAEARGNRMADQAAREVATRETPETSTLLAGKRTADGSEFEKRTADGSEFESPKKKAKVE

SEQ ID NO: 2490 - protein, 2097 aa, synthetic construct
MPAAKRVKLDGGDKKYSIGLDIGTNSVGWAVITDEYKVPSKKFKVLGNTDRHSIKKNLIGALLFDSGETAEATRLKRTARRRYTRRKNRICYLQEIFSNEMAKVDDSFFHRLEESFLVEEDKKHERHPIFGNIVDEVAYHEKYPTIYHLRKKLVDSTDKADLRLIYLALAHMIKFRGHFLIEGDLNPDNSDVDKLFIQLVQTYNQLFEENPINASGVDAKAILSARLSKSRRLENLIAQLPGEKKNGLFGNLIALSLGLTPNFKSNFDLAEDAKLQLSKDTYDDDLDNLLAQIGDQYADLFLAAKNLSDAILLSDILRVNTEITKAPLSASMIKRYDEHHQDLTLLKALVRQQLPEKYKEIFFDQSKNGYAGYIDGGASQEEFYKFIKPILEKMDGTEELLVKLNREDLLRKQRTFDNGSIPHQIHLGELHAILRRQEDFYPFLKDNREKIEKILTFRIPYYVGPLARGNSRFAWMTRKSEETITPWNFEEVVDKGASAQSFIERMTNFDKNLPNEKVLPKHSLLYEYFTVYNELTKVKYVTEGMRKPAFLSGEQKKAIVDLLFKTNRKVTVKQLKEDYFKKIECFDSVEISGVEDRFNASLGTYHDLLKIIKDKDFLDNEENEDILEDIVLTLTLFEDREMIEERLKTYAHLFDDKVMKQLKRRRYTGWGRLSRKLINGIRDKQSGKTILDFLKSDGFANRNFMQLIHDDSLTFKEDIQKAQVSGQGDSLHEHIANLAGSPAIKKGILQTVKVVDELVKVMGRHKPENIVIEMARENQTTQKGQKNSRERMKRIEEGIKELGSQILKEHPVENTQLQNEKLYLYYLQNGRDMYVDQELDINRLSDYDVDHIVPQSFLKDDSIDNKVLTRSDKARGKSDNVPSEEVVKKMKNYWRQLLNAKLITQRKFDNLTKAERGGLSELDKAGFIKRQLVETRQITKHVAQILDSRMNTKYDENDKLIREVKVITLKSKLVSDFRKDFQFYKVREINNYHHAHDAYLNAVVGTALIKKYPKLESEFVYGDYKVYDVRKMIAKSEQEIGKATAKYFFYSNIMNFFKTEITLANGEIRKRPLIETNGETGEIVWDKGRDFATVRKVLSMPQVNIVKKTEVQTGGFSKESILPKRNSDKLIARKKDWDPKKYGGFDSPTVAYSVLVVAKVEKGKSKKLKSVKELLGITIMERSSFEKNPIDFLEAKGYKEVKKDLIIKLPKYSLFELENGRKRMLASAGELQKGNELALPSKYVNFLYLASHYEKLKGSPEDNEQKQLFVEQHKHYLDEIIEQISEFSKRVILADANLDKVLSAYNKHRDKPIREQAENIIHLFTLTNLGAPAAFKYFDTTIDRKRYTSTKEVLDATLIHQSITGLYETRIDLSQLGGDGGGSAGSAAGSGEFGGTLNIEDEYRLHETSKGPDVPLGSTWLSDFPQAWAETGGMGLAVRQAPLIIPLKATSTPVSIKQYPMSQEARLGIKPHIQRLLDQGILVPCQSPWNTPLLPVKKPGTNDYRPVQDLREVNKRVEDIHPTVPNPYNLLSGLPPSHQWYTVLDLKDAFFCLRLHPTSQSLFAFEWRDPEMGISGQLTWTRLPQGFKNSPTLFNEALHRDLADFRIQHPDLILLQYVDDLLLAATSELDCQQGTRALLQTLGDLGYRASAKKAQICQKQVKYLGYLLKEGQRWLTEARKETVMGQPTPKTPRQLREFLGTAGFCRLWIPGFAEMAAPLYPLTKPGTLFEWGPDQQKAYQEIKQALLTAPALGLPDLTKPFELFVDEKQGYAKGVLTQKLGPWRRPVAYLSKKLDPVAAGWPPCLRMVAAIAVLTKDAGKLTMGQPLVILAPHAVEALVKQPPDRWLSNARMTHYQALLLDTDRVQFGPIVALNPATLLPLPEEGLQHDCLDILAEAHGTRPDLTDQPLPDADHTWYTDGSSFLQEGQRKAGAAVTTETEVVWAKALPAGTSAQRAELIALTQALKMAEGKKLNVYTDSRYAFATAHIHGEIYRRRGWLTSEGKEIKNKDEILALLKALFLPKRLSIIHCPGHQKGNRAEARGNRMADQAAREVATRETPETSTLLAGKRTADGSEFEKRTADGSEFESPKKKAKVE

SEQ ID NO: 2491 - protein, 2094 aa, synthetic construct
MPAAKRVKLDGGDKKYSIGLDIGTNSVGWAVITDEYKVPSKKFKVLGNTDRHSIKKNLIGALLFDSGETAEATRLKRTARRRYTRRKNRICYLQEIFSNEMAKVDDSFFHRLEESFLVEEDKKHERHPIFGNIVDEVAYHEKYPTIYHLRKKLVDSTDKADLRLIYLALAHMIKFRGHFLIEGDLNPDNSDVDKLFIQLVQTYNQLFEENPINASGVDAKAILSARLSKSRRLENLIAQLPGEKKNGLFGNLIALSLGLTPNFKSNFDLAEDAKLQLSKDTYDDDLDNLLAQIGDQYADLFLAAKNLSDAILLSDILRVNTEITKAPLSASMIKRYDEHHQDLTLLKALVRQQLPEKYKEIFFDQSKNGYAGYIDGGASQEEFYKFIKPILEKMDGTEELLVKLNREDLLRKQRTFDNGSIPHQIHLGELHAILRRQEDFYPFLKDNREKIEKILTFRIPYYVGPLARGNSRFAWMTRKSEETITPWNFEEVVDKGASAQSFIERMTNFDKNLPNEKVLPKHSLLYEYFTVYNELTKVKYVTEGMRKPAFLSGEQKKAIVDLLFKTNRKVTVKQLKEDYFKKIECFDSVEISGVEDRFNASLGTYHDLLKIIKDKDFLDNEENEDILEDIVLTLTLFEDREMIEERLKTYAHLFDDKVMKQLKRRRYTGWGRLSRKLINGIRDKQSGKTILDFLKSDGFANRNFMQLIHDDSLTFKEDIQKAQVSGQGDSLHEHIANLAGSPAIKKGILQTVKVVDELVKVMGRHKPENIVIEMARENQTTQKGQKNSRERMKRIEEGIKELGSQILKEHPVENTQLQNEKLYLYYLQNGRDMYVDQELDINRLSDYDVDHIVPQSFLKDDSIDNKVLTRSDKARGKSDNVPSEEVVKKMKNYWRQLLNAKLITQRKFDNLTKAERGGLSELDKAGFIKRQLVETRQITKHVAQILDSRMNTKYDENDKLIREVKVITLKSKLVSDFRKDFQFYKVREINNYHHAHDAYLNAVVGTALIKKYPKLESEFVYGDYKVYDVRKMIAKSEQEIGKATAKYFFYSNIMNFFKTEITLANGEIRKRPLIETNGETGEIVWDKGRDFATVRKVLSMPQVNIVKKTEVQTGGFSKESILPKRNSDKLIARKKDWDPKKYGGFDSPTVAYSVLVVAKVEKGKSKKLKSVKELLGITIMERSSFEKNPIDFLEAKGYKEVKKDLIIKLPKYSLFELENGRKRMLASAGELQKGNELALPSKYVNFLYLASHYEKLKGSPEDNEQKQLFVEQHKHYLDEIIEQISEFSKRVILADANLDKVLSAYNKHRDKPIREQAENIIHLFTLTNLGAPAAFKYFDTTIDRKRYTSTKEVLDATLIHQSITGLYETRIDLSQLGGDGGGSSGGSPAPGGTLNIEDEYRLHETSKGPDVPLGSTWLSDFPQAWAETGGMGLAVRQAPLIIPLKATSTPVSIKQYPMSQEARLGIKPHIQRLLDQGILVPCQSPWNTPLLPVKKPGTNDYRPVQDLREVNKRVEDIHPTVPNPYNLLSGLPPSHQWYTVLDLKDAFFCLRLHPTSQSLFAFEWRDPEMGISGQLTWTRLPQGFKNSPTLFNEALHRDLADFRIQHPDLILLQYVDDLLLAATSELDCQQGTRALLQTLGDLGYRASAKKAQICQKQVKYLGYLLKEGQRWLTEARKETVMGQPTPKTPRQLREFLGTAGFCRLWIPGFAEMAAPLYPLTKPGTLFEWGPDQQKAYQEIKQALLTAPALGLPDLTKPFELFVDEKQGYAKGVLTQKLGPWRRPVAYLSKKLDPVAAGWPPCLRMVAAIAVLTKDAGKLTMGQPLVILAPHAVEALVKQPPDRWLSNARMTHYQALLLDTDRVQFGPIVALNPATLLPLPEEGLQHDCLDILAEAHGTRPDLTDQPLPDADHTWYTDGSSFLQEGQRKAGAAVTTETEVVWAKALPAGTSAQRAELIALTQALKMAEGKKLNVYTDSRYAFATAHIHGEIYRRRGWLTSEGKEIKNKDEILALLKALFLPKRLSIIHCPGHQKGNRAEARGNRMADQAAREVATRETPETSTLLAGKRTADGSEFEKRTADGSEFESPKKKAKVE

SEQ ID NO: 2492 - protein, 2091 aa, synthetic construct
MPAAKRVKLDGGDKKYSIGLDIGTNSVGWAVITDEYKVPSKKFKVLGNTDRHSIKKNLIGALLFDSGETAEATRLKRTARRRYTRRKNRICYLQEIFSNEMAKVDDSFFHRLEESFLVEEDKKHERHPIFGNIVDEVAYHEKYPTIYHLRKKLVDSTDKADLRLIYLALAHMIKFRGHFLIEGDLNPDNSDVDKLFIQLVQTYNQLFEENPINASGVDAKAILSARLSKSRRLENLIAQLPGEKKNGLFGNLIALSLGLTPNFKSNFDLAEDAKLQLSKDTYDDDLDNLLAQIGDQYADLFLAAKNLSDAILLSDILRVNTEITKAPLSASMIKRYDEHHQDLTLLKALVRQQLPEKYKEIFFDQSKNGYAGYIDGGASQEEFYKFIKPILEKMDGTEELLVKLNREDLLRKQRTFDNGSIPHQIHLGELHAILRRQEDFYPFLKDNREKIEKILTFRIPYYVGPLARGNSRFAWMTRKSEETITPWNFEEVVDKGASAQSFIERMTNFDKNLPNEKVLPKHSLLYEYFTVYNELTKVKYVTEGMRKPAFLSGEQKKAIVDLLFKTNRKVTVKQLKEDYFKKIECFDSVEISGVEDRFNASLGTYHDLLKIIKDKDFLDNEENEDILEDIVLTLTLFEDREMIEERLKTYAHLFDDKVMKQLKRRRYTGWGRLSRKLINGIRDKQSGKTILDFLKSDGFANRNFMQLIHDDSLTFKEDIQKAQVSGQGDSLHEHIANLAGSPAIKKGILQTVKVVDELVKVMGRHKPENIVIEMARENQTTQKGQKNSRERMKRIEEGIKELGSQILKEHPVENTQLQNEKLYLYYLQNGRDMYVDQELDINRLSDYDVDHIVPQSFLKDDSIDNKVLTRSDKARGKSDNVPSEEVVKKMKNYWRQLLNAKLITQRKFDNLTKAERGGLSELDKAGFIKRQLVETRQITKHVAQILDSRMNTKYDENDKLIREVKVITLKSKLVSDFRKDFQFYKVREINNYHHAHDAYLNAVVGTALIKKYPKLESEFVYGDYKVYDVRKMIAKSEQEIGKATAKYFFYSNIMNFFKTEITLANGEIRKRPLIETNGETGEIVWDKGRDFATVRKVLSMPQVNIVKKTEVQTGGFSKESILPKRNSDKLIARKKDWDPKKYGGFDSPTVAYSVLVVAKVEKGKSKKLKSVKELLGITIMERSSFEKNPIDFLEAKGYKEVKKDLIIKLPKYSLFELENGRKRMLASAGELQKGNELALPSKYVNFLYLASHYEKLKGSPEDNEQKQLFVEQHKHYLDEIIEQISEFSKRVILADANLDKVLSAYNKHRDKPIREQAENIIHLFTLTNLGAPAAFKYFDTTIDRKRYTSTKEVLDATLIHQSITGLYETRIDLSQLGGDGGPAPGGGGGTLNIEDEYRLHETSKGPDVPLGSTWLSDFPQAWAETGGMGLAVRQAPLIIPLKATSTPVSIKQYPMSQEARLGIKPHIQRLLDQGILVPCQSPWNTPLLPVKKPGTNDYRPVQDLREVNKRVEDIHPTVPNPYNLLSGLPPSHQWYTVLDLKDAFFCLRLHPTSQSLFAFEWRDPEMGISGQLTWTRLPQGFKNSPTLFNEALHRDLADFRIQHPDLILLQYVDDLLLAATSELDCQQGTRALLQTLGDLGYRASAKKAQICQKQVKYLGYLLKEGQRWLTEARKETVMGQPTPKTPRQLREFLGTAGFCRLWIPGFAEMAAPLYPLTKPGTLFEWGPDQQKAYQEIKQALLTAPALGLPDLTKPFELFVDEKQGYAKGVLTQKLGPWRRPVAYLSKKLDPVAAGWPPCLRMVAAIAVLTKDAGKLTMGQPLVILAPHAVEALVKQPPDRWLSNARMTHYQALLLDTDRVQFGPIVALNPATLLPLPEEGLQHDCLDILAEAHGTRPDLTDQPLPDADHTWYTDGSSFLQEGQRKAGAAVTTETEVVWAKALPAGTSAQRAELIALTQALKMAEGKKLNVYTDSRYAFATAHIHGEIYRRRGWLTSEGKEIKNKDEILALLKALFLPKRLSIIHCPGHQKGNRAEARGNRMADQAAREVATRETPETSTLLAGKRTADGSEFEKRTADGSEFESPKKKAKVE

SEQ ID NO: 2493 - protein, 2094 aa, synthetic construct
MPAAKRVKLDGGDKKYSIGLDIGTNSVGWAVITDEYKVPSKKFKVLGNTDRHSIKKNLIGALLFDSGETAEATRLKRTARRRYTRRKNRICYLQEIFSNEMAKVDDSFFHRLEESFLVEEDKKHERHPIFGNIVDEVAYHEKYPTIYHLRKKLVDSTDKADLRLIYLALAHMIKFRGHFLIEGDLNPDNSDVDKLFIQLVQTYNQLFEENPINASGVDAKAILSARLSKSRRLENLIAQLPGEKKNGLFGNLIALSLGLTPNFKSNFDLAEDAKLQLSKDTYDDDLDNLLAQIGDQYADLFLAAKNLSDAILLSDILRVNTEITKAPLSASMIKRYDEHHQDLTLLKALVRQQLPEKYKEIFFDQSKNGYAGYIDGGASQEEFYKFIKPILEKMDGTEELLVKLNREDLLRKQRTFDNGSIPHQIHLGELHAILRRQEDFYPFLKDNREKIEKILTFRIPYYVGPLARGNSRFAWMTRKSEETITPWNFEEVVDKGASAQSFIERMTNFDKNLPNEKVLPKHSLLYEYFTVYNELTKVKYVTEGMRKPAFLSGEQKKAIVDLLFKTNRKVTVKQLKEDYFKKIECFDSVEISGVEDRFNASLGTYHDLLKIIKDKDFLDNEENEDILEDIVLTLTLFEDREMIEERLKTYAHLFDDKVMKQLKRRRYTGWGRLSRKLINGIRDKQSGKTILDFLKSDGFANRNFMQLIHDDSLTFKEDIQKAQVSGQGDSLHEHIANLAGSPAIKKGILQTVKVVDELVKVMGRHKPENIVIEMARENQTTQKGQKNSRERMKRIEEGIKELGSQILKEHPVENTQLQNEKLYLYYLQNGRDMYVDQELDINRLSDYDVDHIVPQSFLKDDSIDNKVLTRSDKARGKSDNVPSEEVVKKMKNYWRQLLNAKLITQRKFDNLTKAERGGLSELDKAGFIKRQLVETRQITKHVAQILDSRMNTKYDENDKLIREVKVITLKSKLVSDFRKDFQFYKVREINNYHHAHDAYLNAVVGTALIKKYPKLESEFVYGDYKVYDVRKMIAKSEQEIGKATAKYFFYSNIMNFFKTEITLANGEIRKRPLIETNGETGEIVWDKGRDFATVRKVLSMPQVNIVKKTEVQTGGFSKESILPKRNSDKLIARKKDWDPKKYGGFDSPTVAYSVLVVAKVEKGKSKKLKSVKELLGITIMERSSFEKNPIDFLEAKGYKEVKKDLIIKLPKYSLFELENGRKRMLASAGELQKGNELALPSKYVNFLYLASHYEKLKGSPEDNEQKQLFVEQHKHYLDEIIEQISEFSKRVILADANLDKVLSAYNKHRDKPIREQAENIIHLFTLTNLGAPAAFKYFDTTIDRKRYTSTKEVLDATLIHQSITGLYETRIDLSQLGGDGGPAPGGSGGGGGTLNIEDEYRLHETSKGPDVPLGSTWLSDFPQAWAETGGMGLAVRQAPLIIPLKATSTPVSIKQYPMSQEARLGIKPHIQRLLDQGILVPCQSPWNTPLLPVKKPGTNDYRPVQDLREVNKRVEDIHPTVPNPYNLLSGLPPSHQWYTVLDLKDAFFCLRLHPTSQSLFAFEWRDPEMGISGQLTWTRLPQGFKNSPTLFNEALHRDLADFRIQHPDLILLQYVDDLLLAATSELDCQQGTRALLQTLGDLGYRASAKKAQICQKQVKYLGYLLKEGQRWLTEARKETVMGQPTPKTPRQLREFLGTAGFCRLWIPGFAEMAAPLYPLTKPGTLFEWGPDQQKAYQEIKQALLTAPALGLPDLTKPFELFVDEKQGYAKGVLTQKLGPWRRPVAYLSKKLDPVAAGWPPCLRMVAAIAVLTKDAGKLTMGQPLVILAPHAVEALVKQPPDRWLSNARMTHYQALLLDTDRVQFGPIVALNPATLLPLPEEGLQHDCLDILAEAHGTRPDLTDQPLPDADHTWYTDGSSFLQEGQRKAGAAVTTETEVVWAKALPAGTSAQRAELIALTQALKMAEGKKLNVYTDSRYAFATAHIHGEIYRRRGWLTSEGKEIKNKDEILALLKALFLPKRLSIIHCPGHQKGNRAEARGNRMADQAAREVATRETPETSTLLAGKRTADGSEFEKRTADGSEFESPKKKAKVE

SEQ ID NO: 2494 - protein, 2096 aa, synthetic construct
MPAAKRVKLDGGDKKYSIGLDIGTNSVGWAVITDEYKVPSKKFKVLGNTDRHSIKKNLIGALLFDSGETAEATRLKRTARRRYTRRKNRICYLQEIFSNEMAKVDDSFFHRLEESFLVEEDKKHERHPIFGNIVDEVAYHEKYPTIYHLRKKLVDSTDKADLRLIYLALAHMIKFRGHFLIEGDLNPDNSDVDKLFIQLVQTYNQLFEENPINASGVDAKAILSARLSKSRRLENLIAQLPGEKKNGLFGNLIALSLGLTPNFKSNFDLAEDAKLQLSKDTYDDDLDNLLAQIGDQYADLFLAAKNLSDAILLSDILRVNTEITKAPLSASMIKRYDEHHQDLTLLKALVRQQLPEKYKEIFFDQSKNGYAGYIDGGASQEEFYKFIKPILEKMDGTEELLVKLNREDLLRKQRTFDNGSIPHQIHLGELHAILRRQEDFYPFLKDNREKIEKILTFRIPYYVGPLARGNSRFAWMTRKSEETITPWNFEEVVDKGASAQSFIERMTNFDKNLPNEKVLPKHSLLYEYFTVYNELTKVKYVTEGMRKPAFLSGEQKKAIVDLLFKTNRKVTVKQLKEDYFKKIECFDSVEISGVEDRFNASLGTYHDLLKIIKDKDFLDNEENEDILEDIVLTLTLFEDREMIEERLKTYAHLFDDKVMKQLKRRRYTGWGRLSRKLINGIRDKQSGKTILDFLKSDGFANRNFMQLIHDDSLTFKEDIQKAQVSGQGDSLHEHIANLAGSPAIKKGILQTVKVVDELVKVMGRHKPENIVIEMARENQTTQKGQKNSRERMKRIEEGIKELGSQILKEHPVENTQLQNEKLYLYYLQNGRDMYVDQELDINRLSDYDVDHIVPQSFLKDDSIDNKVLTRSDKARGKSDNVPSEEVVKKMKNYWRQLLNAKLITQRKFDNLTKAERGGLSELDKAGFIKRQLVETRQITKHVAQILDSRMNTKYDENDKLIREVKVITLKSKLVSDFRKDFQFYKVREINNYHHAHDAYLNAVVGTALIKKYPKLESEFVYGDYKVYDVRKMIAKSEQEIGKATAKYFFYSNIMNFFKTEITLANGEIRKRPLIETNGETGEIVWDKGRDFATVRKVLSMPQVNIVKKTEVQTGGFSKESILPKRNSDKLIARKKDWDPKKYGGFDSPTVAYSVLVVAKVEKGKSKKLKSVKELLGITIMERSSFEKNPIDFLEAKGYKEVKKDLIIKLPKYSLFELENGRKRMLASAGELQKGNELALPSKYVNFLYLASHYEKLKGSPEDNEQKQLFVEQHKHYLDEIIEQISEFSKRVILADANLDKVLSAYNKHRDKPIREQAENIIHLFTLTNLGAPAAFKYFDTTIDRKRYTSTKEVLDATLIHQSITGLYETRIDLSQLGGDGGPAPEAAAKGGGGGTLNIEDEYRLHETSKGPDVPLGSTWLSDFPQAWAETGGMGLAVRQAPLIIPLKATSTPVSIKQYPMSQEARLGIKPHIQRLLDQGILVPCQSPWNTPLLPVKKPGTNDYRPVQDLREVNKRVEDIHPTVPNPYNLLSGLPPSHQWYTVLDLKDAFFCLRLHPTSQSLFAFEWRDPEMGISGQLTWTRLPQGFKNSPTLFNEALHRDLADFRIQHPDLILLQYVDDLLLAATSELDCQQGTRALLQTLGDLGYRASAKKAQICQKQVKYLGYLLKEGQRWLTEARKETVMGQPTPKTPRQLREFLGTAGFCRLWIPGFAEMAAPLYPLTKPGTLFEWGPDQQKAYQEIKQALLTAPALGLPDLTKPFELFVDEKQGYAKGVLTQKLGPWRRPVAYLSKKLDPVAAGWPPCLRMVAAIAVLTKDAGKLTMGQPLVILAPHAVEALVKQPPDRWLSNARMTHYQALLLDTDRVQFGPIVALNPATLLPLPEEGLQHDCLDILAEAHGTRPDLTDQPLPDADHTWYTDGSSFLQEGQRKAGAAVTTETEVVWAKALPAGTSAQRAELIALTQALKMAEGKKLNVYTDSRYAFATAHIHGEIYRRRGWLTSEGKEIKNKDEILALLKALFLPKRLSIIHCPGHQKGNRAEARGNRMADQAAREVATRETPETSTLLAGKRTADGSEFEKRTADGSEFESPKKKAKVE

SEQ ID NO: 2495 - protein, 2096 aa, synthetic construct
MPAAKRVKLDGGDKKYSIGLDIGTNSVGWAVITDEYKVPSKKFKVLGNTDRHSIKKNLIGALLFDSGETAEATRLKRTARRRYTRRKNRICYLQEIFSNEMAKVDDSFFHRLEESFLVEEDKKHERHPIFGNIVDEVAYHEKYPTIYHLRKKLVDSTDKADLRLIYLALAHMIKFRGHFLIEGDLNPDNSDVDKLFIQLVQTYNQLFEENPINASGVDAKAILSARLSKSRRLENLIAQLPGEKKNGLFGNLIALSLGLTPNFKSNFDLAEDAKLQLSKDTYDDDLDNLLAQIGDQYADLFLAAKNLSDAILLSDILRVNTEITKAPLSASMIKRYDEHHQDLTLLKALVRQQLPEKYKEIFFDQSKNGYAGYIDGGASQEEFYKFIKPILEKMDGTEELLVKLNREDLLRKQRTFDNGSIPHQIHLGELHAILRRQEDFYPFLKDNREKIEKILTFRIPYYVGPLARGNSRFAWMTRKSEETITPWNFEEVVDKGASAQSFIERMTNFDKNLPNEKVLPKHSLLYEYFTVYNELTKVKYVTEGMRKPAFLSGEQKKAIVDLLFKTNRKVTVKQLKEDYFKKIECFDSVEISGVEDRFNASLGTYHDLLKIIKDKDFLDNEENEDILEDIVLTLTLFEDREMIEERLKTYAHLFDDKVMKQLKRRRYTGWGRLSRKLINGIRDKQSGKTILDFLKSDGFANRNFMQLIHDDSLTFKEDIQKAQVSGQGDSLHEHIANLAGSPAIKKGILQTVKVVDELVKVMGRHKPENIVIEMARENQTTQKGQKNSRERMKRIEEGIKELGSQILKEHPVENTQLQNEKLYLYYLQNGRDMYVDQELDINRLSDYDVDHIVPQSFLKDDSIDNKVLTRSDKARGKSDNVPSEEVVKKMKNYWRQLLNAKLITQRKFDNLTKAERGGLSELDKAGFIKRQLVETRQITKHVAQILDSRMNTKYDENDKLIREVKVITLKSKLVSDFRKDFQFYKVREINNYHHAHDAYLNAVVGTALIKKYPKLESEFVYGDYKVYDVRKMIAKSEQEIGKATAKYFFYSNIMNFFKTEITLANGEIRKRPLIETNGETGEIVWDKGRDFATVRKVLSMPQVNIVKKTEVQTGGFSKESILPKRNSDKLIARKKDWDPKKYGGFDSPTVAYSVLVVAKVEKGKSKKLKSVKELLGITIMERSSFEKNPIDFLEAKGYKEVKKDLIIKLPKYSLFELENGRKRMLASAGELQKGNELALPSKYVNFLYLASHYEKLKGSPEDNEQKQLFVEQHKHYLDEIIEQISEFSKRVILADANLDKVLSAYNKHRDKPIREQAENIIHLFTLTNLGAPAAFKYFDTTIDRKRYTSTKEVLDATLIHQSITGLYETRIDLSQLGGDGGEAAAKPAPGGSGGTLNIEDEYRLHETSKGPDVPLGSTWLSDFPQAWAETGGMGLAVRQAPLIIPLKATSTPVSIKQYPMSQEARLGIKPHIQRLLDQGILVPCQSPWNTPLLPVKKPGTNDYRPVQDLREVNKRVEDIHPTVPNPYNLLSGLPPSHQWYTVLDLKDAFFCLRLHPTSQSLFAFEWRDPEMGISGQLTWTRLPQGFKNSPTLFNEALHRDLADFRIQHPDLILLQYVDDLLLAATSELDCQQGTRALLQTLGDLGYRASAKKAQICQKQVKYLGYLLKEGQRWLTEARKETVMGQPTPKTPRQLREFLGTAGFCRLWIPGFAEMAAPLYPLTKPGTLFEWGPDQQKAYQEIKQALLTAPALGLPDLTKPFELFVDEKQGYAKGVLTQKLGPWRRPVAYLSKKLDPVAAGWPPCLRMVAAIAVLTKDAGKLTMGQPLVILAPHAVEALVKQPPDRWLSNARMTHYQALLLDTDRVQFGPIVALNPATLLPLPEEGLQHDCLDILAEAHGTRPDLTDQPLPDADHTWYTDGSSFLQEGQRKAGAAVTTETEVVWAKALPAGTSAQRAELIALTQALKMAEGKKLNVYTDSRYAFATAHIHGEIYRRRGWLTSEGKEIKNKDEILALLKALFLPKRLSIIHCPGHQKGNRAEARGNRMADQAAREVATRETPETSTLLAGKRTADGSEFEKRTADGSEFESPKKKAKVE

SEQ ID NO: 2496 - protein, 2094 aa, synthetic construct
MPAAKRVKLDGGDKKYSIGLDIGTNSVGWAVITDEYKVPSKKFKVLGNTDRHSIKKNLIGALLFDSGETAEATRLKRTARRRYTRRKNRICYLQEIFSNEMAKVDDSFFHRLEESFLVEEDKKHERHPIFGNIVDEVAYHEKYPTIYHLRKKLVDSTDKADLRLIYLALAHMIKFRGHFLIEGDLNPDNSDVDKLFIQLVQTYNQLFEENPINASGVDAKAILSARLSKSRRLENLIAQLPGEKKNGLFGNLIALSLGLTPNFKSNFDLAEDAKLQLSKDTYDDDLDNLLAQIGDQYADLFLAAKNLSDAILLSDILRVNTEITKAPLSASMIKRYDEHHQDLTLLKALVRQQLPEKYKEIFFDQSKNGYAGYIDGGASQEEFYKFIKPILEKMDGTEELLVKLNREDLLRKQRTFDNGSIPHQIHLGELHAILRRQEDFYPFLKDNREKIEKILTFRIPYYVGPLARGNSRFAWMTRKSEETITPWNFEEVVDKGASAQSFIERMTNFDKNLPNEKVLPKHSLLYEYFTVYNELTKVKYVTEGMRKPAFLSGEQKKAIVDLLFKTNRKVTVKQLKEDYFKKIECFDSVEISGVEDRFNASLGTYHDLLKIIKDKDFLDNEENEDILEDIVLTLTLFEDREMIEERLKTYAHLFDDKVMKQLKRRRYTGWGRLSRKLINGIRDKQSGKTILDFLKSDGFANRNFMQLIHDDSLTFKEDIQKAQVSGQGDSLHEHIANLAGSPAIKKGILQTVKVVDELVKVMGRHKPENIVIEMARENQTTQKGQKNSRERMKRIEEGIKELGSQILKEHPVENTQLQNEKLYLYYLQNGRDMYVDQELDINRLSDYDVDHIVPQSFLKDDSIDNKVLTRSDKARGKSDNVPSEEVVKKMKNYWRQLLNAKLITQRKFDNLTKAERGGLSELDKAGFIKRQLVETRQITKHVAQILDSRMNTKYDENDKLIREVKVITLKSKLVSDFRKDFQFYKVREINNYHHAHDAYLNAVVGTALIKKYPKLESEFVYGDYKVYDVRKMIAKSEQEIGKATAKYFFYSNIMNFFKTEITLANGEIRKRPLIETNGETGEIVWDKGRDFATVRKVLSMPQVNIVKKTEVQTGGFSKESILPKRNSDKLIARKKDWDPKKYGGFDSPTVAYSVLVVAKVEKGKSKKLKSVKELLGITIMERSSFEKNPIDFLEAKGYKEVKKDLIIKLPKYSLFELENGRKRMLASAGELQKGNELALPSKYVNFLYLASHYEKLKGSPEDNEQKQLFVEQHKHYLDEIIEQISEFSKRVILADANLDKVLSAYNKHRDKPIREQAENIIHLFTLTNLGAPAAFKYFDTTIDRKRYTSTKEVLDATLIHQSITGLYETRIDLSQLGGDGGGGGPAPGGSGGTLNIEDEYRLHETSKGPDVPLGSTWLSDFPQAWAETGGMGLAVRQAPLIIPLKATSTPVSIKQYPMSQEARLGIKPHIQRLLDQGILVPCQSPWNTPLLPVKKPGTNDYRPVQDLREVNKRVEDIHPTVPNPYNLLSGLPPSHQWYTVLDLKDAFFCLRLHPTSQSLFAFEWRDPEMGISGQLTWTRLPQGFKNSPTLFNEALHRDLADFRIQHPDLILLQYVDDLLLAATSELDCQQGTRALLQTLGDLGYRASAKKAQICQKQVKYLGYLLKEGQRWLTEARKETVMGQPTPKTPRQLREFLGTAGFCRLWIPGFAEMAAPLYPLTKPGTLFEWGPDQQKAYQEIKQALLTAPALGLPDLTKPFELFVDEKQGYAKGVLTQKLGPWRRPVAYLSKKLDPVAAGWPPCLRMVAAIAVLTKDAGKLTMGQPLVILAPHAVEALVKQPPDRWLSNARMTHYQALLLDTDRVQFGPIVALNPATLLPLPEEGLQHDCLDILAEAHGTRPDLTDQPLPDADHTWYTDGSSFLQEGQRKAGAAVTTETEVVWAKALPAGTSAQRAELIALTQALKMAEGKKLNVYTDSRYAFATAHIHGEIYRRRGWLTSEGKEIKNKDEILALLKALFLPKRLSIIHCPGHQKGNRAEARGNRMADQAAREVATRETPETSTLLAGKRTADGSEFEKRTADGSEFESPKKKAKVE

SEQ ID NO: 2497 - protein, 2091 aa, synthetic construct
MPAAKRVKLDGGDKKYSIGLDIGTNSVGWAVITDEYKVPSKKFKVLGNTDRHSIKKNLIGALLFDSGETAEATRLKRTARRRYTRRKNRICYLQEIFSNEMAKVDDSFFHRLEESFLVEEDKKHERHPIFGNIVDEVAYHEKYPTIYHLRKKLVDSTDKADLRLIYLALAHMIKFRGHFLIEGDLNPDNSDVDKLFIQLVQTYNQLFEENPINASGVDAKAILSARLSKSRRLENLIAQLPGEKKNGLFGNLIALSLGLTPNFKSNFDLAEDAKLQLSKDTYDDDLDNLLAQIGDQYADLFLAAKNLSDAILLSDILRVNTEITKAPLSASMIKRYDEHHQDLTLLKALVRQQLPEKYKEIFFDQSKNGYAGYIDGGASQEEFYKFIKPILEKMDGTEELLVKLNREDLLRKQRTFDNGSIPHQIHLGELHAILRRQEDFYPFLKDNREKIEKILTFRIPYYVGPLARGNSRFAWMTRKSEETITPWNFEEVVDKGASAQSFIERMTNFDKNLPNEKVLPKHSLLYEYFTVYNELTKVKYVTEGMRKPAFLSGEQKKAIVDLLFKTNRKVTVKQLKEDYFKKIECFDSVEISGVEDRFNASLGTYHDLLKIIKDKDFLDNEENEDILEDIVLTLTLFEDREMIEERLKTYAHLFDDKVMKQLKRRRYTGWGRLSRKLINGIRDKQSGKTILDFLKSDGFANRNFMQLIHDDSLTFKEDIQKAQVSGQGDSLHEHIANLAGSPAIKKGILQTVKVVDELVKVMGRHKPENIVIEMARENQTTQKGQKNSRERMKRIEEGIKELGSQILKEHPVENTQLQNEKLYLYYLQNGRDMYVDQELDINRLSDYDVDHIVPQSFLKDDSIDNKVLTRSDKARGKSDNVPSEEVVKKMKNYWRQLLNAKLITQRKFDNLTKAERGGLSELDKAGFIKRQLVETRQITKHVAQILDSRMNTKYDENDKLIREVKVITLKSKLVSDFRKDFQFYKVREINNYHHAHDAYLNAVVGTALIKKYPKLESEFVYGDYKVYDVRKMIAKSEQEIGKATAKYFFYSNIMNFFKTEITLANGEIRKRPLIETNGETGEIVWDKGRDFATVRKVLSMPQVNIVKKTEVQTGGFSKESILPKRNSDKLIARKKDWDPKKYGGFDSPTVAYSVLVVAKVEKGKSKKLKSVKELLGITIMERSSFEKNPIDFLEAKGYKEVKKDLIIKLPKYSLFELENGRKRMLASAGELQKGNELALPSKYVNFLYLASHYEKLKGSPEDNEQKQLFVEQHKHYLDEIIEQISEFSKRVILADANLDKVLSAYNKHRDKPIREQAENIIHLFTLTNLGAPAAFKYFDTTIDRKRYTSTKEVLDATLIHQSITGLYETRIDLSQLGGDGGPAPGGSGGTLNIEDEYRLHETSKGPDVPLGSTWLSDFPQAWAETGGMGLAVRQAPLIIPLKATSTPVSIKQYPMSQEARLGIKPHIQRLLDQGILVPCQSPWNTPLLPVKKPGTNDYRPVQDLREVNKRVEDIHPTVPNPYNLLSGLPPSHQWYTVLDLKDAFFCLRLHPTSQSLFAFEWRDPEMGISGQLTWTRLPQGFKNSPTLFNEALHRDLADFRIQHPDLILLQYVDDLLLAATSELDCQQGTRALLQTLGDLGYRASAKKAQICQKQVKYLGYLLKEGQRWLTEARKETVMGQPTPKTPRQLREFLGTAGFCRLWIPGFAEMAAPLYPLTKPGTLFEWGPDQQKAYQEIKQALLTAPALGLPDLTKPFELFVDEKQGYAKGVLTQKLGPWRRPVAYLSKKLDPVAAGWPPCLRMVAAIAVLTKDAGKLTMGQPLVILAPHAVEALVKQPPDRWLSNARMTHYQALLLDTDRVQFGPIVALNPATLLPLPEEGLQHDCLDILAEAHGTRPDLTDQPLPDADHTWYTDGSSFLQEGQRKAGAAVTTETEVVWAKALPAGTSAQRAELIALTQALKMAEGKKLNVYTDSRYAFATAHIHGEIYRRRGWLTSEGKEIKNKDEILALLKALFLPKRLSIIHCPGHQKGNRAEARGNRMADQAAREVATRETPETSTLLAGKRTADGSEFEKRTADGSEFESPKKKAKVE

SEQ ID NO: 2498 - protein, 2094 aa, synthetic construct
MPAAKRVKLDGGDKKYSIGLDIGTNSVGWAVITDEYKVPSKKFKVLGNTDRHSIKKNLIGALLFDSGETAEATRLKRTARRRYTRRKNRICYLQEIFSNEMAKVDDSFFHRLEESFLVEEDKKHERHPIFGNIVDEVAYHEKYPTIYHLRKKLVDSTDKADLRLIYLALAHMIKFRGHFLIEGDLNPDNSDVDKLFIQLVQTYNQLFEENPINASGVDAKAILSARLSKSRRLENLIAQLPGEKKNGLFGNLIALSLGLTPNFKSNFDLAEDAKLQLSKDTYDDDLDNLLAQIGDQYADLFLAAKNLSDAILLSDILRVNTEITKAPLSASMIKRYDEHHQDLTLLKALVRQQLPEKYKEIFFDQSKNGYAGYIDGGASQEEFYKFIKPILEKMDGTEELLVKLNREDLLRKQRTFDNGSIPHQIHLGELHAILRRQEDFYPFLKDNREKIEKILTFRIPYYVGPLARGNSRFAWMTRKSEETITPWNFEEVVDKGASAQSFIERMTNFDKNLPNEKVLPKHSLLYEYFTVYNELTKVKYVTEGMRKPAFLSGEQKKAIVDLLFKTNRKVTVKQLKEDYFKKIECFDSVEISGVEDRFNASLGTYHDLLKIIKDKDFLDNEENEDILEDIVLTLTLFEDREMIEERLKTYAHLFDDKVMKQLKRRRYTGWGRLSRKLINGIRDKQSGKTILDFLKSDGFANRNFMQLIHDDSLTFKEDIQKAQVSGQGDSLHEHIANLAGSPAIKKGILQTVKVVDELVKVMGRHKPENIVIEMARENQTTQKGQKNSRERMKRIEEGIKELGSQILKEHPVENTQLQNEKLYLYYLQNGRDMYVDQELDINRLSDYDVDHIVPQSFLKDDSIDNKVLTRSDKARGKSDNVPSEEVVKKMKNYWRQLLNAKLITQRKFDNLTKAERGGLSELDKAGFIKRQLVETRQITKHVAQILDSRMNTKYDENDKLIREVKVITLKSKLVSDFRKDFQFYKVREINNYHHAHDAYLNAVVGTALIKKYPKLESEFVYGDYKVYDVRKMIAKSEQEIGKATAKYFFYSNIMNFFKTEITLANGEIRKRPLIETNGETGEIVWDKGRDFATVRKVLSMPQVNIVKKTEVQTGGFSKESILPKRNSDKLIARKKDWDPKKYGGFDSPTVAYSVLVVAKVEKGKSKKLKSVKELLGITIMERSSFEKNPIDFLEAKGYKEVKKDLIIKLPKYSLFELENGRKRMLASAGELQKGNELALPSKYVNFLYLASHYEKLKGSPEDNEQKQLFVEQHKHYLDEIIEQISEFSKRVILADANLDKVLSAYNKHRDKPIREQAENIIHLFTLTNLGAPAAFKYFDTTIDRKRYTSTKEVLDATLIHQSITGLYETRIDLSQLGGDGGGGGGGSPAPGGTLNIEDEYRLHETSKGPDVPLGSTWLSDFPQAWAETGGMGLAVRQAPLIIPLKATSTPVSIKQYPMSQEARLGIKPHIQRLLDQGILVPCQSPWNTPLLPVKKPGTNDYRPVQDLREVNKRVEDIHPTVPNPYNLLSGLPPSHQWYTVLDLKDAFFCLRLHPTSQSLFAFEWRDPEMGISGQLTWTRLPQGFKNSPTLFNEALHRDLADFRIQHPDLILLQYVDDLLLAATSELDCQQGTRALLQTLGDLGYRASAKKAQICQKQVKYLGYLLKEGQRWLTEARKETVMGQPTPKTPRQLREFLGTAGFCRLWIPGFAEMAAPLYPLTKPGTLFEWGPDQQKAYQEIKQALLTAPALGLPDLTKPFELFVDEKQGYAKGVLTQKLGPWRRPVAYLSKKLDPVAAGWPPCLRMVAAIAVLTKDAGKLTMGQPLVILAPHAVEALVKQPPDRWLSNARMTHYQALLLDTDRVQFGPIVALNPATLLPLPEEGLQHDCLDILAEAHGTRPDLTDQPLPDADHTWYTDGSSFLQEGQRKAGAAVTTETEVVWAKALPAGTSAQRAELIALTQALKMAEGKKLNVYTDSRYAFATAHIHGEIYRRRGWLTSEGKEIKNKDEILALLKALFLPKRLSIIHCPGHQKGNRAEARGNRMADQAAREVATRETPETSTLLAGKRTADGSEFEKRTADGSEFESPKKKAKVE

SEQ ID NO: 2499 - protein, 2094 aa, synthetic construct
MPAAKRVKLDGGDKKYSIGLDIGTNSVGWAVITDEYKVPSKKFKVLGNTDRHSIKKNLIGALLFDSGETAEATRLKRTARRRYTRRKNRICYLQEIFSNEMAKVDDSFFHRLEESFLVEEDKKHERHPIFGNIVDEVAYHEKYPTIYHLRKKLVDSTDKADLRLIYLALAHMIKFRGHFLIEGDLNPDNSDVDKLFIQLVQTYNQLFEENPINASGVDAKAILSARLSKSRRLENLIAQLPGEKKNGLFGNLIALSLGLTPNFKSNFDLAEDAKLQLSKDTYDDDLDNLLAQIGDQYADLFLAAKNLSDAILLSDILRVNTEITKAPLSASMIKRYDEHHQDLTLLKALVRQQLPEKYKEIFFDQSKNGYAGYIDGGASQEEFYKFIKPILEKMDGTEELLVKLNREDLLRKQRTFDNGSIPHQIHLGELHAILRRQEDFYPFLKDNREKIEKILTFRIPYYVGPLARGNSRFAWMTRKSEETITPWNFEEVVDKGASAQSFIERMTNFDKNLPNEKVLPKHSLLYEYFTVYNELTKVKYVTEGMRKPAFLSGEQKKAIVDLLFKTNRKVTVKQLKEDYFKKIECFDSVEISGVEDRFNASLGTYHDLLKIIKDKDFLDNEENEDILEDIVLTLTLFEDREMIEERLKTYAHLFDDKVMKQLKRRRYTGWGRLSRKLINGIRDKQSGKTILDFLKSDGFANRNFMQLIHDDSLTFKEDIQKAQVSGQGDSLHEHIANLAGSPAIKKGILQTVKVVDELVKVMGRHKPENIVIEMARENQTTQKGQKNSRERMKRIEEGIKELGSQILKEHPVENTQLQNEKLYLYYLQNGRDMYVDQELDINRLSDYDVDHIVPQSFLKDDSIDNKVLTRSDKARGKSDNVPSEEVVKKMKNYWRQLLNAKLITQRKFDNLTKAERGGLSELDKAGFIKRQLVETRQITKHVAQILDSRMNTKYDENDKLIREVKVITLKSKLVSDFRKDFQFYKVREINNYHHAHDAYLNAVVGTALIKKYPKLESEFVYGDYKVYDVRKMIAKSEQEIGKATAKYFFYSNIMNFFKTEITLANGEIRKRPLIETNGETGEIVWDKGRDFATVRKVLSMPQVNIVKKTEVQTGGFSKESILPKRNSDKLIARKKDWDPKKYGGFDSPTVAYSVLVVAKVEKGKSKKLKSVKELLGITIMERSSFEKNPIDFLEAKGYKEVKKDLIIKLPKYSLFELENGRKRMLASAGELQKGNELALPSKYVNFLYLASHYEKLKGSPEDNEQKQLFVEQHKHYLDEIIEQISEFSKRVILADANLDKVLSAYNKHRDKPIREQAENIIHLFTLTNLGAPAAFKYFDTTIDRKRYTSTKEVLDATLIHQSITGLYETRIDLSQLGGDGGGGSGGSGGSGGTLNIEDEYRLHETSKGPDVPLGSTWLSDFPQAWAETGGMGLAVRQAPLIIPLKATSTPVSIKQYPMSQEARLGIKPHIQRLLDQGILVPCQSPWNTPLLPVKKPGTNDYRPVQDLREVNKRVEDIHPTVPNPYNLLSGLPPSHQWYTVLDLKDAFFCLRLHPTSQSLFAFEWRDPEMGISGQLTWTRLPQGFKNSPTLFNEALHRDLADFRIQHPDLILLQYVDDLLLAATSELDCQQGTRALLQTLGDLGYRASAKKAQICQKQVKYLGYLLKEGQRWLTEARKETVMGQPTPKTPRQLREFLGTAGFCRLWIPGFAEMAAPLYPLTKPGTLFEWGPDQQKAYQEIKQALLTAPALGLPDLTKPFELFVDEKQGYAKGVLTQKLGPWRRPVAYLSKKLDPVAAGWPPCLRMVAAIAVLTKDAGKLTMGQPLVILAPHAVEALVKQPPDRWLSNARMTHYQALLLDTDRVQFGPIVALNPATLLPLPEEGLQHDCLDILAEAHGTRPDLTDQPLPDADHTWYTDGSSFLQEGQRKAGAAVTTETEVVWAKALPAGTSAQRAELIALTQALKMAEGKKLNVYTDSRYAFATAHIHGEIYRRRGWLTSEGKEIKNKDEILALLKALFLPKRLSIIHCPGHQKGNRAEARGNRMADQAAREVATRETPETSTLLAGKRTADGSEFEKRTADGSEFESPKKKAKVE

SEQ ID NO: 2500 - protein, 2093 aa, synthetic construct
MPAAKRVKLDGGDKKYSIGLDIGTNSVGWAVITDEYKVPSKKFKVLGNTDRHSIKKNLIGALLFDSGETAEATRLKRTARRRYTRRKNRICYLQEIFSNEMAKVDDSFFHRLEESFLVEEDKKHERHPIFGNIVDEVAYHEKYPTIYHLRKKLVDSTDKADLRLIYLALAHMIKFRGHFLIEGDLNPDNSDVDKLFIQLVQTYNQLFEENPINASGVDAKAILSARLSKSRRLENLIAQLPGEKKNGLFGNLIALSLGLTPNFKSNFDLAEDAKLQLSKDTYDDDLDNLLAQIGDQYADLFLAAKNLSDAILLSDILRVNTEITKAPLSASMIKRYDEHHQDLTLLKALVRQQLPEKYKEIFFDQSKNGYAGYIDGGASQEEFYKFIKPILEKMDGTEELLVKLNREDLLRKQRTFDNGSIPHQIHLGELHAILRRQEDFYPFLKDNREKIEKILTFRIPYYVGPLARGNSRFAWMTRKSEETITPWNFEEVVDKGASAQSFIERMTNFDKNLPNEKVLPKHSLLYEYFTVYNELTKVKYVTEGMRKPAFLSGEQKKAIVDLLFKTNRKVTVKQLKEDYFKKIECFDSVEISGVEDRFNASLGTYHDLLKIIKDKDFLDNEENEDILEDIVLTLTLFEDREMIEERLKTYAHLFDDKVMKQLKRRRYTGWGRLSRKLINGIRDKQSGKTILDFLKSDGFANRNFMQLIHDDSLTFKEDIQKAQVSGQGDSLHEHIANLAGSPAIKKGILQTVKVVDELVKVMGRHKPENIVIEMARENQTTQKGQKNSRERMKRIEEGIKELGSQILKEHPVENTQLQNEKLYLYYLQNGRDMYVDQELDINRLSDYDVDHIVPQSFLKDDSIDNKVLTRSDKARGKSDNVPSEEVVKKMKNYWRQLLNAKLITQRKFDNLTKAERGGLSELDKAGFIKRQLVETRQITKHVAQILDSRMNTKYDENDKLIREVKVITLKSKLVSDFRKDFQFYKVREINNYHHAHDAYLNAVVGTALIKKYPKLESEFVYGDYKVYDVRKMIAKSEQEIGKATAKYFFYSNIMNFFKTEITLANGEIRKRPLIETNGETGEIVWDKGRDFATVRKVLSMPQVNIVKKTEVQTGGFSKESILPKRNSDKLIARKKDWDPKKYGGFDSPTVAYSVLVVAKVEKGKSKKLKSVKELLGITIMERSSFEKNPIDFLEAKGYKEVKKDLIIKLPKYSLFELENGRKRMLASAGELQKGNELALPSKYVNFLYLASHYEKLKGSPEDNEQKQLFVEQHKHYLDEIIEQISEFSKRVILADANLDKVLSAYNKHRDKPIREQAENIIHLFTLTNLGAPAAFKYFDTTIDRKRYTSTKEVLDATLIHQSITGLYETRIDLSQLGGDGGGGGGGGGGGGTLNIEDEYRLHETSKGPDVPLGSTWLSDFPQAWAETGGMGLAVRQAPLIIPLKATSTPVSIKQYPMSQEARLGIKPHIQRLLDQGILVPCQSPWNTPLLPVKKPGTNDYRPVQDLREVNKRVEDIHPTVPNPYNLLSGLPPSHQWYTVLDLKDAFFCLRLHPTSQSLFAFEWRDPEMGISGQLTWTRLPQGFKNSPTLFNEALHRDLADFRIQHPDLILLQYVDDLLLAATSELDCQQGTRALLQTLGDLGYRASAKKAQICQKQVKYLGYLLKEGQRWLTEARKETVMGQPTPKTPRQLREFLGTAGFCRLWIPGFAEMAAPLYPLTKPGTLFEWGPDQQKAYQEIKQALLTAPALGLPDLTKPFELFVDEKQGYAKGVLTQKLGPWRRPVAYLSKKLDPVAAGWPPCLRMVAAIAVLTKDAGKLTMGQPLVILAPHAVEALVKQPPDRWLSNARMTHYQALLLDTDRVQFGPIVALNPATLLPLPEEGLQHDCLDILAEAHGTRPDLTDQPLPDADHTWYTDGSSFLQEGQRKAGAAVTTETEVVWAKALPAGTSAQRAELIALTQALKMAEGKKLNVYTDSRYAFATAHIHGEIYRRRGWLTSEGKEIKNKDEILALLKALFLPKRLSIIHCPGHQKGNRAEARGNRMADQAAREVATRETPETSTLLAGKRTADGSEFEKRTADGSEFESPKKKAKVE

SEQ ID NO: 2501 - protein, 2094 aa, synthetic construct
MPAAKRVKLDGGDKKYSIGLDIGTNSVGWAVITDEYKVPSKKFKVLGNTDRHSIKKNLIGALLFDSGETAEATRLKRTARRRYTRRKNRICYLQEIFSNEMAKVDDSFFHRLEESFLVEEDKKHERHPIFGNIVDEVAYHEKYPTIYHLRKKLVDSTDKADLRLIYLALAHMIKFRGHFLIEGDLNPDNSDVDKLFIQLVQTYNQLFEENPINASGVDAKAILSARLSKSRRLENLIAQLPGEKKNGLFGNLIALSLGLTPNFKSNFDLAEDAKLQLSKDTYDDDLDNLLAQIGDQYADLFLAAKNLSDAILLSDILRVNTEITKAPLSASMIKRYDEHHQDLTLLKALVRQQLPEKYKEIFFDQSKNGYAGYIDGGASQEEFYKFIKPILEKMDGTEELLVKLNREDLLRKQRTFDNGSIPHQIHLGELHAILRRQEDFYPFLKDNREKIEKILTFRIPYYVGPLARGNSRFAWMTRKSEETITPWNFEEVVDKGASAQSFIERMTNFDKNLPNEKVLPKHSLLYEYFTVYNELTKVKYVTEGMRKPAFLSGEQKKAIVDLLFKTNRKVTVKQLKEDYFKKIECFDSVEISGVEDRFNASLGTYHDLLKIIKDKDFLDNEENEDILEDIVLTLTLFEDREMIEERLKTYAHLFDDKVMKQLKRRRYTGWGRLSRKLINGIRDKQSGKTILDFLKSDGFANRNFMQLIHDDSLTFKEDIQKAQVSGQGDSLHEHIANLAGSPAIKKGILQTVKVVDELVKVMGRHKPENIVIEMARENQTTQKGQKNSRERMKRIEEGIKELGSQILKEHPVENTQLQNEKLYLYYLQNGRDMYVDQELDINRLSDYDVDHIVPQSFLKDDSIDNKVLTRSDKARGKSDNVPSEEVVKKMKNYWRQLLNAKLITQRKFDNLTKAERGGLSELDKAGFIKRQLVETRQITKHVAQILDSRMNTKYDENDKLIREVKVITLKSKLVSDFRKDFQFYKVREINNYHHAHDAYLNAVVGTALIKKYPKLESEFVYGDYKVYDVRKMIAKSEQEIGKATAKYFFYSNIMNFFKTEITLANGEIRKRPLIETNGETGEIVWDKGRDFATVRKVLSMPQVNIVKKTEVQTGGFSKESILPKRNSDKLIARKKDWDPKKYGGFDSPTVAYSVLVVAKVEKGKSKKLKSVKELLGITIMERSSFEKNPIDFLEAKGYKEVKKDLIIKLPKYSLFELENGRKRMLASAGELQKGNELALPSKYVNFLYLASHYEKLKGSPEDNEQKQLFVEQHKHYLDEIIEQISEFSKRVILADANLDKVLSAYNKHRDKPIREQAENIIHLFTLTNLGAPAAFKYFDTTIDRKRYTSTKEVLDATLIHQSITGLYETRIDLSQLGGDGGGSSPAPGGSGGTLNIEDEYRLHETSKGPDVPLGSTWLSDFPQAWAETGGMGLAVRQAPLIIPLKATSTPVSIKQYPMSQEARLGIKPHIQRLLDQGILVPCQSPWNTPLLPVKKPGTNDYRPVQDLREVNKRVEDIHPTVPNPYNLLSGLPPSHQWYTVLDLKDAFFCLRLHPTSQSLFAFEWRDPEMGISGQLTWTRLPQGFKNSPTLFNEALHRDLADFRIQHPDLILLQYVDDLLLAATSELDCQQGTRALLQTLGDLGYRASAKKAQICQKQVKYLGYLLKEGQRWLTEARKETVMGQPTPKTPRQLREFLGTAGFCRLWIPGFAEMAAPLYPLTKPGTLFEWGPDQQKAYQEIKQALLTAPALGLPDLTKPFELFVDEKQGYAKGVLTQKLGPWRRPVAYLSKKLDPVAAGWPPCLRMVAAIAVLTKDAGKLTMGQPLVILAPHAVEALVKQPPDRWLSNARMTHYQALLLDTDRVQFGPIVALNPATLLPLPEEGLQHDCLDILAEAHGTRPDLTDQPLPDADHTWYTDGSSFLQEGQRKAGAAVTTETEVVWAKALPAGTSAQRAELIALTQALKMAEGKKLNVYTDSRYAFATAHIHGEIYRRRGWLTSEGKEIKNKDEILALLKALFLPKRLSIIHCPGHQKGNRAEARGNRMADQAAREVATRETPETSTLLAGKRTADGSEFEKRTADGSEFESPKKKAKVE

SEQ ID NO: 2502 - protein, 2094 aa, synthetic construct
MPAAKRVKLDGGDKKYSIGLDIGTNSVGWAVITDEYKVPSKKFKVLGNTDRHSIKKNLIGALLFDSGETAEATRLKRTARRRYTRRKNRICYLQEIFSNEMAKVDDSFFHRLEESFLVEEDKKHERHPIFGNIVDEVAYHEKYPTIYHLRKKLVDSTDKADLRLIYLALAHMIKFRGHFLIEGDLNPDNSDVDKLFIQLVQTYNQLFEENPINASGVDAKAILSARLSKSRRLENLIAQLPGEKKNGLFGNLIALSLGLTPNFKSNFDLAEDAKLQLSKDTYDDDLDNLLAQIGDQYADLFLAAKNLSDAILLSDILRVNTEITKAPLSASMIKRYDEHHQDLTLLKALVRQQLPEKYKEIFFDQSKNGYAGYIDGGASQEEFYKFIKPILEKMDGTEELLVKLNREDLLRKQRTFDNGSIPHQIHLGELHAILRRQEDFYPFLKDNREKIEKILTFRIPYYVGPLARGNSRFAWMTRKSEETITPWNFEEVVDKGASAQSFIERMTNFDKNLPNEKVLPKHSLLYEYFTVYNELTKVKYVTEGMRKPAFLSGEQKKAIVDLLFKTNRKVTVKQLKEDYFKKIECFDSVEISGVEDRFNASLGTYHDLLKIIKDKDFLDNEENEDILEDIVLTLTLFEDREMIEERLKTYAHLFDDKVMKQLKRRRYTGWGRLSRKLINGIRDKQSGKTILDFLKSDGFANRNFMQLIHDDSLTFKEDIQKAQVSGQGDSLHEHIANLAGSPAIKKGILQTVKVVDELVKVMGRHKPENIVIEMARENQTTQKGQKNSRERMKRIEEGIKELGSQILKEHPVENTQLQNEKLYLYYLQNGRDMYVDQELDINRLSDYDVDHIVPQSFLKDDSIDNKVLTRSDKARGKSDNVPSEEVVKKMKNYWRQLLNAKLITQRKFDNLTKAERGGLSELDKAGFIKRQLVETRQITKHVAQILDSRMNTKYDENDKLIREVKVITLKSKLVSDFRKDFQFYKVREINNYHHAHDAYLNAVVGTALIKKYPKLESEFVYGDYKVYDVRKMIAKSEQEIGKATAKYFFYSNIMNFFKTEITLANGEIRKRPLIETNGETGEIVWDKGRDFATVRKVLSMPQVNIVKKTEVQTGGFSKESILPKRNSDKLIARKKDWDPKKYGGFDSPTVAYSVLVVAKVEKGKSKKLKSVKELLGITIMERSSFEKNPIDFLEAKGYKEVKKDLIIKLPKYSLFELENGRKRMLASAGELQKGNELALPSKYVNFLYLASHYEKLKGSPEDNEQKQLFVEQHKHYLDEIIEQISEFSKRVILADANLDKVLSAYNKHRDKPIREQAENIIHLFTLTNLGAPAAFKYFDTTIDRKRYTSTKEVLDATLIHQSITGLYETRIDLSQLGGDGGPAPGGGGGSGGTLNIEDEYRLHETSKGPDVPLGSTWLSDFPQAWAETGGMGLAVRQAPLIIPLKATSTPVSIKQYPMSQEARLGIKPHIQRLLDQGILVPCQSPWNTPLLPVKKPGTNDYRPVQDLREVNKRVEDIHPTVPNPYNLLSGLPPSHQWYTVLDLKDAFFCLRLHPTSQSLFAFEWRDPEMGISGQLTWTRLPQGFKNSPTLFNEALHRDLADFRIQHPDLILLQYVDDLLLAATSELDCQQGTRALLQTLGDLGYRASAKKAQICQKQVKYLGYLLKEGQRWLTEARKETVMGQPTPKTPRQLREFLGTAGFCRLWIPGFAEMAAPLYPLTKPGTLFEWGPDQQKAYQEIKQALLTAPALGLPDLTKPFELFVDEKQGYAKGVLTQKLGPWRRPVAYLSKKLDPVAAGWPPCLRMVAAIAVLTKDAGKLTMGQPLVILAPHAVEALVKQPPDRWLSNARMTHYQALLLDTDRVQFGPIVALNPATLLPLPEEGLQHDCLDILAEAHGTRPDLTDQPLPDADHTWYTDGSSFLQEGQRKAGAAVTTETEVVWAKALPAGTSAQRAELIALTQALKMAEGKKLNVYTDSRYAFATAHIHGEIYRRRGWLTSEGKEIKNKDEILALLKALFLPKRLSIIHCPGHQKGNRAEARGNRMADQAAREVATRETPETSTLLAGKRTADGSEFEKRTADGSEFESPKKKAKVE

SEQ ID NO: 2503 - protein, 2093 aa, synthetic construct
MPAAKRVKLDGGDKKYSIGLDIGTNSVGWAVITDEYKVPSKKFKVLGNTDRHSIKKNLIGALLFDSGETAEATRLKRTARRRYTRRKNRICYLQEIFSNEMAKVDDSFFHRLEESFLVEEDKKHERHPIFGNIVDEVAYHEKYPTIYHLRKKLVDSTDKADLRLIYLALAHMIKFRGHFLIEGDLNPDNSDVDKLFIQLVQTYNQLFEENPINASGVDAKAILSARLSKSRRLENLIAQLPGEKKNGLFGNLIALSLGLTPNFKSNFDLAEDAKLQLSKDTYDDDLDNLLAQIGDQYADLFLAAKNLSDAILLSDILRVNTEITKAPLSASMIKRYDEHHQDLTLLKALVRQQLPEKYKEIFFDQSKNGYAGYIDGGASQEEFYKFIKPILEKMDGTEELLVKLNREDLLRKQRTFDNGSIPHQIHLGELHAILRRQEDFYPFLKDNREKIEKILTFRIPYYVGPLARGNSRFAWMTRKSEETITPWNFEEVVDKGASAQSFIERMTNFDKNLPNEKVLPKHSLLYEYFTVYNELTKVKYVTEGMRKPAFLSGEQKKAIVDLLFKTNRKVTVKQLKEDYFKKIECFDSVEISGVEDRFNASLGTYHDLLKIIKDKDFLDNEENEDILEDIVLTLTLFEDREMIEERLKTYAHLFDDKVMKQLKRRRYTGWGRLSRKLINGIRDKQSGKTILDFLKSDGFANRNFMQLIHDDSLTFKEDIQKAQVSGQGDSLHEHIANLAGSPAIKKGILQTVKVVDELVKVMGRHKPENIVIEMARENQTTQKGQKNSRERMKRIEEGIKELGSQILKEHPVENTQLQNEKLYLYYLQNGRDMYVDQELDINRLSDYDVDHIVPQSFLKDDSIDNKVLTRSDKARGKSDNVPSEEVVKKMKNYWRQLLNAKLITQRKFDNLTKAERGGLSELDKAGFIKRQLVETRQITKHVAQILDSRMNTKYDENDKLIREVKVITLKSKLVSDFRKDFQFYKVREINNYHHAHDAYLNAVVGTALIKKYPKLESEFVYGDYKVYDVRKMIAKSEQEIGKATAKYFFYSNIMNFFKTEITLANGEIRKRPLIETNGETGEIVWDKGRDFATVRKVLSMPQVNIVKKTEVQTGGFSKESILPKRNSDKLIARKKDWDPKKYGGFDSPTVAYSVLVVAKVEKGKSKKLKSVKELLGITIMERSSFEKNPIDFLEAKGYKEVKKDLIIKLPKYSLFELENGRKRMLASAGELQKGNELALPSKYVNFLYLASHYEKLKGSPEDNEQKQLFVEQHKHYLDEIIEQISEFSKRVILADANLDKVLSAYNKHRDKPIREQAENIIHLFTLTNLGAPAAFKYFDTTIDRKRYTSTKEVLDATLIHQSITGLYETRIDLSQLGGDGGGSSEAAAKGGTLNIEDEYRLHETSKGPDVPLGSTWLSDFPQAWAETGGMGLAVRQAPLIIPLKATSTPVSIKQYPMSQEARLGIKPHIQRLLDQGILVPCQSPWNTPLLPVKKPGTNDYRPVQDLREVNKRVEDIHPTVPNPYNLLSGLPPSHQWYTVLDLKDAFFCLRLHPTSQSLFAFEWRDPEMGISGQLTWTRLPQGFKNSPTLFNEALHRDLADFRIQHPDLILLQYVDDLLLAATSELDCQQGTRALLQTLGDLGYRASAKKAQICQKQVKYLGYLLKEGQRWLTEARKETVMGQPTPKTPRQLREFLGKAGFCRLFIPGFAEMAAPLYPLTKPGTLFEWGPDQQKAYQEIKQALLTAPALGLPDLTKPFELFVDEKQGYAKGVLTQKLGPWRRPVAYLSKKLDPVAAGWPPCLRMVAAIAVLTKDAGKLTMGQPLVILAPHAVEALVKQPPDRWLSNARMTHYQALLLDTDRVQFGPIVALNPATLLPLPEEGLQHDCLDILAEAHGTRPDLTDQPLPDADHTWYTDGSSFLQEGQRKAGAAVTTETEVVWAKALPAGTSAQRAELIALTQALKMAEGKKLNVYTDSRYAFATAHIHGEIYRRRGWLTSEGKEIKNKDEILALLKALFLPKRLSIIHCPGHQKGNRAEARGNRMADQAAREVATRETPETSTLLAGKRTADGSEFEKRTADGSEFESPKKKAKVE

SEQ ID NO: 2504 - protein, 2090 aa, synthetic construct
MPAAKRVKLDGGDKKYSIGLDIGTNSVGWAVITDEYKVPSKKFKVLGNTDRHSIKKNLIGALLFDSGETAEATRLKRTARRRYTRRKNRICYLQEIFSNEMAKVDDSFFHRLEESFLVEEDKKHERHPIFGNIVDEVAYHEKYPTIYHLRKKLVDSTDKADLRLIYLALAHMIKFRGHFLIEGDLNPDNSDVDKLFIQLVQTYNQLFEENPINASGVDAKAILSARLSKSRRLENLIAQLPGEKKNGLFGNLIALSLGLTPNFKSNFDLAEDAKLQLSKDTYDDDLDNLLAQIGDQYADLFLAAKNLSDAILLSDILRVNTEITKAPLSASMIKRYDEHHQDLTLLKALVRQQLPEKYKEIFFDQSKNGYAGYIDGGASQEEFYKFIKPILEKMDGTEELLVKLNREDLLRKQRTFDNGSIPHQIHLGELHAILRRQEDFYPFLKDNREKIEKILTFRIPYYVGPLARGNSRFAWMTRKSEETITPWNFEEVVDKGASAQSFIERMTNFDKNLPNEKVLPKHSLLYEYFTVYNELTKVKYVTEGMRKPAFLSGEQKKAIVDLLFKTNRKVTVKQLKEDYFKKIECFDSVEISGVEDRFNASLGTYHDLLKIIKDKDFLDNEENEDILEDIVLTLTLFEDREMIEERLKTYAHLFDDKVMKQLKRRRYTGWGRLSRKLINGIRDKQSGKTILDFLKSDGFANRNFMQLIHDDSLTFKEDIQKAQVSGQGDSLHEHIANLAGSPAIKKGILQTVKVVDELVKVMGRHKPENIVIEMARENQTTQKGQKNSRERMKRIEEGIKELGSQILKEHPVENTQLQNEKLYLYYLQNGRDMYVDQELDINRLSDYDVDHIVPQSFLKDDSIDNKVLTRSDKARGKSDNVPSEEVVKKMKNYWRQLLNAKLITQRKFDNLTKAERGGLSELDKAGFIKRQLVETRQITKHVAQILDSRMNTKYDENDKLIREVKVITLKSKLVSDFRKDFQFYKVREINNYHHAHDAYLNAVVGTALIKKYPKLESEFVYGDYKVYDVRKMIAKSEQEIGKATAKYFFYSNIMNFFKTEITLANGEIRKRPLIETNGETGEIVWDKGRDFATVRKVLSMPQVNIVKKTEVQTGGFSKESILPKRNSDKLIARKKDWDPKKYGGFDSPTVAYSVLVVAKVEKGKSKKLKSVKELLGITIMERSSFEKNPIDFLEAKGYKEVKKDLIIKLPKYSLFELENGRKRMLASAGELQKGNELALPSKYVNFLYLASHYEKLKGSPEDNEQKQLFVEQHKHYLDEIIEQISEFSKRVILADANLDKVLSAYNKHRDKPIREQAENIIHLFTLTNLGAPAAFKYFDTTIDRKRYTSTKEVLDATLIHQSITGLYETRIDLSQLGGDGGGGGGSGGTLNIEDEYRLHETSKGPDVPLGSTWLSDFPQAWAETGGMGLAVRQAPLIIPLKATSTPVSIKQYPMSQEARLGIKPHIQRLLDQGILVPCQSPWNTPLLPVKKPGTNDYRPVQDLREVNKRVEDIHPTVPNPYNLLSGLPPSHQWYTVLDLKDAFFCLRLHPTSQSLFAFEWRDPEMGISGQLTWTRLPQGFKNSPTLFNEALHRDLADFRIQHPDLILLQYVDDLLLAATSELDCQQGTRALLQTLGDLGYRASAKKAQICQKQVKYLGYLLKEGQRWLTEARKETVMGQPTPKTPRQLREFLGKAGFCRLFIPGFAEMAAPLYPLTKPGTLFEWGPDQQKAYQEIKQALLTAPALGLPDLTKPFELFVDEKQGYAKGVLTQKLGPWRRPVAYLSKKLDPVAAGWPPCLRMVAAIAVLTKDAGKLTMGQPLVILAPHAVEALVKQPPDRWLSNARMTHYQALLLDTDRVQFGPIVALNPATLLPLPEEGLQHDCLDILAEAHGTRPDLTDQPLPDADHTWYTDGSSFLQEGQRKAGAAVTTETEVVWAKALPAGTSAQRAELIALTQALKMAEGKKLNVYTDSRYAFATAHIHGEIYRRRGWLTSEGKEIKNKDEILALLKALFLPKRLSIIHCPGHQKGNRAEARGNRMADQAAREVATRETPETSTLLAGKRTADGSEFEKRTADGSEFESPKKKAKVE

SEQ ID NO: 2505 - protein, 2093 aa, synthetic construct
MPAAKRVKLDGGDKKYSIGLDIGTNSVGWAVITDEYKVPSKKFKVLGNTDRHSIKKNLIGALLFDSGETAEATRLKRTARRRYTRRKNRICYLQEIFSNEMAKVDDSFFHRLEESFLVEEDKKHERHPIFGNIVDEVAYHEKYPTIYHLRKKLVDSTDKADLRLIYLALAHMIKFRGHFLIEGDLNPDNSDVDKLFIQLVQTYNQLFEENPINASGVDAKAILSARLSKSRRLENLIAQLPGEKKNGLFGNLIALSLGLTPNFKSNFDLAEDAKLQLSKDTYDDDLDNLLAQIGDQYADLFLAAKNLSDAILLSDILRVNTEITKAPLSASMIKRYDEHHQDLTLLKALVRQQLPEKYKEIFFDQSKNGYAGYIDGGASQEEFYKFIKPILEKMDGTEELLVKLNREDLLRKQRTFDNGSIPHQIHLGELHAILRRQEDFYPFLKDNREKIEKILTFRIPYYVGPLARGNSRFAWMTRKSEETITPWNFEEVVDKGASAQSFIERMTNFDKNLPNEKVLPKHSLLYEYFTVYNELTKVKYVTEGMRKPAFLSGEQKKAIVDLLFKTNRKVTVKQLKEDYFKKIECFDSVEISGVEDRFNASLGTYHDLLKIIKDKDFLDNEENEDILEDIVLTLTLFEDREMIEERLKTYAHLFDDKVMKQLKRRRYTGWGRLSRKLINGIRDKQSGKTILDFLKSDGFANRNFMQLIHDDSLTFKEDIQKAQVSGQGDSLHEHIANLAGSPAIKKGILQTVKVVDELVKVMGRHKPENIVIEMARENQTTQKGQKNSRERMKRIEEGIKELGSQILKEHPVENTQLQNEKLYLYYLQNGRDMYVDQELDINRLSDYDVDHIVPQSFLKDDSIDNKVLTRSDKARGKSDNVPSEEVVKKMKNYWRQLLNAKLITQRKFDNLTKAERGGLSELDKAGFIKRQLVETRQITKHVAQILDSRMNTKYDENDKLIREVKVITLKSKLVSDFRKDFQFYKVREINNYHHAHDAYLNAVVGTALIKKYPKLESEFVYGDYKVYDVRKMIAKSEQEIGKATAKYFFYSNIMNFFKTEITLANGEIRKRPLIETNGETGEIVWDKGRDFATVRKVLSMPQVNIVKKTEVQTGGFSKESILPKRNSDKLIARKKDWDPKKYGGFDSPTVAYSVLVVAKVEKGKSKKLKSVKELLGITIMERSSFEKNPIDFLEAKGYKEVKKDLIIKLPKYSLFELENGRKRMLASAGELQKGNELALPSKYVNFLYLASHYEKLKGSPEDNEQKQLFVEQHKHYLDEIIEQISEFSKRVILADANLDKVLSAYNKHRDKPIREQAENIIHLFTLTNLGAPAAFKYFDTTIDRKRYTSTKEVLDATLIHQSITGLYETRIDLSQLGGDGGPAPEAAAKGGTLNIEDEYRLHETSKGPDVPLGSTWLSDFPQAWAETGGMGLAVRQAPLIIPLKATSTPVSIKQYPMSQEARLGIKPHIQRLLDQGILVPCQSPWNTPLLPVKKPGTNDYRPVQDLREVNKRVEDIHPTVPNPYNLLSGLPPSHQWYTVLDLKDAFFCLRLHPTSQSLFAFEWRDPEMGISGQLTWTRLPQGFKNSPTLFNEALHRDLADFRIQHPDLILLQYVDDLLLAATSELDCQQGTRALLQTLGDLGYRASAKKAQICQKQVKYLGYLLKEGQRWLTEARKETVMGQPTPKTPRQLREFLGKAGFCRLFIPGFAEMAAPLYPLTKPGTLFEWGPDQQKAYQEIKQALLTAPALGLPDLTKPFELFVDEKQGYAKGVLTQKLGPWRRPVAYLSKKLDPVAAGWPPCLRMVAAIAVLTKDAGKLTMGQPLVILAPHAVEALVKQPPDRWLSNARMTHYQALLLDTDRVQFGPIVALNPATLLPLPEEGLQHDCLDILAEAHGTRPDLTDQPLPDADHTWYTDGSSFLQEGQRKAGAAVTTETEVVWAKALPAGTSAQRAELIALTQALKMAEGKKLNVYTDSRYAFATAHIHGEIYRRRGWLTSEGKEIKNKDEILALLKALFLPKRLSIIHCPGHQKGNRAEARGNRMADQAAREVATRETPETSTLLAGKRTADGSEFEKRTADGSEFESPKKKAKVE

SEQ ID NO: 2506 - protein, 2096 aa, synthetic construct
MPAAKRVKLDGGDKKYSIGLDIGTNSVGWAVITDEYKVPSKKFKVLGNTDRHSIKKNLIGALLFDSGETAEATRLKRTARRRYTRRKNRICYLQEIFSNEMAKVDDSFFHRLEESFLVEEDKKHERHPIFGNIVDEVAYHEKYPTIYHLRKKLVDSTDKADLRLIYLALAHMIKFRGHFLIEGDLNPDNSDVDKLFIQLVQTYNQLFEENPINASGVDAKAILSARLSKSRRLENLIAQLPGEKKNGLFGNLIALSLGLTPNFKSNFDLAEDAKLQLSKDTYDDDLDNLLAQIGDQYADLFLAAKNLSDAILLSDILRVNTEITKAPLSASMIKRYDEHHQDLTLLKALVRQQLPEKYKEIFFDQSKNGYAGYIDGGASQEEFYKFIKPILEKMDGTEELLVKLNREDLLRKQRTFDNGSIPHQIHLGELHAILRRQEDFYPFLKDNREKIEKILTFRIPYYVGPLARGNSRFAWMTRKSEETITPWNFEEVVDKGASAQSFIERMTNFDKNLPNEKVLPKHSLLYEYFTVYNELTKVKYVTEGMRKPAFLSGEQKKAIVDLLFKTNRKVTVKQLKEDYFKKIECFDSVEISGVEDRFNASLGTYHDLLKIIKDKDFLDNEENEDILEDIVLTLTLFEDREMIEERLKTYAHLFDDKVMKQLKRRRYTGWGRLSRKLINGIRDKQSGKTILDFLKSDGFANRNFMQLIHDDSLTFKEDIQKAQVSGQGDSLHEHIANLAGSPAIKKGILQTVKVVDELVKVMGRHKPENIVIEMARENQTTQKGQKNSRERMKRIEEGIKELGSQILKEHPVENTQLQNEKLYLYYLQNGRDMYVDQELDINRLSDYDVDHIVPQSFLKDDSIDNKVLTRSDKARGKSDNVPSEEVVKKMKNYWRQLLNAKLITQRKFDNLTKAERGGLSELDKAGFIKRQLVETRQITKHVAQILDSRMNTKYDENDKLIREVKVITLKSKLVSDFRKDFQFYKVREINNYHHAHDAYLNAVVGTALIKKYPKLESEFVYGDYKVYDVRKMIAKSEQEIGKATAKYFFYSNIMNFFKTEITLANGEIRKRPLIETNGETGEIVWDKGRDFATVRKVLSMPQVNIVKKTEVQTGGFSKESILPKRNSDKLIARKKDWDPKKYGGFDSPTVAYSVLVVAKVEKGKSKKLKSVKELLGITIMERSSFEKNPIDFLEAKGYKEVKKDLIIKLPKYSLFELENGRKRMLASAGELQKGNELALPSKYVNFLYLASHYEKLKGSPEDNEQKQLFVEQHKHYLDEIIEQISEFSKRVILADANLDKVLSAYNKHRDKPIREQAENIIHLFTLTNLGAPAAFKYFDTTIDRKRYTSTKEVLDATLIHQSITGLYETRIDLSQLGGDGGEAAAKPAPGGGGGTLNIEDEYRLHETSKGPDVPLGSTWLSDFPQAWAETGGMGLAVRQAPLIIPLKATSTPVSIKQYPMSQEARLGIKPHIQRLLDQGILVPCQSPWNTPLLPVKKPGTNDYRPVQDLREVNKRVEDIHPTVPNPYNLLSGLPPSHQWYTVLDLKDAFFCLRLHPTSQSLFAFEWRDPEMGISGQLTWTRLPQGFKNSPTLFNEALHRDLADFRIQHPDLILLQYVDDLLLAATSELDCQQGTRALLQTLGDLGYRASAKKAQICQKQVKYLGYLLKEGQRWLTEARKETVMGQPTPKTPRQLREFLGKAGFCRLFIPGFAEMAAPLYPLTKPGTLFEWGPDQQKAYQEIKQALLTAPALGLPDLTKPFELFVDEKQGYAKGVLTQKLGPWRRPVAYLSKKLDPVAAGWPPCLRMVAAIAVLTKDAGKLTMGQPLVILAPHAVEALVKQPPDRWLSNARMTHYQALLLDTDRVQFGPIVALNPATLLPLPEEGLQHDCLDILAEAHGTRPDLTDQPLPDADHTWYTDGSSFLQEGQRKAGAAVTTETEVVWAKALPAGTSAQRAELIALTQALKMAEGKKLNVYTDSRYAFATAHIHGEIYRRRGWLTSEGKEIKNKDEILALLKALFLPKRLSIIHCPGHQKGNRAEARGNRMADQAAREVATRETPETSTLLAGKRTADGSEFEKRTADGSEFESPKKKAKVE

SEQ ID NO: 2507 - protein, 2100 aa, synthetic construct
MPAAKRVKLDGGDKKYSIGLDIGTNSVGWAVITDEYKVPSKKFKVLGNTDRHSIKKNLIGALLFDSGETAEATRLKRTARRRYTRRKNRICYLQEIFSNEMAKVDDSFFHRLEESFLVEEDKKHERHPIFGNIVDEVAYHEKYPTIYHLRKKLVDSTDKADLRLIYLALAHMIKFRGHFLIEGDLNPDNSDVDKLFIQLVQTYNQLFEENPINASGVDAKAILSARLSKSRRLENLIAQLPGEKKNGLFGNLIALSLGLTPNFKSNFDLAEDAKLQLSKDTYDDDLDNLLAQIGDQYADLFLAAKNLSDAILLSDILRVNTEITKAPLSASMIKRYDEHHQDLTLLKALVRQQLPEKYKEIFFDQSKNGYAGYIDGGASQEEFYKFIKPILEKMDGTEELLVKLNREDLLRKQRTFDNGSIPHQIHLGELHAILRRQEDFYPFLKDNREKIEKILTFRIPYYVGPLARGNSRFAWMTRKSEETITPWNFEEVVDKGASAQSFIERMTNFDKNLPNEKVLPKHSLLYEYFTVYNELTKVKYVTEGMRKPAFLSGEQKKAIVDLLFKTNRKVTVKQLKEDYFKKIECFDSVEISGVEDRFNASLGTYHDLLKIIKDKDFLDNEENEDILEDIVLTLTLFEDREMIEERLKTYAHLFDDKVMKQLKRRRYTGWGRLSRKLINGIRDKQSGKTILDFLKSDGFANRNFMQLIHDDSLTFKEDIQKAQVSGQGDSLHEHIANLAGSPAIKKGILQTVKVVDELVKVMGRHKPENIVIEMARENQTTQKGQKNSRERMKRIEEGIKELGSQILKEHPVENTQLQNEKLYLYYLQNGRDMYVDQELDINRLSDYDVDHIVPQSFLKDDSIDNKVLTRSDKARGKSDNVPSEEVVKKMKNYWRQLLNAKLITQRKFDNLTKAERGGLSELDKAGFIKRQLVETRQITKHVAQILDSRMNTKYDENDKLIREVKVITLKSKLVSDFRKDFQFYKVREINNYHHAHDAYLNAVVGTALIKKYPKLESEFVYGDYKVYDVRKMIAKSEQEIGKATAKYFFYSNIMNFFKTEITLANGEIRKRPLIETNGETGEIVWDKGRDFATVRKVLSMPQVNIVKKTEVQTGGFSKESILPKRNSDKLIARKKDWDPKKYGGFDSPTVAYSVLVVAKVEKGKSKKLKSVKELLGITIMERSSFEKNPIDFLEAKGYKEVKKDLIIKLPKYSLFELENGRKRMLASAGELQKGNELALPSKYVNFLYLASHYEKLKGSPEDNEQKQLFVEQHKHYLDEIIEQISEFSKRVILADANLDKVLSAYNKHRDKPIREQAENIIHLFTLTNLGAPAAFKYFDTTIDRKRYTSTKEVLDATLIHQSITGLYETRIDLSQLGGDGGEAAAKEAAAKEAAAKGGTLNIEDEYRLHETSKGPDVPLGSTWLSDFPQAWAETGGMGLAVRQAPLIIPLKATSTPVSIKQYPMSQEARLGIKPHIQRLLDQGILVPCQSPWNTPLLPVKKPGTNDYRPVQDLREVNKRVEDIHPTVPNPYNLLSGLPPSHQWYTVLDLKDAFFCLRLHPTSQSLFAFEWRDPEMGISGQLTWTRLPQGFKNSPTLFNEALHRDLADFRIQHPDLILLQYVDDLLLAATSELDCQQGTRALLQTLGDLGYRASAKKAQICQKQVKYLGYLLKEGQRWLTEARKETVMGQPTPKTPRQLREFLGKAGFCRLFIPGFAEMAAPLYPLTKPGTLFEWGPDQQKAYQEIKQALLTAPALGLPDLTKPFELFVDEKQGYAKGVLTQKLGPWRRPVAYLSKKLDPVAAGWPPCLRMVAAIAVLTKDAGKLTMGQPLVILAPHAVEALVKQPPDRWLSNARMTHYQALLLDTDRVQFGPIVALNPATLLPLPEEGLQHDCLDILAEAHGTRPDLTDQPLPDADHTWYTDGSSFLQEGQRKAGAAVTTETEVVWAKALPAGTSAQRAELIALTQALKMAEGKKLNVYTDSRYAFATAHIHGEIYRRRGWLTSEGKEIKNKDEILALLKALFLPKRLSIIHCPGHQKGNRAEARGNRMADQAAREVATRETPETSTLLAGKRTADGSEFEKRTADGSEFESPKKKAKVE

SEQ ID NO: 2508 - protein, 2088 aa, synthetic construct
MPAAKRVKLDGGDKKYSIGLDIGTNSVGWAVITDEYKVPSKKFKVLGNTDRHSIKKNLIGALLFDSGETAEATRLKRTARRRYTRRKNRICYLQEIFSNEMAKVDDSFFHRLEESFLVEEDKKHERHPIFGNIVDEVAYHEKYPTIYHLRKKLVDSTDKADLRLIYLALAHMIKFRGHFLIEGDLNPDNSDVDKLFIQLVQTYNQLFEENPINASGVDAKAILSARLSKSRRLENLIAQLPGEKKNGLFGNLIALSLGLTPNFKSNFDLAEDAKLQLSKDTYDDDLDNLLAQIGDQYADLFLAAKNLSDAILLSDILRVNTEITKAPLSASMIKRYDEHHQDLTLLKALVRQQLPEKYKEIFFDQSKNGYAGYIDGGASQEEFYKFIKPILEKMDGTEELLVKLNREDLLRKQRTFDNGSIPHQIHLGELHAILRRQEDFYPFLKDNREKIEKILTFRIPYYVGPLARGNSRFAWMTRKSEETITPWNFEEVVDKGASAQSFIERMTNFDKNLPNEKVLPKHSLLYEYFTVYNELTKVKYVTEGMRKPAFLSGEQKKAIVDLLFKTNRKVTVKQLKEDYFKKIECFDSVEISGVEDRFNASLGTYHDLLKIIKDKDFLDNEENEDILEDIVLTLTLFEDREMIEERLKTYAHLFDDKVMKQLKRRRYTGWGRLSRKLINGIRDKQSGKTILDFLKSDGFANRNFMQLIHDDSLTFKEDIQKAQVSGQGDSLHEHIANLAGSPAIKKGILQTVKVVDELVKVMGRHKPENIVIEMARENQTTQKGQKNSRERMKRIEEGIKELGSQILKEHPVENTQLQNEKLYLYYLQNGRDMYVDQELDINRLSDYDVDHIVPQSFLKDDSIDNKVLTRSDKARGKSDNVPSEEVVKKMKNYWRQLLNAKLITQRKFDNLTKAERGGLSELDKAGFIKRQLVETRQITKHVAQILDSRMNTKYDENDKLIREVKVITLKSKLVSDFRKDFQFYKVREINNYHHAHDAYLNAVVGTALIKKYPKLESEFVYGDYKVYDVRKMIAKSEQEIGKATAKYFFYSNIMNFFKTEITLANGEIRKRPLIETNGETGEIVWDKGRDFATVRKVLSMPQVNIVKKTEVQTGGFSKESILPKRNSDKLIARKKDWDPKKYGGFDSPTVAYSVLVVAKVEKGKSKKLKSVKELLGITIMERSSFEKNPIDFLEAKGYKEVKKDLIIKLPKYSLFELENGRKRMLASAGELQKGNELALPSKYVNFLYLASHYEKLKGSPEDNEQKQLFVEQHKHYLDEIIEQISEFSKRVILADANLDKVLSAYNKHRDKPIREQAENIIHLFTLTNLGAPAAFKYFDTTIDRKRYTSTKEVLDATLIHQSITGLYETRIDLSQLGGDGGGSSGGTLNIEDEYRLHETSKGPDVPLGSTWLSDFPQAWAETGGMGLAVRQAPLIIPLKATSTPVSIKQYPMSQEARLGIKPHIQRLLDQGILVPCQSPWNTPLLPVKKPGTNDYRPVQDLREVNKRVEDIHPTVPNPYNLLSGLPPSHQWYTVLDLKDAFFCLRLHPTSQSLFAFEWRDPEMGISGQLTWTRLPQGFKNSPTLFNEALHRDLADFRIQHPDLILLQYVDDLLLAATSELDCQQGTRALLQTLGDLGYRASAKKAQICQKQVKYLGYLLKEGQRWLTEARKETVMGQPTPKTPRQLREFLGKAGFCRLFIPGFAEMAAPLYPLTKPGTLFEWGPDQQKAYQEIKQALLTAPALGLPDLTKPFELFVDEKQGYAKGVLTQKLGPWRRPVAYLSKKLDPVAAGWPPCLRMVAAIAVLTKDAGKLTMGQPLVILAPHAVEALVKQPPDRWLSNARMTHYQALLLDTDRVQFGPIVALNPATLLPLPEEGLQHDCLDILAEAHGTRPDLTDQPLPDADHTWYTDGSSFLQEGQRKAGAAVTTETEVVWAKALPAGTSAQRAELIALTQALKMAEGKKLNVYTDSRYAFATAHIHGEIYRRRGWLTSEGKEIKNKDEILALLKALFLPKRLSIIHCPGHQKGNRAEARGNRMADQAAREVATRETPETSTLLAGKRTADGSEFEKRTADGSEFESPKKKAKVE

SEQ ID NO: 2509 - protein, 2096 aa, synthetic construct
MPAAKRVKLDGGDKKYSIGLDIGTNSVGWAVITDEYKVPSKKFKVLGNTDRHSIKKNLIGALLFDSGETAEATRLKRTARRRYTRRKNRICYLQEIFSNEMAKVDDSFFHRLEESFLVEEDKKHERHPIFGNIVDEVAYHEKYPTIYHLRKKLVDSTDKADLRLIYLALAHMIKFRGHFLIEGDLNPDNSDVDKLFIQLVQTYNQLFEENPINASGVDAKAILSARLSKSRRLENLIAQLPGEKKNGLFGNLIALSLGLTPNFKSNFDLAEDAKLQLSKDTYDDDLDNLLAQIGDQYADLFLAAKNLSDAILLSDILRVNTEITKAPLSASMIKRYDEHHQDLTLLKALVRQQLPEKYKEIFFDQSKNGYAGYIDGGASQEEFYKFIKPILEKMDGTEELLVKLNREDLLRKQRTFDNGSIPHQIHLGELHAILRRQEDFYPFLKDNREKIEKILTFRIPYYVGPLARGNSRFAWMTRKSEETITPWNFEEVVDKGASAQSFIERMTNFDKNLPNEKVLPKHSLLYEYFTVYNELTKVKYVTEGMRKPAFLSGEQKKAIVDLLFKTNRKVTVKQLKEDYFKKIECFDSVEISGVEDRFNASLGTYHDLLKIIKDKDFLDNEENEDILEDIVLTLTLFEDREMIEERLKTYAHLFDDKVMKQLKRRRYTGWGRLSRKLINGIRDKQSGKTILDFLKSDGFANRNFMQLIHDDSLTFKEDIQKAQVSGQGDSLHEHIANLAGSPAIKKGILQTVKVVDELVKVMGRHKPENIVIEMARENQTTQKGQKNSRERMKRIEEGIKELGSQILKEHPVENTQLQNEKLYLYYLQNGRDMYVDQELDINRLSDYDVDHIVPQSFLKDDSIDNKVLTRSDKARGKSDNVPSEEVVKKMKNYWRQLLNAKLITQRKFDNLTKAERGGLSELDKAGFIKRQLVETRQITKHVAQILDSRMNTKYDENDKLIREVKVITLKSKLVSDFRKDFQFYKVREINNYHHAHDAYLNAVVGTALIKKYPKLESEFVYGDYKVYDVRKMIAKSEQEIGKATAKYFFYSNIMNFFKTEITLANGEIRKRPLIETNGETGEIVWDKGRDFATVRKVLSMPQVNIVKKTEVQTGGFSKESILPKRNSDKLIARKKDWDPKKYGGFDSPTVAYSVLVVAKVEKGKSKKLKSVKELLGITIMERSSFEKNPIDFLEAKGYKEVKKDLIIKLPKYSLFELENGRKRMLASAGELQKGNELALPSKYVNFLYLASHYEKLKGSPEDNEQKQLFVEQHKHYLDEIIEQISEFSKRVILADANLDKVLSAYNKHRDKPIREQAENIIHLFTLTNLGAPAAFKYFDTTIDRKRYTSTKEVLDATLIHQSITGLYETRIDLSQLGGDGGEAAAKGSSPAPGGTLNIEDEYRLHETSKGPDVPLGSTWLSDFPQAWAETGGMGLAVRQAPLIIPLKATSTPVSIKQYPMSQEARLGIKPHIQRLLDQGILVPCQSPWNTPLLPVKKPGTNDYRPVQDLREVNKRVEDIHPTVPNPYNLLSGLPPSHQWYTVLDLKDAFFCLRLHPTSQSLFAFEWRDPEMGISGQLTWTRLPQGFKNSPTLFNEALHRDLADFRIQHPDLILLQYVDDLLLAATSELDCQQGTRALLQTLGDLGYRASAKKAQICQKQVKYLGYLLKEGQRWLTEARKETVMGQPTPKTPRQLREFLGKAGFCRLFIPGFAEMAAPLYPLTKPGTLFEWGPDQQKAYQEIKQALLTAPALGLPDLTKPFELFVDEKQGYAKGVLTQKLGPWRRPVAYLSKKLDPVAAGWPPCLRMVAAIAVLTKDAGKLTMGQPLVILAPHAVEALVKQPPDRWLSNARMTHYQALLLDTDRVQFGPIVALNPATLLPLPEEGLQHDCLDILAEAHGTRPDLTDQPLPDADHTWYTDGSSFLQEGQRKAGAAVTTETEVVWAKALPAGTSAQRAELIALTQALKMAEGKKLNVYTDSRYAFATAHIHGEIYRRRGWLTSEGKEIKNKDEILALLKALFLPKRLSIIHCPGHQKGNRAEARGNRMADQAAREVATRETPETSTLLAGKRTADGSEFEKRTADGSEFESPKKKAKVE

SEQ ID NO: 2510 - protein, 2096 aa, synthetic construct
MPAAKRVKLDGGDKKYSIGLDIGTNSVGWAVITDEYKVPSKKFKVLGNTDRHSIKKNLIGALLFDSGETAEATRLKRTARRRYTRRKNRICYLQEIFSNEMAKVDDSFFHRLEESFLVEEDKKHERHPIFGNIVDEVAYHEKYPTIYHLRKKLVDSTDKADLRLIYLALAHMIKFRGHFLIEGDLNPDNSDVDKLFIQLVQTYNQLFEENPINASGVDAKAILSARLSKSRRLENLIAQLPGEKKNGLFGNLIALSLGLTPNFKSNFDLAEDAKLQLSKDTYDDDLDNLLAQIGDQYADLFLAAKNLSDAILLSDILRVNTEITKAPLSASMIKRYDEHHQDLTLLKALVRQQLPEKYKEIFFDQSKNGYAGYIDGGASQEEFYKFIKPILEKMDGTEELLVKLNREDLLRKQRTFDNGSIPHQIHLGELHAILRRQEDFYPFLKDNREKIEKILTFRIPYYVGPLARGNSRFAWMTRKSEETITPWNFEEVVDKGASAQSFIERMTNFDKNLPNEKVLPKHSLLYEYFTVYNELTKVKYVTEGMRKPAFLSGEQKKAIVDLLFKTNRKVTVKQLKEDYFKKIECFDSVEISGVEDRFNASLGTYHDLLKIIKDKDFLDNEENEDILEDIVLTLTLFEDREMIEERLKTYAHLFDDKVMKQLKRRRYTGWGRLSRKLINGIRDKQSGKTILDFLKSDGFANRNFMQLIHDDSLTFKEDIQKAQVSGQGDSLHEHIANLAGSPAIKKGILQTVKVVDELVKVMGRHKPENIVIEMARENQTTQKGQKNSRERMKRIEEGIKELGSQILKEHPVENTQLQNEKLYLYYLQNGRDMYVDQELDINRLSDYDVDHIVPQSFLKDDSIDNKVLTRSDKARGKSDNVPSEEVVKKMKNYWRQLLNAKLITQRKFDNLTKAERGGLSELDKAGFIKRQLVETRQITKHVAQILDSRMNTKYDENDKLIREVKVITLKSKLVSDFRKDFQFYKVREINNYHHAHDAYLNAVVGTALIKKYPKLESEFVYGDYKVYDVRKMIAKSEQEIGKATAKYFFYSNIMNFFKTEITLANGEIRKRPLIETNGETGEIVWDKGRDFATVRKVLSMPQVNIVKKTEVQTGGFSKESILPKRNSDKLIARKKDWDPKKYGGFDSPTVAYSVLVVAKVEKGKSKKLKSVKELLGITIMERSSFEKNPIDFLEAKGYKEVKKDLIIKLPKYSLFELENGRKRMLASAGELQKGNELALPSKYVNFLYLASHYEKLKGSPEDNEQKQLFVEQHKHYLDEIIEQISEFSKRVILADANLDKVLSAYNKHRDKPIREQAENIIHLFTLTNLGAPAAFKYFDTTIDRKRYTSTKEVLDATLIHQSITGLYETRIDLSQLGGDGGPAPAPAPAPAPGGTLNIEDEYRLHETSKGPDVPLGSTWLSDFPQAWAETGGMGLAVRQAPLIIPLKATSTPVSIKQYPMSQEARLGIKPHIQRLLDQGILVPCQSPWNTPLLPVKKPGTNDYRPVQDLREVNKRVEDIHPTVPNPYNLLSGLPPSHQWYTVLDLKDAFFCLRLHPTSQSLFAFEWRDPEMGISGQLTWTRLPQGFKNSPTLFNEALHRDLADFRIQHPDLILLQYVDDLLLAATSELDCQQGTRALLQTLGDLGYRASAKKAQICQKQVKYLGYLLKEGQRWLTEARKETVMGQPTPKTPRQLREFLGKAGFCRLFIPGFAEMAAPLYPLTKPGTLFEWGPDQQKAYQEIKQALLTAPALGLPDLTKPFELFVDEKQGYAKGVLTQKLGPWRRPVAYLSKKLDPVAAGWPPCLRMVAAIAVLTKDAGKLTMGQPLVILAPHAVEALVKQPPDRWLSNARMTHYQALLLDTDRVQFGPIVALNPATLLPLPEEGLQHDCLDILAEAHGTRPDLTDQPLPDADHTWYTDGSSFLQEGQRKAGAAVTTETEVVWAKALPAGTSAQRAELIALTQALKMAEGKKLNVYTDSRYAFATAHIHGEIYRRRGWLTSEGKEIKNKDEILALLKALFLPKRLSIIHCPGHQKGNRAEARGNRMADQAAREVATRETPETSTLLAGKRTADGSEFEKRTADGSEFESPKKKAKVE

SEQ ID NO: 2511 - protein, 2095 aa, synthetic construct
MPAAKRVKLDGGDKKYSIGLDIGTNSVGWAVITDEYKVPSKKFKVLGNTDRHSIKKNLIGALLFDSGETAEATRLKRTARRRYTRRKNRICYLQEIFSNEMAKVDDSFFHRLEESFLVEEDKKHERHPIFGNIVDEVAYHEKYPTIYHLRKKLVDSTDKADLRLIYLALAHMIKFRGHFLIEGDLNPDNSDVDKLFIQLVQTYNQLFEENPINASGVDAKAILSARLSKSRRLENLIAQLPGEKKNGLFGNLIALSLGLTPNFKSNFDLAEDAKLQLSKDTYDDDLDNLLAQIGDQYADLFLAAKNLSDAILLSDILRVNTEITKAPLSASMIKRYDEHHQDLTLLKALVRQQLPEKYKEIFFDQSKNGYAGYIDGGASQEEFYKFIKPILEKMDGTEELLVKLNREDLLRKQRTFDNGSIPHQIHLGELHAILRRQEDFYPFLKDNREKIEKILTFRIPYYVGPLARGNSRFAWMTRKSEETITPWNFEEVVDKGASAQSFIERMTNFDKNLPNEKVLPKHSLLYEYFTVYNELTKVKYVTEGMRKPAFLSGEQKKAIVDLLFKTNRKVTVKQLKEDYFKKIECFDSVEISGVEDRFNASLGTYHDLLKIIKDKDFLDNEENEDILEDIVLTLTLFEDREMIEERLKTYAHLFDDKVMKQLKRRRYTGWGRLSRKLINGIRDKQSGKTILDFLKSDGFANRNFMQLIHDDSLTFKEDIQKAQVSGQGDSLHEHIANLAGSPAIKKGILQTVKVVDELVKVMGRHKPENIVIEMARENQTTQKGQKNSRERMKRIEEGIKELGSQILKEHPVENTQLQNEKLYLYYLQNGRDMYVDQELDINRLSDYDVDHIVPQSFLKDDSIDNKVLTRSDKARGKSDNVPSEEVVKKMKNYWRQLLNAKLITQRKFDNLTKAERGGLSELDKAGFIKRQLVETRQITKHVAQILDSRMNTKYDENDKLIREVKVITLKSKLVSDFRKDFQFYKVREINNYHHAHDAYLNAVVGTALIKKYPKLESEFVYGDYKVYDVRKMIAKSEQEIGKATAKYFFYSNIMNFFKTEITLANGEIRKRPLIETNGETGEIVWDKGRDFATVRKVLSMPQVNIVKKTEVQTGGFSKESILPKRNSDKLIARKKDWDPKKYGGFDSPTVAYSVLVVAKVEKGKSKKLKSVKELLGITIMERSSFEKNPIDFLEAKGYKEVKKDLIIKLPKYSLFELENGRKRMLASAGELQKGNELALPSKYVNFLYLASHYEKLKGSPEDNEQKQLFVEQHKHYLDEIIEQISEFSKRVILADANLDKVLSAYNKHRDKPIREQAENIIHLFTLTNLGAPAAFKYFDTTIDRKRYTSTKEVLDATLIHQSITGLYETRIDLSQLGGDGGGGGGSGGGGSGGTLNIEDEYRLHETSKGPDVPLGSTWLSDFPQAWAETGGMGLAVRQAPLIIPLKATSTPVSIKQYPMSQEARLGIKPHIQRLLDQGILVPCQSPWNTPLLPVKKPGTNDYRPVQDLREVNKRVEDIHPTVPNPYNLLSGLPPSHQWYTVLDLKDAFFCLRLHPTSQSLFAFEWRDPEMGISGQLTWTRLPQGFKNSPTLFNEALHRDLADFRIQHPDLILLQYVDDLLLAATSELDCQQGTRALLQTLGDLGYRASAKKAQICQKQVKYLGYLLKEGQRWLTEARKETVMGQPTPKTPRQLREFLGKAGFCRLFIPGFAEMAAPLYPLTKPGTLFEWGPDQQKAYQEIKQALLTAPALGLPDLTKPFELFVDEKQGYAKGVLTQKLGPWRRPVAYLSKKLDPVAAGWPPCLRMVAAIAVLTKDAGKLTMGQPLVILAPHAVEALVKQPPDRWLSNARMTHYQALLLDTDRVQFGPIVALNPATLLPLPEEGLQHDCLDILAEAHGTRPDLTDQPLPDADHTWYTDGSSFLQEGQRKAGAAVTTETEVVWAKALPAGTSAQRAELIALTQALKMAEGKKLNVYTDSRYAFATAHIHGEIYRRRGWLTSEGKEIKNKDEILALLKALFLPKRLSIIHCPGHQKGNRAEARGNRMADQAAREVATRETPETSTLLAGKRTADGSEFEKRTADGSEFESPKKKAKVE

SEQ ID NO: 2512 - protein, 2096 aa, synthetic construct
MPAAKRVKLDGGDKKYSIGLDIGTNSVGWAVITDEYKVPSKKFKVLGNTDRHSIKKNLIGALLFDSGETAEATRLKRTARRRYTRRKNRICYLQEIFSNEMAKVDDSFFHRLEESFLVEEDKKHERHPIFGNIVDEVAYHEKYPTIYHLRKKLVDSTDKADLRLIYLALAHMIKFRGHFLIEGDLNPDNSDVDKLFIQLVQTYNQLFEENPINASGVDAKAILSARLSKSRRLENLIAQLPGEKKNGLFGNLIALSLGLTPNFKSNFDLAEDAKLQLSKDTYDDDLDNLLAQIGDQYADLFLAAKNLSDAILLSDILRVNTEITKAPLSASMIKRYDEHHQDLTLLKALVRQQLPEKYKEIFFDQSKNGYAGYIDGGASQEEFYKFIKPILEKMDGTEELLVKLNREDLLRKQRTFDNGSIPHQIHLGELHAILRRQEDFYPFLKDNREKIEKILTFRIPYYVGPLARGNSRFAWMTRKSEETITPWNFEEVVDKGASAQSFIERMTNFDKNLPNEKVLPKHSLLYEYFTVYNELTKVKYVTEGMRKPAFLSGEQKKAIVDLLFKTNRKVTVKQLKEDYFKKIECFDSVEISGVEDRFNASLGTYHDLLKIIKDKDFLDNEENEDILEDIVLTLTLFEDREMIEERLKTYAHLFDDKVMKQLKRRRYTGWGRLSRKLINGIRDKQSGKTILDFLKSDGFANRNFMQLIHDDSLTFKEDIQKAQVSGQGDSLHEHIANLAGSPAIKKGILQTVKVVDELVKVMGRHKPENIVIEMARENQTTQKGQKNSRERMKRIEEGIKELGSQILKEHPVENTQLQNEKLYLYYLQNGRDMYVDQELDINRLSDYDVDHIVPQSFLKDDSIDNKVLTRSDKARGKSDNVPSEEVVKKMKNYWRQLLNAKLITQRKFDNLTKAERGGLSELDKAGFIKRQLVETRQITKHVAQILDSRMNTKYDENDKLIREVKVITLKSKLVSDFRKDFQFYKVREINNYHHAHDAYLNAVVGTALIKKYPKLESEFVYGDYKVYDVRKMIAKSEQEIGKATAKYFFYSNIMNFFKTEITLANGEIRKRPLIETNGETGEIVWDKGRDFATVRKVLSMPQVNIVKKTEVQTGGFSKESILPKRNSDKLIARKKDWDPKKYGGFDSPTVAYSVLVVAKVEKGKSKKLKSVKELLGITIMERSSFEKNPIDFLEAKGYKEVKKDLIIKLPKYSLFELENGRKRMLASAGELQKGNELALPSKYVNFLYLASHYEKLKGSPEDNEQKQLFVEQHKHYLDEIIEQISEFSKRVILADANLDKVLSAYNKHRDKPIREQAENIIHLFTLTNLGAPAAFKYFDTTIDRKRYTSTKEVLDATLIHQSITGLYETRIDLSQLGGDGGEAAAKPAPGGSGGTLNIEDEYRLHETSKGPDVPLGSTWLSDFPQAWAETGGMGLAVRQAPLIIPLKATSTPVSIKQYPMSQEARLGIKPHIQRLLDQGILVPCQSPWNTPLLPVKKPGTNDYRPVQDLREVNKRVEDIHPTVPNPYNLLSGLPPSHQWYTVLDLKDAFFCLRLHPTSQSLFAFEWRDPEMGISGQLTWTRLPQGFKNSPTLFNEALHRDLADFRIQHPDLILLQYVDDLLLAATSELDCQQGTRALLQTLGDLGYRASAKKAQICQKQVKYLGYLLKEGQRWLTEARKETVMGQPTPKTPRQLREFLGKAGFCRLFIPGFAEMAAPLYPLTKPGTLFEWGPDQQKAYQEIKQALLTAPALGLPDLTKPFELFVDEKQGYAKGVLTQKLGPWRRPVAYLSKKLDPVAAGWPPCLRMVAAIAVLTKDAGKLTMGQPLVILAPHAVEALVKQPPDRWLSNARMTHYQALLLDTDRVQFGPIVALNPATLLPLPEEGLQHDCLDILAEAHGTRPDLTDQPLPDADHTWYTDGSSFLQEGQRKAGAAVTTETEVVWAKALPAGTSAQRAELIALTQALKMAEGKKLNVYTDSRYAFATAHIHGEIYRRRGWLTSEGKEIKNKDEILALLKALFLPKRLSIIHCPGHQKGNRAEARGNRMADQAAREVATRETPETSTLLAGKRTADGSEFEKRTADGSEFESPKKKAKVE

SEQ ID NO: 2513 - protein, 2103 aa, synthetic construct
MPAAKRVKLDGGDKKYSIGLDIGTNSVGWAVITDEYKVPSKKFKVLGNTDRHSIKKNLIGALLFDSGETAEATRLKRTARRRYTRRKNRICYLQEIFSNEMAKVDDSFFHRLEESFLVEEDKKHERHPIFGNIVDEVAYHEKYPTIYHLRKKLVDSTDKADLRLIYLALAHMIKFRGHFLIEGDLNPDNSDVDKLFIQLVQTYNQLFEENPINASGVDAKAILSARLSKSRRLENLIAQLPGEKKNGLFGNLIALSLGLTPNFKSNFDLAEDAKLQLSKDTYDDDLDNLLAQIGDQYADLFLAAKNLSDAILLSDILRVNTEITKAPLSASMIKRYDEHHQDLTLLKALVRQQLPEKYKEIFFDQSKNGYAGYIDGGASQEEFYKFIKPILEKMDGTEELLVKLNREDLLRKQRTFDNGSIPHQIHLGELHAILRRQEDFYPFLKDNREKIEKILTFRIPYYVGPLARGNSRFAWMTRKSEETITPWNFEEVVDKGASAQSFIERMTNFDKNLPNEKVLPKHSLLYEYFTVYNELTKVKYVTEGMRKPAFLSGEQKKAIVDLLFKTNRKVTVKQLKEDYFKKIECFDSVEISGVEDRFNASLGTYHDLLKIIKDKDFLDNEENEDILEDIVLTLTLFEDREMIEERLKTYAHLFDDKVMKQLKRRRYTGWGRLSRKLINGIRDKQSGKTILDFLKSDGFANRNFMQLIHDDSLTFKEDIQKAQVSGQGDSLHEHIANLAGSPAIKKGILQTVKVVDELVKVMGRHKPENIVIEMARENQTTQKGQKNSRERMKRIEEGIKELGSQILKEHPVENTQLQNEKLYLYYLQNGRDMYVDQELDINRLSDYDVDHIVPQSFLKDDSIDNKVLTRSDKARGKSDNVPSEEVVKKMKNYWRQLLNAKLITQRKFDNLTKAERGGLSELDKAGFIKRQLVETRQITKHVAQILDSRMNTKYDENDKLIREVKVITLKSKLVSDFRKDFQFYKVREINNYHHAHDAYLNAVVGTALIKKYPKLESEFVYGDYKVYDVRKMIAKSEQEIGKATAKYFFYSNIMNFFKTEITLANGEIRKRPLIETNGETGEIVWDKGRDFATVRKVLSMPQVNIVKKTEVQTGGFSKESILPKRNSDKLIARKKDWDPKKYGGFDSPTVAYSVLVVAKVEKGKSKKLKSVKELLGITIMERSSFEKNPIDFLEAKGYKEVKKDLIIKLPKYSLFELENGRKRMLASAGELQKGNELALPSKYVNFLYLASHYEKLKGSPEDNEQKQLFVEQHKHYLDEIIEQISEFSKRVILADANLDKVLSAYNKHRDKPIREQAENIIHLFTLTNLGAPAAFKYFDTTIDRKRYTSTKEVLDATLIHQSITGLYETRIDLSQLGGDGGGGSGGSGGSGGSGGSGGSGGTLNIEDEYRLHETSKGPDVPLGSTWLSDFPQAWAETGGMGLAVRQAPLIIPLKATSTPVSIKQYPMSQEARLGIKPHIQRLLDQGILVPCQSPWNTPLLPVKKPGTNDYRPVQDLREVNKRVEDIHPTVPNPYNLLSGLPPSHQWYTVLDLKDAFFCLRLHPTSQSLFAFEWRDPEMGISGQLTWTRLPQGFKNSPTLFNEALHRDLADFRIQHPDLILLQYVDDLLLAATSELDCQQGTRALLQTLGDLGYRASAKKAQICQKQVKYLGYLLKEGQRWLTEARKETVMGQPTPKTPRQLREFLGKAGFCRLFIPGFAEMAAPLYPLTKPGTLFEWGPDQQKAYQEIKQALLTAPALGLPDLTKPFELFVDEKQGYAKGVLTQKLGPWRRPVAYLSKKLDPVAAGWPPCLRMVAAIAVLTKDAGKLTMGQPLVILAPHAVEALVKQPPDRWLSNARMTHYQALLLDTDRVQFGPIVALNPATLLPLPEEGLQHDCLDILAEAHGTRPDLTDQPLPDADHTWYTDGSSFLQEGQRKAGAAVTTETEVVWAKALPAGTSAQRAELIALTQALKMAEGKKLNVYTDSRYAFATAHIHGEIYRRRGWLTSEGKEIKNKDEILALLKALFLPKRLSIIHCPGHQKGNRAEARGNRMADQAAREVATRETPETSTLLAGKRTADGSEFEKRTADGSEFESPKKKAKVE

SEQ ID NO: 2514 - protein, 2096 aa, synthetic construct
MPAAKRVKLDGGDKKYSIGLDIGTNSVGWAVITDEYKVPSKKFKVLGNTDRHSIKKNLIGALLFDSGETAEATRLKRTARRRYTRRKNRICYLQEIFSNEMAKVDDSFFHRLEESFLVEEDKKHERHPIFGNIVDEVAYHEKYPTIYHLRKKLVDSTDKADLRLIYLALAHMIKFRGHFLIEGDLNPDNSDVDKLFIQLVQTYNQLFEENPINASGVDAKAILSARLSKSRRLENLIAQLPGEKKNGLFGNLIALSLGLTPNFKSNFDLAEDAKLQLSKDTYDDDLDNLLAQIGDQYADLFLAAKNLSDAILLSDILRVNTEITKAPLSASMIKRYDEHHQDLTLLKALVRQQLPEKYKEIFFDQSKNGYAGYIDGGASQEEFYKFIKPILEKMDGTEELLVKLNREDLLRKQRTFDNGSIPHQIHLGELHAILRRQEDFYPFLKDNREKIEKILTFRIPYYVGPLARGNSRFAWMTRKSEETITPWNFEEVVDKGASAQSFIERMTNFDKNLPNEKVLPKHSLLYEYFTVYNELTKVKYVTEGMRKPAFLSGEQKKAIVDLLFKTNRKVTVKQLKEDYFKKIECFDSVEISGVEDRFNASLGTYHDLLKIIKDKDFLDNEENEDILEDIVLTLTLFEDREMIEERLKTYAHLFDDKVMKQLKRRRYTGWGRLSRKLINGIRDKQSGKTILDFLKSDGFANRNFMQLIHDDSLTFKEDIQKAQVSGQGDSLHEHIANLAGSPAIKKGILQTVKVVDELVKVMGRHKPENIVIEMARENQTTQKGQKNSRERMKRIEEGIKELGSQILKEHPVENTQLQNEKLYLYYLQNGRDMYVDQELDINRLSDYDVDHIVPQSFLKDDSIDNKVLTRSDKARGKSDNVPSEEVVKKMKNYWRQLLNAKLITQRKFDNLTKAERGGLSELDKAGFIKRQLVETRQITKHVAQILDSRMNTKYDENDKLIREVKVITLKSKLVSDFRKDFQFYKVREINNYHHAHDAYLNAVVGTALIKKYPKLESEFVYGDYKVYDVRKMIAKSEQEIGKATAKYFFYSNIMNFFKTEITLANGEIRKRPLIETNGETGEIVWDKGRDFATVRKVLSMPQVNIVKKTEVQTGGFSKESILPKRNSDKLIARKKDWDPKKYGGFDSPTVAYSVLVVAKVEKGKSKKLKSVKELLGITIMERSSFEKNPIDFLEAKGYKEVKKDLIIKLPKYSLFELENGRKRMLASAGELQKGNELALPSKYVNFLYLASHYEKLKGSPEDNEQKQLFVEQHKHYLDEIIEQISEFSKRVILADANLDKVLSAYNKHRDKPIREQAENIIHLFTLTNLGAPAAFKYFDTTIDRKRYTSTKEVLDATLIHQSITGLYETRIDLSQLGGDGGPAPEAAAKGSSGGTLNIEDEYRLHETSKGPDVPLGSTWLSDFPQAWAETGGMGLAVRQAPLIIPLKATSTPVSIKQYPMSQEARLGIKPHIQRLLDQGILVPCQSPWNTPLLPVKKPGTNDYRPVQDLREVNKRVEDIHPTVPNPYNLLSGLPPSHQWYTVLDLKDAFFCLRLHPTSQSLFAFEWRDPEMGISGQLTWTRLPQGFKNSPTLFNEALHRDLADFRIQHPDLILLQYVDDLLLAATSELDCQQGTRALLQTLGDLGYRASAKKAQICQKQVKYLGYLLKEGQRWLTEARKETVMGQPTPKTPRQLREFLGKAGFCRLFIPGFAEMAAPLYPLTKPGTLFEWGPDQQKAYQEIKQALLTAPALGLPDLTKPFELFVDEKQGYAKGVLTQKLGPWRRPVAYLSKKLDPVAAGWPPCLRMVAAIAVLTKDAGKLTMGQPLVILAPHAVEALVKQPPDRWLSNARMTHYQALLLDTDRVQFGPIVALNPATLLPLPEEGLQHDCLDILAEAHGTRPDLTDQPLPDADHTWYTDGSSFLQEGQRKAGAAVTTETEVVWAKALPAGTSAQRAELIALTQALKMAEGKKLNVYTDSRYAFATAHIHGEIYRRRGWLTSEGKEIKNKDEILALLKALFLPKRLSIIHCPGHQKGNRAEARGNRMADQAAREVATRETPETSTLLAGKRTADGSEFEKRTADGSEFESPKKKAKVE

SEQ ID NO: 2515 - protein, 2096 aa, synthetic construct
MPAAKRVKLDGGDKKYSIGLDIGTNSVGWAVITDEYKVPSKKFKVLGNTDRHSIKKNLIGALLFDSGETAEATRLKRTARRRYTRRKNRICYLQEIFSNEMAKVDDSFFHRLEESFLVEEDKKHERHPIFGNIVDEVAYHEKYPTIYHLRKKLVDSTDKADLRLIYLALAHMIKFRGHFLIEGDLNPDNSDVDKLFIQLVQTYNQLFEENPINASGVDAKAILSARLSKSRRLENLIAQLPGEKKNGLFGNLIALSLGLTPNFKSNFDLAEDAKLQLSKDTYDDDLDNLLAQIGDQYADLFLAAKNLSDAILLSDILRVNTEITKAPLSASMIKRYDEHHQDLTLLKALVRQQLPEKYKEIFFDQSKNGYAGYIDGGASQEEFYKFIKPILEKMDGTEELLVKLNREDLLRKQRTFDNGSIPHQIHLGELHAILRRQEDFYPFLKDNREKIEKILTFRIPYYVGPLARGNSRFAWMTRKSEETITPWNFEEVVDKGASAQSFIERMTNFDKNLPNEKVLPKHSLLYEYFTVYNELTKVKYVTEGMRKPAFLSGEQKKAIVDLLFKTNRKVTVKQLKEDYFKKIECFDSVEISGVEDRFNASLGTYHDLLKIIKDKDFLDNEENEDILEDIVLTLTLFEDREMIEERLKTYAHLFDDKVMKQLKRRRYTGWGRLSRKLINGIRDKQSGKTILDFLKSDGFANRNFMQLIHDDSLTFKEDIQKAQVSGQGDSLHEHIANLAGSPAIKKGILQTVKVVDELVKVMGRHKPENIVIEMARENQTTQKGQKNSRERMKRIEEGIKELGSQILKEHPVENTQLQNEKLYLYYLQNGRDMYVDQELDINRLSDYDVDHIVPQSFLKDDSIDNKVLTRSDKARGKSDNVPSEEVVKKMKNYWRQLLNAKLITQRKFDNLTKAERGGLSELDKAGFIKRQLVETRQITKHVAQILDSRMNTKYDENDKLIREVKVITLKSKLVSDFRKDFQFYKVREINNYHHAHDAYLNAVVGTALIKKYPKLESEFVYGDYKVYDVRKMIAKSEQEIGKATAKYFFYSNIMNFFKTEITLANGEIRKRPLIETNGETGEIVWDKGRDFATVRKVLSMPQVNIVKKTEVQTGGFSKESILPKRNSDKLIARKKDWDPKKYGGFDSPTVAYSVLVVAKVEKGKSKKLKSVKELLGITIMERSSFEKNPIDFLEAKGYKEVKKDLIIKLPKYSLFELENGRKRMLASAGELQKGNELALPSKYVNFLYLASHYEKLKGSPEDNEQKQLFVEQHKHYLDEIIEQISEFSKRVILADANLDKVLSAYNKHRDKPIREQAENIIHLFTLTNLGAPAAFKYFDTTIDRKRYTSTKEVLDATLIHQSITGLYETRIDLSQLGGDGGGSSGGGEAAAKGGTLNIEDEYRLHETSKGPDVPLGSTWLSDFPQAWAETGGMGLAVRQAPLIIPLKATSTPVSIKQYPMSQEARLGIKPHIQRLLDQGILVPCQSPWNTPLLPVKKPGTNDYRPVQDLREVNKRVEDIHPTVPNPYNLLSGLPPSHQWYTVLDLKDAFFCLRLHPTSQSLFAFEWRDPEMGISGQLTWTRLPQGFKNSPTLFNEALHRDLADFRIQHPDLILLQYVDDLLLAATSELDCQQGTRALLQTLGDLGYRASAKKAQICQKQVKYLGYLLKEGQRWLTEARKETVMGQPTPKTPRQLREFLGKAGFCRLFIPGFAEMAAPLYPLTKPGTLFEWGPDQQKAYQEIKQALLTAPALGLPDLTKPFELFVDEKQGYAKGVLTQKLGPWRRPVAYLSKKLDPVAAGWPPCLRMVAAIAVLTKDAGKLTMGQPLVILAPHAVEALVKQPPDRWLSNARMTHYQALLLDTDRVQFGPIVALNPATLLPLPEEGLQHDCLDILAEAHGTRPDLTDQPLPDADHTWYTDGSSFLQEGQRKAGAAVTTETEVVWAKALPAGTSAQRAELIALTQALKMAEGKKLNVYTDSRYAFATAHIHGEIYRRRGWLTSEGKEIKNKDEILALLKALFLPKRLSIIHCPGHQKGNRAEARGNRMADQAAREVATRETPETSTLLAGKRTADGSEFEKRTADGSEFESPKKKAKVE

SEQ ID NO: 2516 - protein, 2100 aa, synthetic construct
MPAAKRVKLDGGDKKYSIGLDIGTNSVGWAVITDEYKVPSKKFKVLGNTDRHSIKKNLIGALLFDSGETAEATRLKRTARRRYTRRKNRICYLQEIFSNEMAKVDDSFFHRLEESFLVEEDKKHERHPIFGNIVDEVAYHEKYPTIYHLRKKLVDSTDKADLRLIYLALAHMIKFRGHFLIEGDLNPDNSDVDKLFIQLVQTYNQLFEENPINASGVDAKAILSARLSKSRRLENLIAQLPGEKKNGLFGNLIALSLGLTPNFKSNFDLAEDAKLQLSKDTYDDDLDNLLAQIGDQYADLFLAAKNLSDAILLSDILRVNTEITKAPLSASMIKRYDEHHQDLTLLKALVRQQLPEKYKEIFFDQSKNGYAGYIDGGASQEEFYKFIKPILEKMDGTEELLVKLNREDLLRKQRTFDNGSIPHQIHLGELHAILRRQEDFYPFLKDNREKIEKILTFRIPYYVGPLARGNSRFAWMTRKSEETITPWNFEEVVDKGASAQSFIERMTNFDKNLPNEKVLPKHSLLYEYFTVYNELTKVKYVTEGMRKPAFLSGEQKKAIVDLLFKTNRKVTVKQLKEDYFKKIECFDSVEISGVEDRFNASLGTYHDLLKIIKDKDFLDNEENEDILEDIVLTLTLFEDREMIEERLKTYAHLFDDKVMKQLKRRRYTGWGRLSRKLINGIRDKQSGKTILDFLKSDGFANRNFMQLIHDDSLTFKEDIQKAQVSGQGDSLHEHIANLAGSPAIKKGILQTVKVVDELVKVMGRHKPENIVIEMARENQTTQKGQKNSRERMKRIEEGIKELGSQILKEHPVENTQLQNEKLYLYYLQNGRDMYVDQELDINRLSDYDVDHIVPQSFLKDDSIDNKVLTRSDKARGKSDNVPSEEVVKKMKNYWRQLLNAKLITQRKFDNLTKAERGGLSELDKAGFIKRQLVETRQITKHVAQILDSRMNTKYDENDKLIREVKVITLKSKLVSDFRKDFQFYKVREINNYHHAHDAYLNAVVGTALIKKYPKLESEFVYGDYKVYDVRKMIAKSEQEIGKATAKYFFYSNIMNFFKTEITLANGEIRKRPLIETNGETGEIVWDKGRDFATVRKVLSMPQVNIVKKTEVQTGGFSKESILPKRNSDKLIARKKDWDPKKYGGFDSPTVAYSVLVVAKVEKGKSKKLKSVKELLGITIMERSSFEKNPIDFLEAKGYKEVKKDLIIKLPKYSLFELENGRKRMLASAGELQKGNELALPSKYVNFLYLASHYEKLKGSPEDNEQKQLFVEQHKHYLDEIIEQISEFSKRVILADANLDKVLSAYNKHRDKPIREQAENIIHLFTLTNLGAPAAFKYFDTTIDRKRYTSTKEVLDATLIHQSITGLYETRIDLSQLGGDGGGGGGSGGGGSGGGGSGGTLNIEDEYRLHETSKGPDVPLGSTWLSDFPQAWAETGGMGLAVRQAPLIIPLKATSTPVSIKQYPMSQEARLGIKPHIQRLLDQGILVPCQSPWNTPLLPVKKPGTNDYRPVQDLREVNKRVEDIHPTVPNPYNLLSGLPPSHQWYTVLDLKDAFFCLRLHPTSQSLFAFEWRDPEMGISGQLTWTRLPQGFKNSPTLFNEALHRDLADFRIQHPDLILLQYVDDLLLAATSELDCQQGTRALLQTLGDLGYRASAKKAQICQKQVKYLGYLLKEGQRWLTEARKETVMGQPTPKTPRQLREFLGKAGFCRLFIPGFAEMAAPLYPLTKPGTLFEWGPDQQKAYQEIKQALLTAPALGLPDLTKPFELFVDEKQGYAKGVLTQKLGPWRRPVAYLSKKLDPVAAGWPPCLRMVAAIAVLTKDAGKLTMGQPLVILAPHAVEALVKQPPDRWLSNARMTHYQALLLDTDRVQFGPIVALNPATLLPLPEEGLQHDCLDILAEAHGTRPDLTDQPLPDADHTWYTDGSSFLQEGQRKAGAAVTTETEVVWAKALPAGTSAQRAELIALTQALKMAEGKKLNVYTDSRYAFATAHIHGEIYRRRGWLTSEGKEIKNKDEILALLKALFLPKRLSIIHCPGHQKGNRAEARGNRMADQAAREVATRETPETSTLLAGKRTADGSEFEKRTADGSEFESPKKKAKVE

SEQ ID NO: 2517 - protein, 2093 aa, synthetic construct
MPAAKRVKLDGGDKKYSIGLDIGTNSVGWAVITDEYKVPSKKFKVLGNTDRHSIKKNLIGALLFDSGETAEATRLKRTARRRYTRRKNRICYLQEIFSNEMAKVDDSFFHRLEESFLVEEDKKHERHPIFGNIVDEVAYHEKYPTIYHLRKKLVDSTDKADLRLIYLALAHMIKFRGHFLIEGDLNPDNSDVDKLFIQLVQTYNQLFEENPINASGVDAKAILSARLSKSRRLENLIAQLPGEKKNGLFGNLIALSLGLTPNFKSNFDLAEDAKLQLSKDTYDDDLDNLLAQIGDQYADLFLAAKNLSDAILLSDILRVNTEITKAPLSASMIKRYDEHHQDLTLLKALVRQQLPEKYKEIFFDQSKNGYAGYIDGGASQEEFYKFIKPILEKMDGTEELLVKLNREDLLRKQRTFDNGSIPHQIHLGELHAILRRQEDFYPFLKDNREKIEKILTFRIPYYVGPLARGNSRFAWMTRKSEETITPWNFEEVVDKGASAQSFIERMTNFDKNLPNEKVLPKHSLLYEYFTVYNELTKVKYVTEGMRKPAFLSGEQKKAIVDLLFKTNRKVTVKQLKEDYFKKIECFDSVEISGVEDRFNASLGTYHDLLKIIKDKDFLDNEENEDILEDIVLTLTLFEDREMIEERLKTYAHLFDDKVMKQLKRRRYTGWGRLSRKLINGIRDKQSGKTILDFLKSDGFANRNFMQLIHDDSLTFKEDIQKAQVSGQGDSLHEHIANLAGSPAIKKGILQTVKVVDELVKVMGRHKPENIVIEMARENQTTQKGQKNSRERMKRIEEGIKELGSQILKEHPVENTQLQNEKLYLYYLQNGRDMYVDQELDINRLSDYDVDHIVPQSFLKDDSIDNKVLTRSDKARGKSDNVPSEEVVKKMKNYWRQLLNAKLITQRKFDNLTKAERGGLSELDKAGFIKRQLVETRQITKHVAQILDSRMNTKYDENDKLIREVKVITLKSKLVSDFRKDFQFYKVREINNYHHAHDAYLNAVVGTALIKKYPKLESEFVYGDYKVYDVRKMIAKSEQEIGKATAKYFFYSNIMNFFKTEITLANGEIRKRPLIETNGETGEIVWDKGRDFATVRKVLSMPQVNIVKKTEVQTGGFSKESILPKRNSDKLIARKKDWDPKKYGGFDSPTVAYSVLVVAKVEKGKSKKLKSVKELLGITIMERSSFEKNPIDFLEAKGYKEVKKDLIIKLPKYSLFELENGRKRMLASAGELQKGNELALPSKYVNFLYLASHYEKLKGSPEDNEQKQLFVEQHKHYLDEIIEQISEFSKRVILADANLDKVLSAYNKHRDKPIREQAENIIHLFTLTNLGAPAAFKYFDTTIDRKRYTSTKEVLDATLIHQSITGLYETRIDLSQLGGDGGEAAAKGGGGGTLNIEDEYRLHETSKGPDVPLGSTWLSDFPQAWAETGGMGLAVRQAPLIIPLKATSTPVSIKQYPMSQEARLGIKPHIQRLLDQGILVPCQSPWNTPLLPVKKPGTNDYRPVQDLREVNKRVEDIHPTVPNPYNLLSGLPPSHQWYTVLDLKDAFFCLRLHPTSQSLFAFEWRDPEMGISGQLTWTRLPQGFKNSPTLFNEALHRDLADFRIQHPDLILLQYVDDLLLAATSELDCQQGTRALLQTLGDLGYRASAKKAQICQKQVKYLGYLLKEGQRWLTEARKETVMGQPTPKTPRQLREFLGKAGFCRLFIPGFAEMAAPLYPLTKPGTLFEWGPDQQKAYQEIKQALLTAPALGLPDLTKPFELFVDEKQGYAKGVLTQKLGPWRRPVAYLSKKLDPVAAGWPPCLRMVAAIAVLTKDAGKLTMGQPLVILAPHAVEALVKQPPDRWLSNARMTHYQALLLDTDRVQFGPIVALNPATLLPLPEEGLQHDCLDILAEAHGTRPDLTDQPLPDADHTWYTDGSSFLQEGQRKAGAAVTTETEVVWAKALPAGTSAQRAELIALTQALKMAEGKKLNVYTDSRYAFATAHIHGEIYRRRGWLTSEGKEIKNKDEILALLKALFLPKRLSIIHCPGHQKGNRAEARGNRMADQAAREVATRETPETSTLLAGKRTADGSEFEKRTADGSEFESPKKKAKVE

SEQ ID NO: 2518 - protein, 2101 aa, synthetic construct
MPAAKRVKLDGGDKKYSIGLDIGTNSVGWAVITDEYKVPSKKFKVLGNTDRHSIKKNLIGALLFDSGETAEATRLKRTARRRYTRRKNRICYLQEIFSNEMAKVDDSFFHRLEESFLVEEDKKHERHPIFGNIVDEVAYHEKYPTIYHLRKKLVDSTDKADLRLIYLALAHMIKFRGHFLIEGDLNPDNSDVDKLFIQLVQTYNQLFEENPINASGVDAKAILSARLSKSRRLENLIAQLPGEKKNGLFGNLIALSLGLTPNFKSNFDLAEDAKLQLSKDTYDDDLDNLLAQIGDQYADLFLAAKNLSDAILLSDILRVNTEITKAPLSASMIKRYDEHHQDLTLLKALVRQQLPEKYKEIFFDQSKNGYAGYIDGGASQEEFYKFIKPILEKMDGTEELLVKLNREDLLRKQRTFDNGSIPHQIHLGELHAILRRQEDFYPFLKDNREKIEKILTFRIPYYVGPLARGNSRFAWMTRKSEETITPWNFEEVVDKGASAQSFIERMTNFDKNLPNEKVLPKHSLLYEYFTVYNELTKVKYVTEGMRKPAFLSGEQKKAIVDLLFKTNRKVTVKQLKEDYFKKIECFDSVEISGVEDRFNASLGTYHDLLKIIKDKDFLDNEENEDILEDIVLTLTLFEDREMIEERLKTYAHLFDDKVMKQLKRRRYTGWGRLSRKLINGIRDKQSGKTILDFLKSDGFANRNFMQLIHDDSLTFKEDIQKAQVSGQGDSLHEHIANLAGSPAIKKGILQTVKVVDELVKVMGRHKPENIVIEMARENQTTQKGQKNSRERMKRIEEGIKELGSQILKEHPVENTQLQNEKLYLYYLQNGRDMYVDQELDINRLSDYDVDHIVPQSFLKDDSIDNKVLTRSDKARGKSDNVPSEEVVKKMKNYWRQLLNAKLITQRKFDNLTKAERGGLSELDKAGFIKRQLVETRQITKHVAQILDSRMNTKYDENDKLIREVKVITLKSKLVSDFRKDFQFYKVREINNYHHAHDAYLNAVVGTALIKKYPKLESEFVYGDYKVYDVRKMIAKSEQEIGKATAKYFFYSNIMNFFKTEITLANGEIRKRPLIETNGETGEIVWDKGRDFATVRKVLSMPQVNIVKKTEVQTGGFSKESILPKRNSDKLIARKKDWDPKKYGGFDSPTVAYSVLVVAKVEKGKSKKLKSVKELLGITIMERSSFEKNPIDFLEAKGYKEVKKDLIIKLPKYSLFELENGRKRMLASAGELQKGNELALPSKYVNFLYLASHYEKLKGSPEDNEQKQLFVEQHKHYLDEIIEQISEFSKRVILADANLDKVLSAYNKHRDKPIREQAENIIHLFTLTNLGAPAAFKYFDTTIDRKRYTSTKEVLDATLIHQSITGLYETRIDLSQLGGDGGSGSETPGTSESATPESGGTLNIEDEYRLHETSKGPDVPLGSTWLSDFPQAWAETGGMGLAVRQAPLIIPLKATSTPVSIKQYPMSQEARLGIKPHIQRLLDQGILVPCQSPWNTPLLPVKKPGTNDYRPVQDLREVNKRVEDIHPTVPNPYNLLSGLPPSHQWYTVLDLKDAFFCLRLHPTSQSLFAFEWRDPEMGISGQLTWTRLPQGFKNSPTLFNEALHRDLADFRIQHPDLILLQYVDDLLLAATSELDCQQGTRALLQTLGDLGYRASAKKAQICQKQVKYLGYLLKEGQRWLTEARKETVMGQPTPKTPRQLREFLGKAGFCRLFIPGFAEMAAPLYPLTKPGTLFEWGPDQQKAYQEIKQALLTAPALGLPDLTKPFELFVDEKQGYAKGVLTQKLGPWRRPVAYLSKKLDPVAAGWPPCLRMVAAIAVLTKDAGKLTMGQPLVILAPHAVEALVKQPPDRWLSNARMTHYQALLLDTDRVQFGPIVALNPATLLPLPEEGLQHDCLDILAEAHGTRPDLTDQPLPDADHTWYTDGSSFLQEGQRKAGAAVTTETEVVWAKALPAGTSAQRAELIALTQALKMAEGKKLNVYTDSRYAFATAHIHGEIYRRRGWLTSEGKEIKNKDEILALLKALFLPKRLSIIHCPGHQKGNRAEARGNRMADQAAREVATRETPETSTLLAGKRTADGSEFEKRTADGSEFESPKKKAKVE

SEQ ID NO: 2519 - protein, 2096 aa, synthetic construct
MPAAKRVKLDGGDKKYSIGLDIGTNSVGWAVITDEYKVPSKKFKVLGNTDRHSIKKNLIGALLFDSGETAEATRLKRTARRRYTRRKNRICYLQEIFSNEMAKVDDSFFHRLEESFLVEEDKKHERHPIFGNIVDEVAYHEKYPTIYHLRKKLVDSTDKADLRLIYLALAHMIKFRGHFLIEGDLNPDNSDVDKLFIQLVQTYNQLFEENPINASGVDAKAILSARLSKSRRLENLIAQLPGEKKNGLFGNLIALSLGLTPNFKSNFDLAEDAKLQLSKDTYDDDLDNLLAQIGDQYADLFLAAKNLSDAILLSDILRVNTEITKAPLSASMIKRYDEHHQDLTLLKALVRQQLPEKYKEIFFDQSKNGYAGYIDGGASQEEFYKFIKPILEKMDGTEELLVKLNREDLLRKQRTFDNGSIPHQIHLGELHAILRRQEDFYPFLKDNREKIEKILTFRIPYYVGPLARGNSRFAWMTRKSEETITPWNFEEVVDKGASAQSFIERMTNFDKNLPNEKVLPKHSLLYEYFTVYNELTKVKYVTEGMRKPAFLSGEQKKAIVDLLFKTNRKVTVKQLKEDYFKKIECFDSVEISGVEDRFNASLGTYHDLLKIIKDKDFLDNEENEDILEDIVLTLTLFEDREMIEERLKTYAHLFDDKVMKQLKRRRYTGWGRLSRKLINGIRDKQSGKTILDFLKSDGFANRNFMQLIHDDSLTFKEDIQKAQVSGQGDSLHEHIANLAGSPAIKKGILQTVKVVDELVKVMGRHKPENIVIEMARENQTTQKGQKNSRERMKRIEEGIKELGSQILKEHPVENTQLQNEKLYLYYLQNGRDMYVDQELDINRLSDYDVDHIVPQSFLKDDSIDNKVLTRSDKARGKSDNVPSEEVVKKMKNYWRQLLNAKLITQRKFDNLTKAERGGLSELDKAGFIKRQLVETRQITKHVAQILDSRMNTKYDENDKLIREVKVITLKSKLVSDFRKDFQFYKVREINNYHHAHDAYLNAVVGTALIKKYPKLESEFVYGDYKVYDVRKMIAKSEQEIGKATAKYFFYSNIMNFFKTEITLANGEIRKRPLIETNGETGEIVWDKGRDFATVRKVLSMPQVNIVKKTEVQTGGFSKESILPKRNSDKLIARKKDWDPKKYGGFDSPTVAYSVLVVAKVEKGKSKKLKSVKELLGITIMERSSFEKNPIDFLEAKGYKEVKKDLIIKLPKYSLFELENGRKRMLASAGELQKGNELALPSKYVNFLYLASHYEKLKGSPEDNEQKQLFVEQHKHYLDEIIEQISEFSKRVILADANLDKVLSAYNKHRDKPIREQAENIIHLFTLTNLGAPAAFKYFDTTIDRKRYTSTKEVLDATLIHQSITGLYETRIDLSQLGGDGGEAAAKPAPGSSGGTLNIEDEYRLHETSKGPDVPLGSTWLSDFPQAWAETGGMGLAVRQAPLIIPLKATSTPVSIKQYPMSQEARLGIKPHIQRLLDQGILVPCQSPWNTPLLPVKKPGTNDYRPVQDLREVNKRVEDIHPTVPNPYNLLSGLPPSHQWYTVLDLKDAFFCLRLHPTSQSLFAFEWRDPEMGISGQLTWTRLPQGFKNSPTLFNEALHRDLADFRIQHPDLILLQYVDDLLLAATSELDCQQGTRALLQTLGDLGYRASAKKAQICQKQVKYLGYLLKEGQRWLTEARKETVMGQPTPKTPRQLREFLGKAGFCRLFIPGFAEMAAPLYPLTKPGTLFEWGPDQQKAYQEIKQALLTAPALGLPDLTKPFELFVDEKQGYAKGVLTQKLGPWRRPVAYLSKKLDPVAAGWPPCLRMVAAIAVLTKDAGKLTMGQPLVILAPHAVEALVKQPPDRWLSNARMTHYQALLLDTDRVQFGPIVALNPATLLPLPEEGLQHDCLDILAEAHGTRPDLTDQPLPDADHTWYTDGSSFLQEGQRKAGAAVTTETEVVWAKALPAGTSAQRAELIALTQALKMAEGKKLNVYTDSRYAFATAHIHGEIYRRRGWLTSEGKEIKNKDEILALLKALFLPKRLSIIHCPGHQKGNRAEARGNRMADQAAREVATRETPETSTLLAGKRTADGSEFEKRTADGSEFESPKKKAKVE

SEQ ID NO: 2520 - protein, 2091 aa, synthetic construct
MPAAKRVKLDGGDKKYSIGLDIGTNSVGWAVITDEYKVPSKKFKVLGNTDRHSIKKNLIGALLFDSGETAEATRLKRTARRRYTRRKNRICYLQEIFSNEMAKVDDSFFHRLEESFLVEEDKKHERHPIFGNIVDEVAYHEKYPTIYHLRKKLVDSTDKADLRLIYLALAHMIKFRGHFLIEGDLNPDNSDVDKLFIQLVQTYNQLFEENPINASGVDAKAILSARLSKSRRLENLIAQLPGEKKNGLFGNLIALSLGLTPNFKSNFDLAEDAKLQLSKDTYDDDLDNLLAQIGDQYADLFLAAKNLSDAILLSDILRVNTEITKAPLSASMIKRYDEHHQDLTLLKALVRQQLPEKYKEIFFDQSKNGYAGYIDGGASQEEFYKFIKPILEKMDGTEELLVKLNREDLLRKQRTFDNGSIPHQIHLGELHAILRRQEDFYPFLKDNREKIEKILTFRIPYYVGPLARGNSRFAWMTRKSEETITPWNFEEVVDKGASAQSFIERMTNFDKNLPNEKVLPKHSLLYEYFTVYNELTKVKYVTEGMRKPAFLSGEQKKAIVDLLFKTNRKVTVKQLKEDYFKKIECFDSVEISGVEDRFNASLGTYHDLLKIIKDKDFLDNEENEDILEDIVLTLTLFEDREMIEERLKTYAHLFDDKVMKQLKRRRYTGWGRLSRKLINGIRDKQSGKTILDFLKSDGFANRNFMQLIHDDSLTFKEDIQKAQVSGQGDSLHEHIANLAGSPAIKKGILQTVKVVDELVKVMGRHKPENIVIEMARENQTTQKGQKNSRERMKRIEEGIKELGSQILKEHPVENTQLQNEKLYLYYLQNGRDMYVDQELDINRLSDYDVDHIVPQSFLKDDSIDNKVLTRSDKARGKSDNVPSEEVVKKMKNYWRQLLNAKLITQRKFDNLTKAERGGLSELDKAGFIKRQLVETRQITKHVAQILDSRMNTKYDENDKLIREVKVITLKSKLVSDFRKDFQFYKVREINNYHHAHDAYLNAVVGTALIKKYPKLESEFVYGDYKVYDVRKMIAKSEQEIGKATAKYFFYSNIMNFFKTEITLANGEIRKRPLIETNGETGEIVWDKGRDFATVRKVLSMPQVNIVKKTEVQTGGFSKESILPKRNSDKLIARKKDWDPKKYGGFDSPTVAYSVLVVAKVEKGKSKKLKSVKELLGITIMERSSFEKNPIDFLEAKGYKEVKKDLIIKLPKYSLFELENGRKRMLASAGELQKGNELALPSKYVNFLYLASHYEKLKGSPEDNEQKQLFVEQHKHYLDEIIEQISEFSKRVILADANLDKVLSAYNKHRDKPIREQAENIIHLFTLTNLGAPAAFKYFDTTIDRKRYTSTKEVLDATLIHQSITGLYETRIDLSQLGGDGGGSSGSSGGTLNIEDEYRLHETSKGPDVPLGSTWLSDFPQAWAETGGMGLAVRQAPLIIPLKATSTPVSIKQYPMSQEARLGIKPHIQRLLDQGILVPCQSPWNTPLLPVKKPGTNDYRPVQDLREVNKRVEDIHPTVPNPYNLLSGLPPSHQWYTVLDLKDAFFCLRLHPTSQSLFAFEWRDPEMGISGQLTWTRLPQGFKNSPTLFNEALHRDLADFRIQHPDLILLQYVDDLLLAATSELDCQQGTRALLQTLGDLGYRASAKKAQICQKQVKYLGYLLKEGQRWLTEARKETVMGQPTPKTPRQLREFLGKAGFCRLFIPGFAEMAAPLYPLTKPGTLFEWGPDQQKAYQEIKQALLTAPALGLPDLTKPFELFVDEKQGYAKGVLTQKLGPWRRPVAYLSKKLDPVAAGWPPCLRMVAAIAVLTKDAGKLTMGQPLVILAPHAVEALVKQPPDRWLSNARMTHYQALLLDTDRVQFGPIVALNPATLLPLPEEGLQHDCLDILAEAHGTRPDLTDQPLPDADHTWYTDGSSFLQEGQRKAGAAVTTETEVVWAKALPAGTSAQRAELIALTQALKMAEGKKLNVYTDSRYAFATAHIHGEIYRRRGWLTSEGKEIKNKDEILALLKALFLPKRLSIIHCPGHQKGNRAEARGNRMADQAAREVATRETPETSTLLAGKRTADGSEFEKRTADGSEFESPKKKAKVE

SEQ ID NO: 2521 - protein, 2096 aa, synthetic construct
MPAAKRVKLDGGDKKYSIGLDIGTNSVGWAVITDEYKVPSKKFKVLGNTDRHSIKKNLIGALLFDSGETAEATRLKRTARRRYTRRKNRICYLQEIFSNEMAKVDDSFFHRLEESFLVEEDKKHERHPIFGNIVDEVAYHEKYPTIYHLRKKLVDSTDKADLRLIYLALAHMIKFRGHFLIEGDLNPDNSDVDKLFIQLVQTYNQLFEENPINASGVDAKAILSARLSKSRRLENLIAQLPGEKKNGLFGNLIALSLGLTPNFKSNFDLAEDAKLQLSKDTYDDDLDNLLAQIGDQYADLFLAAKNLSDAILLSDILRVNTEITKAPLSASMIKRYDEHHQDLTLLKALVRQQLPEKYKEIFFDQSKNGYAGYIDGGASQEEFYKFIKPILEKMDGTEELLVKLNREDLLRKQRTFDNGSIPHQIHLGELHAILRRQEDFYPFLKDNREKIEKILTFRIPYYVGPLARGNSRFAWMTRKSEETITPWNFEEVVDKGASAQSFIERMTNFDKNLPNEKVLPKHSLLYEYFTVYNELTKVKYVTEGMRKPAFLSGEQKKAIVDLLFKTNRKVTVKQLKEDYFKKIECFDSVEISGVEDRFNASLGTYHDLLKIIKDKDFLDNEENEDILEDIVLTLTLFEDREMIEERLKTYAHLFDDKVMKQLKRRRYTGWGRLSRKLINGIRDKQSGKTILDFLKSDGFANRNFMQLIHDDSLTFKEDIQKAQVSGQGDSLHEHIANLAGSPAIKKGILQTVKVVDELVKVMGRHKPENIVIEMARENQTTQKGQKNSRERMKRIEEGIKELGSQILKEHPVENTQLQNEKLYLYYLQNGRDMYVDQELDINRLSDYDVDHIVPQSFLKDDSIDNKVLTRSDKARGKSDNVPSEEVVKKMKNYWRQLLNAKLITQRKFDNLTKAERGGLSELDKAGFIKRQLVETRQITKHVAQILDSRMNTKYDENDKLIREVKVITLKSKLVSDFRKDFQFYKVREINNYHHAHDAYLNAVVGTALIKKYPKLESEFVYGDYKVYDVRKMIAKSEQEIGKATAKYFFYSNIMNFFKTEITLANGEIRKRPLIETNGETGEIVWDKGRDFATVRKVLSMPQVNIVKKTEVQTGGFSKESILPKRNSDKLIARKKDWDPKKYGGFDSPTVAYSVLVVAKVEKGKSKKLKSVKELLGITIMERSSFEKNPIDFLEAKGYKEVKKDLIIKLPKYSLFELENGRKRMLASAGELQKGNELALPSKYVNFLYLASHYEKLKGSPEDNEQKQLFVEQHKHYLDEIIEQISEFSKRVILADANLDKVLSAYNKHRDKPIREQAENIIHLFTLTNLGAPAAFKYFDTTIDRKRYTSTKEVLDATLIHQSITGLYETRIDLSQLGGDGGGGGEAAAKGGSGGTLNIEDEYRLHETSKGPDVPLGSTWLSDFPQAWAETGGMGLAVRQAPLIIPLKATSTPVSIKQYPMSQEARLGIKPHIQRLLDQGILVPCQSPWNTPLLPVKKPGTNDYRPVQDLREVNKRVEDIHPTVPNPYNLLSGLPPSHQWYTVLDLKDAFFCLRLHPTSQSLFAFEWRDPEMGISGQLTWTRLPQGFKNSPTLFNEALHRDLADFRIQHPDLILLQYVDDLLLAATSELDCQQGTRALLQTLGDLGYRASAKKAQICQKQVKYLGYLLKEGQRWLTEARKETVMGQPTPKTPRQLREFLGKAGFCRLFIPGFAEMAAPLYPLTKPGTLFEWGPDQQKAYQEIKQALLTAPALGLPDLTKPFELFVDEKQGYAKGVLTQKLGPWRRPVAYLSKKLDPVAAGWPPCLRMVAAIAVLTKDAGKLTMGQPLVILAPHAVEALVKQPPDRWLSNARMTHYQALLLDTDRVQFGPIVALNPATLLPLPEEGLQHDCLDILAEAHGTRPDLTDQPLPDADHTWYTDGSSFLQEGQRKAGAAVTTETEVVWAKALPAGTSAQRAELIALTQALKMAEGKKLNVYTDSRYAFATAHIHGEIYRRRGWLTSEGKEIKNKDEILALLKALFLPKRLSIIHCPGHQKGNRAEARGNRMADQAAREVATRETPETSTLLAGKRTADGSEFEKRTADGSEFESPKKKAKVE

SEQ ID NO: 2522 - protein, 2105 aa, synthetic construct
MPAAKRVKLDGGDKKYSIGLDIGTNSVGWAVITDEYKVPSKKFKVLGNTDRHSIKKNLIGALLFDSGETAEATRLKRTARRRYTRRKNRICYLQEIFSNEMAKVDDSFFHRLEESFLVEEDKKHERHPIFGNIVDEVAYHEKYPTIYHLRKKLVDSTDKADLRLIYLALAHMIKFRGHFLIEGDLNPDNSDVDKLFIQLVQTYNQLFEENPINASGVDAKAILSARLSKSRRLENLIAQLPGEKKNGLFGNLIALSLGLTPNFKSNFDLAEDAKLQLSKDTYDDDLDNLLAQIGDQYADLFLAAKNLSDAILLSDILRVNTEITKAPLSASMIKRYDEHHQDLTLLKALVRQQLPEKYKEIFFDQSKNGYAGYIDGGASQEEFYKFIKPILEKMDGTEELLVKLNREDLLRKQRTFDNGSIPHQIHLGELHAILRRQEDFYPFLKDNREKIEKILTFRIPYYVGPLARGNSRFAWMTRKSEETITPWNFEEVVDKGASAQSFIERMTNFDKNLPNEKVLPKHSLLYEYFTVYNELTKVKYVTEGMRKPAFLSGEQKKAIVDLLFKTNRKVTVKQLKEDYFKKIECFDSVEISGVEDRFNASLGTYHDLLKIIKDKDFLDNEENEDILEDIVLTLTLFEDREMIEERLKTYAHLFDDKVMKQLKRRRYTGWGRLSRKLINGIRDKQSGKTILDFLKSDGFANRNFMQLIHDDSLTFKEDIQKAQVSGQGDSLHEHIANLAGSPAIKKGILQTVKVVDELVKVMGRHKPENIVIEMARENQTTQKGQKNSRERMKRIEEGIKELGSQILKEHPVENTQLQNEKLYLYYLQNGRDMYVDQELDINRLSDYDVDHIVPQSFLKDDSIDNKVLTRSDKARGKSDNVPSEEVVKKMKNYWRQLLNAKLITQRKFDNLTKAERGGLSELDKAGFIKRQLVETRQITKHVAQILDSRMNTKYDENDKLIREVKVITLKSKLVSDFRKDFQFYKVREINNYHHAHDAYLNAVVGTALIKKYPKLESEFVYGDYKVYDVRKMIAKSEQEIGKATAKYFFYSNIMNFFKTEITLANGEIRKRPLIETNGETGEIVWDKGRDFATVRKVLSMPQVNIVKKTEVQTGGFSKESILPKRNSDKLIARKKDWDPKKYGGFDSPTVAYSVLVVAKVEKGKSKKLKSVKELLGITIMERSSFEKNPIDFLEAKGYKEVKKDLIIKLPKYSLFELENGRKRMLASAGELQKGNELALPSKYVNFLYLASHYEKLKGSPEDNEQKQLFVEQHKHYLDEIIEQISEFSKRVILADANLDKVLSAYNKHRDKPIREQAENIIHLFTLTNLGAPAAFKYFDTTIDRKRYTSTKEVLDATLIHQSITGLYETRIDLSQLGGDGGEAAAKEAAAKEAAAKEAAAKGGTLNIEDEYRLHETSKGPDVPLGSTWLSDFPQAWAETGGMGLAVRQAPLIIPLKATSTPVSIKQYPMSQEARLGIKPHIQRLLDQGILVPCQSPWNTPLLPVKKPGTNDYRPVQDLREVNKRVEDIHPTVPNPYNLLSGLPPSHQWYTVLDLKDAFFCLRLHPTSQSLFAFEWRDPEMGISGQLTWTRLPQGFKNSPTLFNEALHRDLADFRIQHPDLILLQYVDDLLLAATSELDCQQGTRALLQTLGDLGYRASAKKAQICQKQVKYLGYLLKEGQRWLTEARKETVMGQPTPKTPRQLREFLGKAGFCRLFIPGFAEMAAPLYPLTKPGTLFEWGPDQQKAYQEIKQALLTAPALGLPDLTKPFELFVDEKQGYAKGVLTQKLGPWRRPVAYLSKKLDPVAAGWPPCLRMVAAIAVLTKDAGKLTMGQPLVILAPHAVEALVKQPPDRWLSNARMTHYQALLLDTDRVQFGPIVALNPATLLPLPEEGLQHDCLDILAEAHGTRPDLTDQPLPDADHTWYTDGSSFLQEGQRKAGAAVTTETEVVWAKALPAGTSAQRAELIALTQALKMAEGKKLNVYTDSRYAFATAHIHGEIYRRRGWLTSEGKEIKNKDEILALLKALFLPKRLSIIHCPGHQKGNRAEARGNRMADQAAREVATRETPETSTLLAGKRTADGSEFEKRTADGSEFESPKKKAKVE

SEQ ID NO: 2523 - protein, 2094 aa, synthetic construct
MPAAKRVKLDGGDKKYSIGLDIGTNSVGWAVITDEYKVPSKKFKVLGNTDRHSIKKNLIGALLFDSGETAEATRLKRTARRRYTRRKNRICYLQEIFSNEMAKVDDSFFHRLEESFLVEEDKKHERHPIFGNIVDEVAYHEKYPTIYHLRKKLVDSTDKADLRLIYLALAHMIKFRGHFLIEGDLNPDNSDVDKLFIQLVQTYNQLFEENPINASGVDAKAILSARLSKSRRLENLIAQLPGEKKNGLFGNLIALSLGLTPNFKSNFDLAEDAKLQLSKDTYDDDLDNLLAQIGDQYADLFLAAKNLSDAILLSDILRVNTEITKAPLSASMIKRYDEHHQDLTLLKALVRQQLPEKYKEIFFDQSKNGYAGYIDGGASQEEFYKFIKPILEKMDGTEELLVKLNREDLLRKQRTFDNGSIPHQIHLGELHAILRRQEDFYPFLKDNREKIEKILTFRIPYYVGPLARGNSRFAWMTRKSEETITPWNFEEVVDKGASAQSFIERMTNFDKNLPNEKVLPKHSLLYEYFTVYNELTKVKYVTEGMRKPAFLSGEQKKAIVDLLFKTNRKVTVKQLKEDYFKKIECFDSVEISGVEDRFNASLGTYHDLLKIIKDKDFLDNEENEDILEDIVLTLTLFEDREMIEERLKTYAHLFDDKVMKQLKRRRYTGWGRLSRKLINGIRDKQSGKTILDFLKSDGFANRNFMQLIHDDSLTFKEDIQKAQVSGQGDSLHEHIANLAGSPAIKKGILQTVKVVDELVKVMGRHKPENIVIEMARENQTTQKGQKNSRERMKRIEEGIKELGSQILKEHPVENTQLQNEKLYLYYLQNGRDMYVDQELDINRLSDYDVDHIVPQSFLKDDSIDNKVLTRSDKARGKSDNVPSEEVVKKMKNYWRQLLNAKLITQRKFDNLTKAERGGLSELDKAGFIKRQLVETRQITKHVAQILDSRMNTKYDENDKLIREVKVITLKSKLVSDFRKDFQFYKVREINNYHHAHDAYLNAVVGTALIKKYPKLESEFVYGDYKVYDVRKMIAKSEQEIGKATAKYFFYSNIMNFFKTEITLANGEIRKRPLIETNGETGEIVWDKGRDFATVRKVLSMPQVNIVKKTEVQTGGFSKESILPKRNSDKLIARKKDWDPKKYGGFDSPTVAYSVLVVAKVEKGKSKKLKSVKELLGITIMERSSFEKNPIDFLEAKGYKEVKKDLIIKLPKYSLFELENGRKRMLASAGELQKGNELALPSKYVNFLYLASHYEKLKGSPEDNEQKQLFVEQHKHYLDEIIEQISEFSKRVILADANLDKVLSAYNKHRDKPIREQAENIIHLFTLTNLGAPAAFKYFDTTIDRKRYTSTKEVLDATLIHQSITGLYETRIDLSQLGGDGGGGSGGSGGSGGTLNIEDEYRLHETSKGPDVPLGSTWLSDFPQAWAETGGMGLAVRQAPLIIPLKATSTPVSIKQYPMSQEARLGIKPHIQRLLDQGILVPCQSPWNTPLLPVKKPGTNDYRPVQDLREVNKRVEDIHPTVPNPYNLLSGLPPSHQWYTVLDLKDAFFCLRLHPTSQSLFAFEWRDPEMGISGQLTWTRLPQGFKNSPTLFNEALHRDLADFRIQHPDLILLQYVDDLLLAATSELDCQQGTRALLQTLGDLGYRASAKKAQICQKQVKYLGYLLKEGQRWLTEARKETVMGQPTPKTPRQLREFLGKAGFCRLFIPGFAEMAAPLYPLTKPGTLFEWGPDQQKAYQEIKQALLTAPALGLPDLTKPFELFVDEKQGYAKGVLTQKLGPWRRPVAYLSKKLDPVAAGWPPCLRMVAAIAVLTKDAGKLTMGQPLVILAPHAVEALVKQPPDRWLSNARMTHYQALLLDTDRVQFGPIVALNPATLLPLPEEGLQHDCLDILAEAHGTRPDLTDQPLPDADHTWYTDGSSFLQEGQRKAGAAVTTETEVVWAKALPAGTSAQRAELIALTQALKMAEGKKLNVYTDSRYAFATAHIHGEIYRRRGWLTSEGKEIKNKDEILALLKALFLPKRLSIIHCPGHQKGNRAEARGNRMADQAAREVATRETPETSTLLAGKRTADGSEFEKRTADGSEFESPKKKAKVE

SEQ ID NO: 2524 - protein, 2088 aa, synthetic construct
MPAAKRVKLDGGDKKYSIGLDIGTNSVGWAVITDEYKVPSKKFKVLGNTDRHSIKKNLIGALLFDSGETAEATRLKRTARRRYTRRKNRICYLQEIFSNEMAKVDDSFFHRLEESFLVEEDKKHERHPIFGNIVDEVAYHEKYPTIYHLRKKLVDSTDKADLRLIYLALAHMIKFRGHFLIEGDLNPDNSDVDKLFIQLVQTYNQLFEENPINASGVDAKAILSARLSKSRRLENLIAQLPGEKKNGLFGNLIALSLGLTPNFKSNFDLAEDAKLQLSKDTYDDDLDNLLAQIGDQYADLFLAAKNLSDAILLSDILRVNTEITKAPLSASMIKRYDEHHQDLTLLKALVRQQLPEKYKEIFFDQSKNGYAGYIDGGASQEEFYKFIKPILEKMDGTEELLVKLNREDLLRKQRTFDNGSIPHQIHLGELHAILRRQEDFYPFLKDNREKIEKILTFRIPYYVGPLARGNSRFAWMTRKSEETITPWNFEEVVDKGASAQSFIERMTNFDKNLPNEKVLPKHSLLYEYFTVYNELTKVKYVTEGMRKPAFLSGEQKKAIVDLLFKTNRKVTVKQLKEDYFKKIECFDSVEISGVEDRFNASLGTYHDLLKIIKDKDFLDNEENEDILEDIVLTLTLFEDREMIEERLKTYAHLFDDKVMKQLKRRRYTGWGRLSRKLINGIRDKQSGKTILDFLKSDGFANRNFMQLIHDDSLTFKEDIQKAQVSGQGDSLHEHIANLAGSPAIKKGILQTVKVVDELVKVMGRHKPENIVIEMARENQTTQKGQKNSRERMKRIEEGIKELGSQILKEHPVENTQLQNEKLYLYYLQNGRDMYVDQELDINRLSDYDVDHIVPQSFLKDDSIDNKVLTRSDKARGKSDNVPSEEVVKKMKNYWRQLLNAKLITQRKFDNLTKAERGGLSELDKAGFIKRQLVETRQITKHVAQILDSRMNTKYDENDKLIREVKVITLKSKLVSDFRKDFQFYKVREINNYHHAHDAYLNAVVGTALIKKYPKLESEFVYGDYKVYDVRKMIAKSEQEIGKATAKYFFYSNIMNFFKTEITLANGEIRKRPLIETNGETGEIVWDKGRDFATVRKVLSMPQVNIVKKTEVQTGGFSKESILPKRNSDKLIARKKDWDPKKYGGFDSPTVAYSVLVVAKVEKGKSKKLKSVKELLGITIMERSSFEKNPIDFLEAKGYKEVKKDLIIKLPKYSLFELENGRKRMLASAGELQKGNELALPSKYVNFLYLASHYEKLKGSPEDNEQKQLFVEQHKHYLDEIIEQISEFSKRVILADANLDKVLSAYNKHRDKPIREQAENIIHLFTLTNLGAPAAFKYFDTTIDRKRYTSTKEVLDATLIHQSITGLYETRIDLSQLGGDGGPAPGGTLNIEDEYRLHETSKGPDVPLGSTWLSDFPQAWAETGGMGLAVRQAPLIIPLKATSTPVSIKQYPMSQEARLGIKPHIQRLLDQGILVPCQSPWNTPLLPVKKPGTNDYRPVQDLREVNKRVEDIHPTVPNPYNLLSGLPPSHQWYTVLDLKDAFFCLRLHPTSQSLFAFEWRDPEMGISGQLTWTRLPQGFKNSPTLFNEALHRDLADFRIQHPDLILLQYVDDLLLAATSELDCQQGTRALLQTLGDLGYRASAKKAQICQKQVKYLGYLLKEGQRWLTEARKETVMGQPTPKTPRQLREFLGKAGFCRLFIPGFAEMAAPLYPLTKPGTLFEWGPDQQKAYQEIKQALLTAPALGLPDLTKPFELFVDEKQGYAKGVLTQKLGPWRRPVAYLSKKLDPVAAGWPPCLRMVAAIAVLTKDAGKLTMGQPLVILAPHAVEALVKQPPDRWLSNARMTHYQALLLDTDRVQFGPIVALNPATLLPLPEEGLQHDCLDILAEAHGTRPDLTDQPLPDADHTWYTDGSSFLQEGQRKAGAAVTTETEVVWAKALPAGTSAQRAELIALTQALKMAEGKKLNVYTDSRYAFATAHIHGEIYRRRGWLTSEGKEIKNKDEILALLKALFLPKRLSIIHCPGHQKGNRAEARGNRMADQAAREVATRETPETSTLLAGKRTADGSEFEKRTADGSEFESPKKKAKVE

SEQ ID NO: 2525 - protein, 2094 aa, synthetic construct
MPAAKRVKLDGGDKKYSIGLDIGTNSVGWAVITDEYKVPSKKFKVLGNTDRHSIKKNLIGALLFDSGETAEATRLKRTARRRYTRRKNRICYLQEIFSNEMAKVDDSFFHRLEESFLVEEDKKHERHPIFGNIVDEVAYHEKYPTIYHLRKKLVDSTDKADLRLIYLALAHMIKFRGHFLIEGDLNPDNSDVDKLFIQLVQTYNQLFEENPINASGVDAKAILSARLSKSRRLENLIAQLPGEKKNGLFGNLIALSLGLTPNFKSNFDLAEDAKLQLSKDTYDDDLDNLLAQIGDQYADLFLAAKNLSDAILLSDILRVNTEITKAPLSASMIKRYDEHHQDLTLLKALVRQQLPEKYKEIFFDQSKNGYAGYIDGGASQEEFYKFIKPILEKMDGTEELLVKLNREDLLRKQRTFDNGSIPHQIHLGELHAILRRQEDFYPFLKDNREKIEKILTFRIPYYVGPLARGNSRFAWMTRKSEETITPWNFEEVVDKGASAQSFIERMTNFDKNLPNEKVLPKHSLLYEYFTVYNELTKVKYVTEGMRKPAFLSGEQKKAIVDLLFKTNRKVTVKQLKEDYFKKIECFDSVEISGVEDRFNASLGTYHDLLKIIKDKDFLDNEENEDILEDIVLTLTLFEDREMIEERLKTYAHLFDDKVMKQLKRRRYTGWGRLSRKLINGIRDKQSGKTILDFLKSDGFANRNFMQLIHDDSLTFKEDIQKAQVSGQGDSLHEHIANLAGSPAIKKGILQTVKVVDELVKVMGRHKPENIVIEMARENQTTQKGQKNSRERMKRIEEGIKELGSQILKEHPVENTQLQNEKLYLYYLQNGRDMYVDQELDINRLSDYDVDHIVPQSFLKDDSIDNKVLTRSDKARGKSDNVPSEEVVKKMKNYWRQLLNAKLITQRKFDNLTKAERGGLSELDKAGFIKRQLVETRQITKHVAQILDSRMNTKYDENDKLIREVKVITLKSKLVSDFRKDFQFYKVREINNYHHAHDAYLNAVVGTALIKKYPKLESEFVYGDYKVYDVRKMIAKSEQEIGKATAKYFFYSNIMNFFKTEITLANGEIRKRPLIETNGETGEIVWDKGRDFATVRKVLSMPQVNIVKKTEVQTGGFSKESILPKRNSDKLIARKKDWDPKKYGGFDSPTVAYSVLVVAKVEKGKSKKLKSVKELLGITIMERSSFEKNPIDFLEAKGYKEVKKDLIIKLPKYSLFELENGRKRMLASAGELQKGNELALPSKYVNFLYLASHYEKLKGSPEDNEQKQLFVEQHKHYLDEIIEQISEFSKRVILADANLDKVLSAYNKHRDKPIREQAENIIHLFTLTNLGAPAAFKYFDTTIDRKRYTSTKEVLDATLIHQSITGLYETRIDLSQLGGDGGPAPAPAPAPGGTLNIEDEYRLHETSKGPDVPLGSTWLSDFPQAWAETGGMGLAVRQAPLIIPLKATSTPVSIKQYPMSQEARLGIKPHIQRLLDQGILVPCQSPWNTPLLPVKKPGTNDYRPVQDLREVNKRVEDIHPTVPNPYNLLSGLPPSHQWYTVLDLKDAFFCLRLHPTSQSLFAFEWRDPEMGISGQLTWTRLPQGFKNSPTLFNEALHRDLADFRIQHPDLILLQYVDDLLLAATSELDCQQGTRALLQTLGDLGYRASAKKAQICQKQVKYLGYLLKEGQRWLTEARKETVMGQPTPKTPRQLREFLGKAGFCRLFIPGFAEMAAPLYPLTKPGTLFEWGPDQQKAYQEIKQALLTAPALGLPDLTKPFELFVDEKQGYAKGVLTQKLGPWRRPVAYLSKKLDPVAAGWPPCLRMVAAIAVLTKDAGKLTMGQPLVILAPHAVEALVKQPPDRWLSNARMTHYQALLLDTDRVQFGPIVALNPATLLPLPEEGLQHDCLDILAEAHGTRPDLTDQPLPDADHTWYTDGSSFLQEGQRKAGAAVTTETEVVWAKALPAGTSAQRAELIALTQALKMAEGKKLNVYTDSRYAFATAHIHGEIYRRRGWLTSEGKEIKNKDEILALLKALFLPKRLSIIHCPGHQKGNRAEARGNRMADQAAREVATRETPETSTLLAGKRTADGSEFEKRTADGSEFESPKKKAKVE

SEQ ID NO: 2526 - protein, 2096 aa, synthetic construct
MPAAKRVKLDGGDKKYSIGLDIGTNSVGWAVITDEYKVPSKKFKVLGNTDRHSIKKNLIGALLFDSGETAEATRLKRTARRRYTRRKNRICYLQEIFSNEMAKVDDSFFHRLEESFLVEEDKKHERHPIFGNIVDEVAYHEKYPTIYHLRKKLVDSTDKADLRLIYLALAHMIKFRGHFLIEGDLNPDNSDVDKLFIQLVQTYNQLFEENPINASGVDAKAILSARLSKSRRLENLIAQLPGEKKNGLFGNLIALSLGLTPNFKSNFDLAEDAKLQLSKDTYDDDLDNLLAQIGDQYADLFLAAKNLSDAILLSDILRVNTEITKAPLSASMIKRYDEHHQDLTLLKALVRQQLPEKYKEIFFDQSKNGYAGYIDGGASQEEFYKFIKPILEKMDGTEELLVKLNREDLLRKQRTFDNGSIPHQIHLGELHAILRRQEDFYPFLKDNREKIEKILTFRIPYYVGPLARGNSRFAWMTRKSEETITPWNFEEVVDKGASAQSFIERMTNFDKNLPNEKVLPKHSLLYEYFTVYNELTKVKYVTEGMRKPAFLSGEQKKAIVDLLFKTNRKVTVKQLKEDYFKKIECFDSVEISGVEDRFNASLGTYHDLLKIIKDKDFLDNEENEDILEDIVLTLTLFEDREMIEERLKTYAHLFDDKVMKQLKRRRYTGWGRLSRKLINGIRDKQSGKTILDFLKSDGFANRNFMQLIHDDSLTFKEDIQKAQVSGQGDSLHEHIANLAGSPAIKKGILQTVKVVDELVKVMGRHKPENIVIEMARENQTTQKGQKNSRERMKRIEEGIKELGSQILKEHPVENTQLQNEKLYLYYLQNGRDMYVDQELDINRLSDYDVDHIVPQSFLKDDSIDNKVLTRSDKARGKSDNVPSEEVVKKMKNYWRQLLNAKLITQRKFDNLTKAERGGLSELDKAGFIKRQLVETRQITKHVAQILDSRMNTKYDENDKLIREVKVITLKSKLVSDFRKDFQFYKVREINNYHHAHDAYLNAVVGTALIKKYPKLESEFVYGDYKVYDVRKMIAKSEQEIGKATAKYFFYSNIMNFFKTEITLANGEIRKRPLIETNGETGEIVWDKGRDFATVRKVLSMPQVNIVKKTEVQTGGFSKESILPKRNSDKLIARKKDWDPKKYGGFDSPTVAYSVLVVAKVEKGKSKKLKSVKELLGITIMERSSFEKNPIDFLEAKGYKEVKKDLIIKLPKYSLFELENGRKRMLASAGELQKGNELALPSKYVNFLYLASHYEKLKGSPEDNEQKQLFVEQHKHYLDEIIEQISEFSKRVILADANLDKVLSAYNKHRDKPIREQAENIIHLFTLTNLGAPAAFKYFDTTIDRKRYTSTKEVLDATLIHQSITGLYETRIDLSQLGGDGGGGGEAAAKPAPGGTLNIEDEYRLHETSKGPDVPLGSTWLSDFPQAWAETGGMGLAVRQAPLIIPLKATSTPVSIKQYPMSQEARLGIKPHIQRLLDQGILVPCQSPWNTPLLPVKKPGTNDYRPVQDLREVNKRVEDIHPTVPNPYNLLSGLPPSHQWYTVLDLKDAFFCLRLHPTSQSLFAFEWRDPEMGISGQLTWTRLPQGFKNSPTLFNEALHRDLADFRIQHPDLILLQYVDDLLLAATSELDCQQGTRALLQTLGDLGYRASAKKAQICQKQVKYLGYLLKEGQRWLTEARKETVMGQPTPKTPRQLREFLGKAGFCRLFIPGFAEMAAPLYPLTKPGTLFEWGPDQQKAYQEIKQALLTAPALGLPDLTKPFELFVDEKQGYAKGVLTQKLGPWRRPVAYLSKKLDPVAAGWPPCLRMVAAIAVLTKDAGKLTMGQPLVILAPHAVEALVKQPPDRWLSNARMTHYQALLLDTDRVQFGPIVALNPATLLPLPEEGLQHDCLDILAEAHGTRPDLTDQPLPDADHTWYTDGSSFLQEGQRKAGAAVTTETEVVWAKALPAGTSAQRAELIALTQALKMAEGKKLNVYTDSRYAFATAHIHGEIYRRRGWLTSEGKEIKNKDEILALLKALFLPKRLSIIHCPGHQKGNRAEARGNRMADQAAREVATRETPETSTLLAGKRTADGSEFEKRTADGSEFESPKKKAKVE

SEQ ID NO: 2527 - protein, 2096 aa, synthetic construct
MPAAKRVKLDGGDKKYSIGLDIGTNSVGWAVITDEYKVPSKKFKVLGNTDRHSIKKNLIGALLFDSGETAEATRLKRTARRRYTRRKNRICYLQEIFSNEMAKVDDSFFHRLEESFLVEEDKKHERHPIFGNIVDEVAYHEKYPTIYHLRKKLVDSTDKADLRLIYLALAHMIKFRGHFLIEGDLNPDNSDVDKLFIQLVQTYNQLFEENPINASGVDAKAILSARLSKSRRLENLIAQLPGEKKNGLFGNLIALSLGLTPNFKSNFDLAEDAKLQLSKDTYDDDLDNLLAQIGDQYADLFLAAKNLSDAILLSDILRVNTEITKAPLSASMIKRYDEHHQDLTLLKALVRQQLPEKYKEIFFDQSKNGYAGYIDGGASQEEFYKFIKPILEKMDGTEELLVKLNREDLLRKQRTFDNGSIPHQIHLGELHAILRRQEDFYPFLKDNREKIEKILTFRIPYYVGPLARGNSRFAWMTRKSEETITPWNFEEVVDKGASAQSFIERMTNFDKNLPNEKVLPKHSLLYEYFTVYNELTKVKYVTEGMRKPAFLSGEQKKAIVDLLFKTNRKVTVKQLKEDYFKKIECFDSVEISGVEDRFNASLGTYHDLLKIIKDKDFLDNEENEDILEDIVLTLTLFEDREMIEERLKTYAHLFDDKVMKQLKRRRYTGWGRLSRKLINGIRDKQSGKTILDFLKSDGFANRNFMQLIHDDSLTFKEDIQKAQVSGQGDSLHEHIANLAGSPAIKKGILQTVKVVDELVKVMGRHKPENIVIEMARENQTTQKGQKNSRERMKRIEEGIKELGSQILKEHPVENTQLQNEKLYLYYLQNGRDMYVDQELDINRLSDYDVDHIVPQSFLKDDSIDNKVLTRSDKARGKSDNVPSEEVVKKMKNYWRQLLNAKLITQRKFDNLTKAERGGLSELDKAGFIKRQLVETRQITKHVAQILDSRMNTKYDENDKLIREVKVITLKSKLVSDFRKDFQFYKVREINNYHHAHDAYLNAVVGTALIKKYPKLESEFVYGDYKVYDVRKMIAKSEQEIGKATAKYFFYSNIMNFFKTEITLANGEIRKRPLIETNGETGEIVWDKGRDFATVRKVLSMPQVNIVKKTEVQTGGFSKESILPKRNSDKLIARKKDWDPKKYGGFDSPTVAYSVLVVAKVEKGKSKKLKSVKELLGITIMERSSFEKNPIDFLEAKGYKEVKKDLIIKLPKYSLFELENGRKRMLASAGELQKGNELALPSKYVNFLYLASHYEKLKGSPEDNEQKQLFVEQHKHYLDEIIEQISEFSKRVILADANLDKVLSAYNKHRDKPIREQAENIIHLFTLTNLGAPAAFKYFDTTIDRKRYTSTKEVLDATLIHQSITGLYETRIDLSQLGGDGGGGSPAPEAAAKGGTLNIEDEYRLHETSKGPDVPLGSTWLSDFPQAWAETGGMGLAVRQAPLIIPLKATSTPVSIKQYPMSQEARLGIKPHIQRLLDQGILVPCQSPWNTPLLPVKKPGTNDYRPVQDLREVNKRVEDIHPTVPNPYNLLSGLPPSHQWYTVLDLKDAFFCLRLHPTSQSLFAFEWRDPEMGISGQLTWTRLPQGFKNSPTLFNEALHRDLADFRIQHPDLILLQYVDDLLLAATSELDCQQGTRALLQTLGDLGYRASAKKAQICQKQVKYLGYLLKEGQRWLTEARKETVMGQPTPKTPRQLREFLGKAGFCRLFIPGFAEMAAPLYPLTKPGTLFEWGPDQQKAYQEIKQALLTAPALGLPDLTKPFELFVDEKQGYAKGVLTQKLGPWRRPVAYLSKKLDPVAAGWPPCLRMVAAIAVLTKDAGKLTMGQPLVILAPHAVEALVKQPPDRWLSNARMTHYQALLLDTDRVQFGPIVALNPATLLPLPEEGLQHDCLDILAEAHGTRPDLTDQPLPDADHTWYTDGSSFLQEGQRKAGAAVTTETEVVWAKALPAGTSAQRAELIALTQALKMAEGKKLNVYTDSRYAFATAHIHGEIYRRRGWLTSEGKEIKNKDEILALLKALFLPKRLSIIHCPGHQKGNRAEARGNRMADQAAREVATRETPETSTLLAGKRTADGSEFEKRTADGSEFESPKKKAKVE

SEQ ID NO: 2528 - protein, 2100 aa, synthetic construct
MPAAKRVKLDGGDKKYSIGLDIGTNSVGWAVITDEYKVPSKKFKVLGNTDRHSIKKNLIGALLFDSGETAEATRLKRTARRRYTRRKNRICYLQEIFSNEMAKVDDSFFHRLEESFLVEEDKKHERHPIFGNIVDEVAYHEKYPTIYHLRKKLVDSTDKADLRLIYLALAHMIKFRGHFLIEGDLNPDNSDVDKLFIQLVQTYNQLFEENPINASGVDAKAILSARLSKSRRLENLIAQLPGEKKNGLFGNLIALSLGLTPNFKSNFDLAEDAKLQLSKDTYDDDLDNLLAQIGDQYADLFLAAKNLSDAILLSDILRVNTEITKAPLSASMIKRYDEHHQDLTLLKALVRQQLPEKYKEIFFDQSKNGYAGYIDGGASQEEFYKFIKPILEKMDGTEELLVKLNREDLLRKQRTFDNGSIPHQIHLGELHAILRRQEDFYPFLKDNREKIEKILTFRIPYYVGPLARGNSRFAWMTRKSEETITPWNFEEVVDKGASAQSFIERMTNFDKNLPNEKVLPKHSLLYEYFTVYNELTKVKYVTEGMRKPAFLSGEQKKAIVDLLFKTNRKVTVKQLKEDYFKKIECFDSVEISGVEDRFNASLGTYHDLLKIIKDKDFLDNEENEDILEDIVLTLTLFEDREMIEERLKTYAHLFDDKVMKQLKRRRYTGWGRLSRKLINGIRDKQSGKTILDFLKSDGFANRNFMQLIHDDSLTFKEDIQKAQVSGQGDSLHEHIANLAGSPAIKKGILQTVKVVDELVKVMGRHKPENIVIEMARENQTTQKGQKNSRERMKRIEEGIKELGSQILKEHPVENTQLQNEKLYLYYLQNGRDMYVDQELDINRLSDYDVDHIVPQSFLKDDSIDNKVLTRSDKARGKSDNVPSEEVVKKMKNYWRQLLNAKLITQRKFDNLTKAERGGLSELDKAGFIKRQLVETRQITKHVAQILDSRMNTKYDENDKLIREVKVITLKSKLVSDFRKDFQFYKVREINNYHHAHDAYLNAVVGTALIKKYPKLESEFVYGDYKVYDVRKMIAKSEQEIGKATAKYFFYSNIMNFFKTEITLANGEIRKRPLIETNGETGEIVWDKGRDFATVRKVLSMPQVNIVKKTEVQTGGFSKESILPKRNSDKLIARKKDWDPKKYGGFDSPTVAYSVLVVAKVEKGKSKKLKSVKELLGITIMERSSFEKNPIDFLEAKGYKEVKKDLIIKLPKYSLFELENGRKRMLASAGELQKGNELALPSKYVNFLYLASHYEKLKGSPEDNEQKQLFVEQHKHYLDEIIEQISEFSKRVILADANLDKVLSAYNKHRDKPIREQAENIIHLFTLTNLGAPAAFKYFDTTIDRKRYTSTKEVLDATLIHQSITGLYETRIDLSQLGGDGGGGGGSEAAAKGGGGSGGTLNIEDEYRLHETSKGPDVPLGSTWLSDFPQAWAETGGMGLAVRQAPLIIPLKATSTPVSIKQYPMSQEARLGIKPHIQRLLDQGILVPCQSPWNTPLLPVKKPGTNDYRPVQDLREVNKRVEDIHPTVPNPYNLLSGLPPSHQWYTVLDLKDAFFCLRLHPTSQSLFAFEWRDPEMGISGQLTWTRLPQGFKNSPTLFNEALHRDLADFRIQHPDLILLQYVDDLLLAATSELDCQQGTRALLQTLGDLGYRASAKKAQICQKQVKYLGYLLKEGQRWLTEARKETVMGQPTPKTPRQLREFLGKAGFCRLFIPGFAEMAAPLYPLTKPGTLFEWGPDQQKAYQEIKQALLTAPALGLPDLTKPFELFVDEKQGYAKGVLTQKLGPWRRPVAYLSKKLDPVAAGWPPCLRMVAAIAVLTKDAGKLTMGQPLVILAPHAVEALVKQPPDRWLSNARMTHYQALLLDTDRVQFGPIVALNPATLLPLPEEGLQHDCLDILAEAHGTRPDLTDQPLPDADHTWYTDGSSFLQEGQRKAGAAVTTETEVVWAKALPAGTSAQRAELIALTQALKMAEGKKLNVYTDSRYAFATAHIHGEIYRRRGWLTSEGKEIKNKDEILALLKALFLPKRLSIIHCPGHQKGNRAEARGNRMADQAAREVATRETPETSTLLAGKRTADGSEFEKRTADGSEFESPKKKAKVE

SEQ ID NO: 2529 - protein, 2131 aa, synthetic construct
MPAAKRVKLDGGDKKYSIGLDIGTNSVGWAVITDEYKVPSKKFKVLGNTDRHSIKKNLIGALLFDSGETAEATRLKRTARRRYTRRKNRICYLQEIFSNEMAKVDDSFFHRLEESFLVEEDKKHERHPIFGNIVDEVAYHEKYPTIYHLRKKLVDSTDKADLRLIYLALAHMIKFRGHFLIEGDLNPDNSDVDKLFIQLVQTYNQLFEENPINASGVDAKAILSARLSKSRRLENLIAQLPGEKKNGLFGNLIALSLGLTPNFKSNFDLAEDAKLQLSKDTYDDDLDNLLAQIGDQYADLFLAAKNLSDAILLSDILRVNTEITKAPLSASMIKRYDEHHQDLTLLKALVRQQLPEKYKEIFFDQSKNGYAGYIDGGASQEEFYKFIKPILEKMDGTEELLVKLNREDLLRKQRTFDNGSIPHQIHLGELHAILRRQEDFYPFLKDNREKIEKILTFRIPYYVGPLARGNSRFAWMTRKSEETITPWNFEEVVDKGASAQSFIERMTNFDKNLPNEKVLPKHSLLYEYFTVYNELTKVKYVTEGMRKPAFLSGEQKKAIVDLLFKTNRKVTVKQLKEDYFKKIECFDSVEISGVEDRFNASLGTYHDLLKIIKDKDFLDNEENEDILEDIVLTLTLFEDREMIEERLKTYAHLFDDKVMKQLKRRRYTGWGRLSRKLINGIRDKQSGKTILDFLKSDGFANRNFMQLIHDDSLTFKEDIQKAQVSGQGDSLHEHIANLAGSPAIKKGILQTVKVVDELVKVMGRHKPENIVIEMARENQTTQKGQKNSRERMKRIEEGIKELGSQILKEHPVENTQLQNEKLYLYYLQNGRDMYVDQELDINRLSDYDVDHIVPQSFLKDDSIDNKVLTRSDKARGKSDNVPSEEVVKKMKNYWRQLLNAKLITQRKFDNLTKAERGGLSELDKAGFIKRQLVETRQITKHVAQILDSRMNTKYDENDKLIREVKVITLKSKLVSDFRKDFQFYKVREINNYHHAHDAYLNAVVGTALIKKYPKLESEFVYGDYKVYDVRKMIAKSEQEIGKATAKYFFYSNIMNFFKTEITLANGEIRKRPLIETNGETGEIVWDKGRDFATVRKVLSMPQVNIVKKTEVQTGGFSKESILPKRNSDKLIARKKDWDPKKYGGFDSPTVAYSVLVVAKVEKGKSKKLKSVKELLGITIMERSSFEKNPIDFLEAKGYKEVKKDLIIKLPKYSLFELENGRKRMLASAGELQKGNELALPSKYVNFLYLASHYEKLKGSPEDNEQKQLFVEQHKHYLDEIIEQISEFSKRVILADANLDKVLSAYNKHRDKPIREQAENIIHLFTLTNLGAPAAFKYFDTTIDRKRYTSTKEVLDATLIHQSITGLYETRIDLSQLGGDGGAEAAAKEAAAKEAAAKEAAAKALEAEAAAKEAAAKEAAAKEAAAKAGGTLNIEDEYRLHETSKGPDVPLGSTWLSDFPQAWAETGGMGLAVRQAPLIIPLKATSTPVSIKQYPMSQEARLGIKPHIQRLLDQGILVPCQSPWNTPLLPVKKPGTNDYRPVQDLREVNKRVEDIHPTVPNPYNLLSGLPPSHQWYTVLDLKDAFFCLRLHPTSQSLFAFEWRDPEMGISGQLTWTRLPQGFKNSPTLFNEALHRDLADFRIQHPDLILLQYVDDLLLAATSELDCQQGTRALLQTLGDLGYRASAKKAQICQKQVKYLGYLLKEGQRWLTEARKETVMGQPTPKTPRQLREFLGKAGFCRLFIPGFAEMAAPLYPLTKPGTLFEWGPDQQKAYQEIKQALLTAPALGLPDLTKPFELFVDEKQGYAKGVLTQKLGPWRRPVAYLSKKLDPVAAGWPPCLRMVAAIAVLTKDAGKLTMGQPLVILAPHAVEALVKQPPDRWLSNARMTHYQALLLDTDRVQFGPIVALNPATLLPLPEEGLQHDCLDILAEAHGTRPDLTDQPLPDADHTWYTDGSSFLQEGQRKAGAAVTTETEVVWAKALPAGTSAQRAELIALTQALKMAEGKKLNVYTDSRYAFATAHIHGEIYRRRGWLTSEGKEIKNKDEILALLKALFLPKRLSIIHCPGHQKGNRAEARGNRMADQAAREVATRETPETSTLLAGKRTADGSEFEKRTADGSEFESPKKKAKVE

SEQ ID NO: 2530 - protein, 2096 aa, synthetic construct
MPAAKRVKLDGGDKKYSIGLDIGTNSVGWAVITDEYKVPSKKFKVLGNTDRHSIKKNLIGALLFDSGETAEATRLKRTARRRYTRRKNRICYLQEIFSNEMAKVDDSFFHRLEESFLVEEDKKHERHPIFGNIVDEVAYHEKYPTIYHLRKKLVDSTDKADLRLIYLALAHMIKFRGHFLIEGDLNPDNSDVDKLFIQLVQTYNQLFEENPINASGVDAKAILSARLSKSRRLENLIAQLPGEKKNGLFGNLIALSLGLTPNFKSNFDLAEDAKLQLSKDTYDDDLDNLLAQIGDQYADLFLAAKNLSDAILLSDILRVNTEITKAPLSASMIKRYDEHHQDLTLLKALVRQQLPEKYKEIFFDQSKNGYAGYIDGGASQEEFYKFIKPILEKMDGTEELLVKLNREDLLRKQRTFDNGSIPHQIHLGELHAILRRQEDFYPFLKDNREKIEKILTFRIPYYVGPLARGNSRFAWMTRKSEETITPWNFEEVVDKGASAQSFIERMTNFDKNLPNEKVLPKHSLLYEYFTVYNELTKVKYVTEGMRKPAFLSGEQKKAIVDLLFKTNRKVTVKQLKEDYFKKIECFDSVEISGVEDRFNASLGTYHDLLKIIKDKDFLDNEENEDILEDIVLTLTLFEDREMIEERLKTYAHLFDDKVMKQLKRRRYTGWGRLSRKLINGIRDKQSGKTILDFLKSDGFANRNFMQLIHDDSLTFKEDIQKAQVSGQGDSLHEHIANLAGSPAIKKGILQTVKVVDELVKVMGRHKPENIVIEMARENQTTQKGQKNSRERMKRIEEGIKELGSQILKEHPVENTQLQNEKLYLYYLQNGRDMYVDQELDINRLSDYDVDHIVPQSFLKDDSIDNKVLTRSDKARGKSDNVPSEEVVKKMKNYWRQLLNAKLITQRKFDNLTKAERGGLSELDKAGFIKRQLVETRQITKHVAQILDSRMNTKYDENDKLIREVKVITLKSKLVSDFRKDFQFYKVREINNYHHAHDAYLNAVVGTALIKKYPKLESEFVYGDYKVYDVRKMIAKSEQEIGKATAKYFFYSNIMNFFKTEITLANGEIRKRPLIETNGETGEIVWDKGRDFATVRKVLSMPQVNIVKKTEVQTGGFSKESILPKRNSDKLIARKKDWDPKKYGGFDSPTVAYSVLVVAKVEKGKSKKLKSVKELLGITIMERSSFEKNPIDFLEAKGYKEVKKDLIIKLPKYSLFELENGRKRMLASAGELQKGNELALPSKYVNFLYLASHYEKLKGSPEDNEQKQLFVEQHKHYLDEIIEQISEFSKRVILADANLDKVLSAYNKHRDKPIREQAENIIHLFTLTNLGAPAAFKYFDTTIDRKRYTSTKEVLDATLIHQSITGLYETRIDLSQLGGDGGGGSEAAAKPAPGGTLNIEDEYRLHETSKGPDVPLGSTWLSDFPQAWAETGGMGLAVRQAPLIIPLKATSTPVSIKQYPMSQEARLGIKPHIQRLLDQGILVPCQSPWNTPLLPVKKPGTNDYRPVQDLREVNKRVEDIHPTVPNPYNLLSGLPPSHQWYTVLDLKDAFFCLRLHPTSQSLFAFEWRDPEMGISGQLTWTRLPQGFKNSPTLFNEALHRDLADFRIQHPDLILLQYVDDLLLAATSELDCQQGTRALLQTLGDLGYRASAKKAQICQKQVKYLGYLLKEGQRWLTEARKETVMGQPTPKTPRQLREFLGKAGFCRLFIPGFAEMAAPLYPLTKPGTLFEWGPDQQKAYQEIKQALLTAPALGLPDLTKPFELFVDEKQGYAKGVLTQKLGPWRRPVAYLSKKLDPVAAGWPPCLRMVAAIAVLTKDAGKLTMGQPLVILAPHAVEALVKQPPDRWLSNARMTHYQALLLDTDRVQFGPIVALNPATLLPLPEEGLQHDCLDILAEAHGTRPDLTDQPLPDADHTWYTDGSSFLQEGQRKAGAAVTTETEVVWAKALPAGTSAQRAELIALTQALKMAEGKKLNVYTDSRYAFATAHIHGEIYRRRGWLTSEGKEIKNKDEILALLKALFLPKRLSIIHCPGHQKGNRAEARGNRMADQAAREVATRETPETSTLLAGKRTADGSEFEKRTADGSEFESPKKKAKVE

SEQ ID NO: 2531 - protein, 2094 aa, synthetic construct
MPAAKRVKLDGGDKKYSIGLDIGTNSVGWAVITDEYKVPSKKFKVLGNTDRHSIKKNLIGALLFDSGETAEATRLKRTARRRYTRRKNRICYLQEIFSNEMAKVDDSFFHRLEESFLVEEDKKHERHPIFGNIVDEVAYHEKYPTIYHLRKKLVDSTDKADLRLIYLALAHMIKFRGHFLIEGDLNPDNSDVDKLFIQLVQTYNQLFEENPINASGVDAKAILSARLSKSRRLENLIAQLPGEKKNGLFGNLIALSLGLTPNFKSNFDLAEDAKLQLSKDTYDDDLDNLLAQIGDQYADLFLAAKNLSDAILLSDILRVNTEITKAPLSASMIKRYDEHHQDLTLLKALVRQQLPEKYKEIFFDQSKNGYAGYIDGGASQEEFYKFIKPILEKMDGTEELLVKLNREDLLRKQRTFDNGSIPHQIHLGELHAILRRQEDFYPFLKDNREKIEKILTFRIPYYVGPLARGNSRFAWMTRKSEETITPWNFEEVVDKGASAQSFIERMTNFDKNLPNEKVLPKHSLLYEYFTVYNELTKVKYVTEGMRKPAFLSGEQKKAIVDLLFKTNRKVTVKQLKEDYFKKIECFDSVEISGVEDRFNASLGTYHDLLKIIKDKDFLDNEENEDILEDIVLTLTLFEDREMIEERLKTYAHLFDDKVMKQLKRRRYTGWGRLSRKLINGIRDKQSGKTILDFLKSDGFANRNFMQLIHDDSLTFKEDIQKAQVSGQGDSLHEHIANLAGSPAIKKGILQTVKVVDELVKVMGRHKPENIVIEMARENQTTQKGQKNSRERMKRIEEGIKELGSQILKEHPVENTQLQNEKLYLYYLQNGRDMYVDQELDINRLSDYDVDHIVPQSFLKDDSIDNKVLTRSDKARGKSDNVPSEEVVKKMKNYWRQLLNAKLITQRKFDNLTKAERGGLSELDKAGFIKRQLVETRQITKHVAQILDSRMNTKYDENDKLIREVKVITLKSKLVSDFRKDFQFYKVREINNYHHAHDAYLNAVVGTALIKKYPKLESEFVYGDYKVYDVRKMIAKSEQEIGKATAKYFFYSNIMNFFKTEITLANGEIRKRPLIETNGETGEIVWDKGRDFATVRKVLSMPQVNIVKKTEVQTGGFSKESILPKRNSDKLIARKKDWDPKKYGGFDSPTVAYSVLVVAKVEKGKSKKLKSVKELLGITIMERSSFEKNPIDFLEAKGYKEVKKDLIIKLPKYSLFELENGRKRMLASAGELQKGNELALPSKYVNFLYLASHYEKLKGSPEDNEQKQLFVEQHKHYLDEIIEQISEFSKRVILADANLDKVLSAYNKHRDKPIREQAENIIHLFTLTNLGAPAAFKYFDTTIDRKRYTSTKEVLDATLIHQSITGLYETRIDLSQLGGDGGPAPGSSGGGGGTLNIEDEYRLHETSKGPDVPLGSTWLSDFPQAWAETGGMGLAVRQAPLIIPLKATSTPVSIKQYPMSQEARLGIKPHIQRLLDQGILVPCQSPWNTPLLPVKKPGTNDYRPVQDLREVNKRVEDIHPTVPNPYNLLSGLPPSHQWYTVLDLKDAFFCLRLHPTSQSLFAFEWRDPEMGISGQLTWTRLPQGFKNSPTLFNEALHRDLADFRIQHPDLILLQYVDDLLLAATSELDCQQGTRALLQTLGDLGYRASAKKAQICQKQVKYLGYLLKEGQRWLTEARKETVMGQPTPKTPRQLREFLGKAGFCRLFIPGFAEMAAPLYPLTKPGTLFEWGPDQQKAYQEIKQALLTAPALGLPDLTKPFELFVDEKQGYAKGVLTQKLGPWRRPVAYLSKKLDPVAAGWPPCLRMVAAIAVLTKDAGKLTMGQPLVILAPHAVEALVKQPPDRWLSNARMTHYQALLLDTDRVQFGPIVALNPATLLPLPEEGLQHDCLDILAEAHGTRPDLTDQPLPDADHTWYTDGSSFLQEGQRKAGAAVTTETEVVWAKALPAGTSAQRAELIALTQALKMAEGKKLNVYTDSRYAFATAHIHGEIYRRRGWLTSEGKEIKNKDEILALLKALFLPKRLSIIHCPGHQKGNRAEARGNRMADQAAREVATRETPETSTLLAGKRTADGSEFEKRTADGSEFESPKKKAKVE

SEQ ID NO: 2532 - protein, 2100 aa, synthetic construct
MPAAKRVKLDGGDKKYSIGLDIGTNSVGWAVITDEYKVPSKKFKVLGNTDRHSIKKNLIGALLFDSGETAEATRLKRTARRRYTRRKNRICYLQEIFSNEMAKVDDSFFHRLEESFLVEEDKKHERHPIFGNIVDEVAYHEKYPTIYHLRKKLVDSTDKADLRLIYLALAHMIKFRGHFLIEGDLNPDNSDVDKLFIQLVQTYNQLFEENPINASGVDAKAILSARLSKSRRLENLIAQLPGEKKNGLFGNLIALSLGLTPNFKSNFDLAEDAKLQLSKDTYDDDLDNLLAQIGDQYADLFLAAKNLSDAILLSDILRVNTEITKAPLSASMIKRYDEHHQDLTLLKALVRQQLPEKYKEIFFDQSKNGYAGYIDGGASQEEFYKFIKPILEKMDGTEELLVKLNREDLLRKQRTFDNGSIPHQIHLGELHAILRRQEDFYPFLKDNREKIEKILTFRIPYYVGPLARGNSRFAWMTRKSEETITPWNFEEVVDKGASAQSFIERMTNFDKNLPNEKVLPKHSLLYEYFTVYNELTKVKYVTEGMRKPAFLSGEQKKAIVDLLFKTNRKVTVKQLKEDYFKKIECFDSVEISGVEDRFNASLGTYHDLLKIIKDKDFLDNEENEDILEDIVLTLTLFEDREMIEERLKTYAHLFDDKVMKQLKRRRYTGWGRLSRKLINGIRDKQSGKTILDFLKSDGFANRNFMQLIHDDSLTFKEDIQKAQVSGQGDSLHEHIANLAGSPAIKKGILQTVKVVDELVKVMGRHKPENIVIEMARENQTTQKGQKNSRERMKRIEEGIKELGSQILKEHPVENTQLQNEKLYLYYLQNGRDMYVDQELDINRLSDYDVDHIVPQSFLKDDSIDNKVLTRSDKARGKSDNVPSEEVVKKMKNYWRQLLNAKLITQRKFDNLTKAERGGLSELDKAGFIKRQLVETRQITKHVAQILDSRMNTKYDENDKLIREVKVITLKSKLVSDFRKDFQFYKVREINNYHHAHDAYLNAVVGTALIKKYPKLESEFVYGDYKVYDVRKMIAKSEQEIGKATAKYFFYSNIMNFFKTEITLANGEIRKRPLIETNGETGEIVWDKGRDFATVRKVLSMPQVNIVKKTEVQTGGFSKESILPKRNSDKLIARKKDWDPKKYGGFDSPTVAYSVLVVAKVEKGKSKKLKSVKELLGITIMERSSFEKNPIDFLEAKGYKEVKKDLIIKLPKYSLFELENGRKRMLASAGELQKGNELALPSKYVNFLYLASHYEKLKGSPEDNEQKQLFVEQHKHYLDEIIEQISEFSKRVILADANLDKVLSAYNKHRDKPIREQAENIIHLFTLTNLGAPAAFKYFDTTIDRKRYTSTKEVLDATLIHQSITGLYETRIDLSQLGGDGGGSSGSSGSSGSSGSSGGTLNIEDEYRLHETSKGPDVPLGSTWLSDFPQAWAETGGMGLAVRQAPLIIPLKATSTPVSIKQYPMSQEARLGIKPHIQRLLDQGILVPCQSPWNTPLLPVKKPGTNDYRPVQDLREVNKRVEDIHPTVPNPYNLLSGLPPSHQWYTVLDLKDAFFCLRLHPTSQSLFAFEWRDPEMGISGQLTWTRLPQGFKNSPTLFNEALHRDLADFRIQHPDLILLQYVDDLLLAATSELDCQQGTRALLQTLGDLGYRASAKKAQICQKQVKYLGYLLKEGQRWLTEARKETVMGQPTPKTPRQLREFLGKAGFCRLFIPGFAEMAAPLYPLTKPGTLFEWGPDQQKAYQEIKQALLTAPALGLPDLTKPFELFVDEKQGYAKGVLTQKLGPWRRPVAYLSKKLDPVAAGWPPCLRMVAAIAVLTKDAGKLTMGQPLVILAPHAVEALVKQPPDRWLSNARMTHYQALLLDTDRVQFGPIVALNPATLLPLPEEGLQHDCLDILAEAHGTRPDLTDQPLPDADHTWYTDGSSFLQEGQRKAGAAVTTETEVVWAKALPAGTSAQRAELIALTQALKMAEGKKLNVYTDSRYAFATAHIHGEIYRRRGWLTSEGKEIKNKDEILALLKALFLPKRLSIIHCPGHQKGNRAEARGNRMADQAAREVATRETPETSTLLAGKRTADGSEFEKRTADGSEFESPKKKAKVE

SEQ ID NO: 2533 - protein, 2094 aa, synthetic construct
MPAAKRVKLDGGDKKYSIGLDIGTNSVGWAVITDEYKVPSKKFKVLGNTDRHSIKKNLIGALLFDSGETAEATRLKRTARRRYTRRKNRICYLQEIFSNEMAKVDDSFFHRLEESFLVEEDKKHERHPIFGNIVDEVAYHEKYPTIYHLRKKLVDSTDKADLRLIYLALAHMIKFRGHFLIEGDLNPDNSDVDKLFIQLVQTYNQLFEENPINASGVDAKAILSARLSKSRRLENLIAQLPGEKKNGLFGNLIALSLGLTPNFKSNFDLAEDAKLQLSKDTYDDDLDNLLAQIGDQYADLFLAAKNLSDAILLSDILRVNTEITKAPLSASMIKRYDEHHQDLTLLKALVRQQLPEKYKEIFFDQSKNGYAGYIDGGASQEEFYKFIKPILEKMDGTEELLVKLNREDLLRKQRTFDNGSIPHQIHLGELHAILRRQEDFYPFLKDNREKIEKILTFRIPYYVGPLARGNSRFAWMTRKSEETITPWNFEEVVDKGASAQSFIERMTNFDKNLPNEKVLPKHSLLYEYFTVYNELTKVKYVTEGMRKPAFLSGEQKKAIVDLLFKTNRKVTVKQLKEDYFKKIECFDSVEISGVEDRFNASLGTYHDLLKIIKDKDFLDNEENEDILEDIVLTLTLFEDREMIEERLKTYAHLFDDKVMKQLKRRRYTGWGRLSRKLINGIRDKQSGKTILDFLKSDGFANRNFMQLIHDDSLTFKEDIQKAQVSGQGDSLHEHIANLAGSPAIKKGILQTVKVVDELVKVMGRHKPENIVIEMARENQTTQKGQKNSRERMKRIEEGIKELGSQILKEHPVENTQLQNEKLYLYYLQNGRDMYVDQELDINRLSDYDVDHIVPQSFLKDDSIDNKVLTRSDKARGKSDNVPSEEVVKKMKNYWRQLLNAKLITQRKFDNLTKAERGGLSELDKAGFIKRQLVETRQITKHVAQILDSRMNTKYDENDKLIREVKVITLKSKLVSDFRKDFQFYKVREINNYHHAHDAYLNAVVGTALIKKYPKLESEFVYGDYKVYDVRKMIAKSEQEIGKATAKYFFYSNIMNFFKTEITLANGEIRKRPLIETNGETGEIVWDKGRDFATVRKVLSMPQVNIVKKTEVQTGGFSKESILPKRNSDKLIARKKDWDPKKYGGFDSPTVAYSVLVVAKVEKGKSKKLKSVKELLGITIMERSSFEKNPIDFLEAKGYKEVKKDLIIKLPKYSLFELENGRKRMLASAGELQKGNELALPSKYVNFLYLASHYEKLKGSPEDNEQKQLFVEQHKHYLDEIIEQISEFSKRVILADANLDKVLSAYNKHRDKPIREQAENIIHLFTLTNLGAPAAFKYFDTTIDRKRYTSTKEVLDATLIHQSITGLYETRIDLSQLGGDGGPAPGGSGSSGGTLNIEDEYRLHETSKGPDVPLGSTWLSDFPQAWAETGGMGLAVRQAPLIIPLKATSTPVSIKQYPMSQEARLGIKPHIQRLLDQGILVPCQSPWNTPLLPVKKPGTNDYRPVQDLREVNKRVEDIHPTVPNPYNLLSGLPPSHQWYTVLDLKDAFFCLRLHPTSQSLFAFEWRDPEMGISGQLTWTRLPQGFKNSPTLFNEALHRDLADFRIQHPDLILLQYVDDLLLAATSELDCQQGTRALLQTLGDLGYRASAKKAQICQKQVKYLGYLLKEGQRWLTEARKETVMGQPTPKTPRQLREFLGKAGFCRLFIPGFAEMAAPLYPLTKPGTLFEWGPDQQKAYQEIKQALLTAPALGLPDLTKPFELFVDEKQGYAKGVLTQKLGPWRRPVAYLSKKLDPVAAGWPPCLRMVAAIAVLTKDAGKLTMGQPLVILAPHAVEALVKQPPDRWLSNARMTHYQALLLDTDRVQFGPIVALNPATLLPLPEEGLQHDCLDILAEAHGTRPDLTDQPLPDADHTWYTDGSSFLQEGQRKAGAAVTTETEVVWAKALPAGTSAQRAELIALTQALKMAEGKKLNVYTDSRYAFATAHIHGEIYRRRGWLTSEGKEIKNKDEILALLKALFLPKRLSIIHCPGHQKGNRAEARGNRMADQAAREVATRETPETSTLLAGKRTADGSEFEKRTADGSEFESPKKKAKVE

SEQ ID NO: 2534 - protein, 2098 aa, synthetic construct
MPAAKRVKLDGGDKKYSIGLDIGTNSVGWAVITDEYKVPSKKFKVLGNTDRHSIKKNLIGALLFDSGETAEATRLKRTARRRYTRRKNRICYLQEIFSNEMAKVDDSFFHRLEESFLVEEDKKHERHPIFGNIVDEVAYHEKYPTIYHLRKKLVDSTDKADLRLIYLALAHMIKFRGHFLIEGDLNPDNSDVDKLFIQLVQTYNQLFEENPINASGVDAKAILSARLSKSRRLENLIAQLPGEKKNGLFGNLIALSLGLTPNFKSNFDLAEDAKLQLSKDTYDDDLDNLLAQIGDQYADLFLAAKNLSDAILLSDILRVNTEITKAPLSASMIKRYDEHHQDLTLLKALVRQQLPEKYKEIFFDQSKNGYAGYIDGGASQEEFYKFIKPILEKMDGTEELLVKLNREDLLRKQRTFDNGSIPHQIHLGELHAILRRQEDFYPFLKDNREKIEKILTFRIPYYVGPLARGNSRFAWMTRKSEETITPWNFEEVVDKGASAQSFIERMTNFDKNLPNEKVLPKHSLLYEYFTVYNELTKVKYVTEGMRKPAFLSGEQKKAIVDLLFKTNRKVTVKQLKEDYFKKIECFDSVEISGVEDRFNASLGTYHDLLKIIKDKDFLDNEENEDILEDIVLTLTLFEDREMIEERLKTYAHLFDDKVMKQLKRRRYTGWGRLSRKLINGIRDKQSGKTILDFLKSDGFANRNFMQLIHDDSLTFKEDIQKAQVSGQGDSLHEHIANLAGSPAIKKGILQTVKVVDELVKVMGRHKPENIVIEMARENQTTQKGQKNSRERMKRIEEGIKELGSQILKEHPVENTQLQNEKLYLYYLQNGRDMYVDQELDINRLSDYDVDHIVPQSFLKDDSIDNKVLTRSDKARGKSDNVPSEEVVKKMKNYWRQLLNAKLITQRKFDNLTKAERGGLSELDKAGFIKRQLVETRQITKHVAQILDSRMNTKYDENDKLIREVKVITLKSKLVSDFRKDFQFYKVREINNYHHAHDAYLNAVVGTALIKKYPKLESEFVYGDYKVYDVRKMIAKSEQEIGKATAKYFFYSNIMNFFKTEITLANGEIRKRPLIETNGETGEIVWDKGRDFATVRKVLSMPQVNIVKKTEVQTGGFSKESILPKRNSDKLIARKKDWDPKKYGGFDSPTVAYSVLVVAKVEKGKSKKLKSVKELLGITIMERSSFEKNPIDFLEAKGYKEVKKDLIIKLPKYSLFELENGRKRMLASAGELQKGNELALPSKYVNFLYLASHYEKLKGSPEDNEQKQLFVEQHKHYLDEIIEQISEFSKRVILADANLDKVLSAYNKHRDKPIREQAENIIHLFTLTNLGAPAAFKYFDTTIDRKRYTSTKEVLDATLIHQSITGLYETRIDLSQLGGDGGPAPAPAPAPAPAPGGTLNIEDEYRLHETSKGPDVPLGSTWLSDFPQAWAETGGMGLAVRQAPLIIPLKATSTPVSIKQYPMSQEARLGIKPHIQRLLDQGILVPCQSPWNTPLLPVKKPGTNDYRPVQDLREVNKRVEDIHPTVPNPYNLLSGLPPSHQWYTVLDLKDAFFCLRLHPTSQSLFAFEWRDPEMGISGQLTWTRLPQGFKNSPTLFNEALHRDLADFRIQHPDLILLQYVDDLLLAATSELDCQQGTRALLQTLGDLGYRASAKKAQICQKQVKYLGYLLKEGQRWLTEARKETVMGQPTPKTPRQLREFLGKAGFCRLFIPGFAEMAAPLYPLTKPGTLFEWGPDQQKAYQEIKQALLTAPALGLPDLTKPFELFVDEKQGYAKGVLTQKLGPWRRPVAYLSKKLDPVAAGWPPCLRMVAAIAVLTKDAGKLTMGQPLVILAPHAVEALVKQPPDRWLSNARMTHYQALLLDTDRVQFGPIVALNPATLLPLPEEGLQHDCLDILAEAHGTRPDLTDQPLPDADHTWYTDGSSFLQEGQRKAGAAVTTETEVVWAKALPAGTSAQRAELIALTQALKMAEGKKLNVYTDSRYAFATAHIHGEIYRRRGWLTSEGKEIKNKDEILALLKALFLPKRLSIIHCPGHQKGNRAEARGNRMADQAAREVATRETPETSTLLAGKRTADGSEFEKRTADGSEFESPKKKAKVE

SEQ ID NO: 2535 - protein, 2096 aa, synthetic construct
MPAAKRVKLDGGDKKYSIGLDIGTNSVGWAVITDEYKVPSKKFKVLGNTDRHSIKKNLIGALLFDSGETAEATRLKRTARRRYTRRKNRICYLQEIFSNEMAKVDDSFFHRLEESFLVEEDKKHERHPIFGNIVDEVAYHEKYPTIYHLRKKLVDSTDKADLRLIYLALAHMIKFRGHFLIEGDLNPDNSDVDKLFIQLVQTYNQLFEENPINASGVDAKAILSARLSKSRRLENLIAQLPGEKKNGLFGNLIALSLGLTPNFKSNFDLAEDAKLQLSKDTYDDDLDNLLAQIGDQYADLFLAAKNLSDAILLSDILRVNTEITKAPLSASMIKRYDEHHQDLTLLKALVRQQLPEKYKEIFFDQSKNGYAGYIDGGASQEEFYKFIKPILEKMDGTEELLVKLNREDLLRKQRTFDNGSIPHQIHLGELHAILRRQEDFYPFLKDNREKIEKILTFRIPYYVGPLARGNSRFAWMTRKSEETITPWNFEEVVDKGASAQSFIERMTNFDKNLPNEKVLPKHSLLYEYFTVYNELTKVKYVTEGMRKPAFLSGEQKKAIVDLLFKTNRKVTVKQLKEDYFKKIECFDSVEISGVEDRFNASLGTYHDLLKIIKDKDFLDNEENEDILEDIVLTLTLFEDREMIEERLKTYAHLFDDKVMKQLKRRRYTGWGRLSRKLINGIRDKQSGKTILDFLKSDGFANRNFMQLIHDDSLTFKEDIQKAQVSGQGDSLHEHIANLAGSPAIKKGILQTVKVVDELVKVMGRHKPENIVIEMARENQTTQKGQKNSRERMKRIEEGIKELGSQILKEHPVENTQLQNEKLYLYYLQNGRDMYVDQELDINRLSDYDVDHIVPQSFLKDDSIDNKVLTRSDKARGKSDNVPSEEVVKKMKNYWRQLLNAKLITQRKFDNLTKAERGGLSELDKAGFIKRQLVETRQITKHVAQILDSRMNTKYDENDKLIREVKVITLKSKLVSDFRKDFQFYKVREINNYHHAHDAYLNAVVGTALIKKYPKLESEFVYGDYKVYDVRKMIAKSEQEIGKATAKYFFYSNIMNFFKTEITLANGEIRKRPLIETNGETGEIVWDKGRDFATVRKVLSMPQVNIVKKTEVQTGGFSKESILPKRNSDKLIARKKDWDPKKYGGFDSPTVAYSVLVVAKVEKGKSKKLKSVKELLGITIMERSSFEKNPIDFLEAKGYKEVKKDLIIKLPKYSLFELENGRKRMLASAGELQKGNELALPSKYVNFLYLASHYEKLKGSPEDNEQKQLFVEQHKHYLDEIIEQISEFSKRVILADANLDKVLSAYNKHRDKPIREQAENIIHLFTLTNLGAPAAFKYFDTTIDRKRYTSTKEVLDATLIHQSITGLYETRIDLSQLGGDGGGSSEAAAKPAPGGTLNIEDEYRLHETSKGPDVPLGSTWLSDFPQAWAETGGMGLAVRQAPLIIPLKATSTPVSIKQYPMSQEARLGIKPHIQRLLDQGILVPCQSPWNTPLLPVKKPGTNDYRPVQDLREVNKRVEDIHPTVPNPYNLLSGLPPSHQWYTVLDLKDAFFCLRLHPTSQSLFAFEWRDPEMGISGQLTWTRLPQGFKNSPTLFNEALHRDLADFRIQHPDLILLQYVDDLLLAATSELDCQQGTRALLQTLGDLGYRASAKKAQICQKQVKYLGYLLKEGQRWLTEARKETVMGQPTPKTPRQLREFLGKAGFCRLFIPGFAEMAAPLYPLTKPGTLFEWGPDQQKAYQEIKQALLTAPALGLPDLTKPFELFVDEKQGYAKGVLTQKLGPWRRPVAYLSKKLDPVAAGWPPCLRMVAAIAVLTKDAGKLTMGQPLVILAPHAVEALVKQPPDRWLSNARMTHYQALLLDTDRVQFGPIVALNPATLLPLPEEGLQHDCLDILAEAHGTRPDLTDQPLPDADHTWYTDGSSFLQEGQRKAGAAVTTETEVVWAKALPAGTSAQRAELIALTQALKMAEGKKLNVYTDSRYAFATAHIHGEIYRRRGWLTSEGKEIKNKDEILALLKALFLPKRLSIIHCPGHQKGNRAEARGNRMADQAAREVATRETPETSTLLAGKRTADGSEFEKRTADGSEFESPKKKAKVE

SEQ ID NO: 2536 - protein, 2110 aa, synthetic construct
MPAAKRVKLDGGDKKYSIGLDIGTNSVGWAVITDEYKVPSKKFKVLGNTDRHSIKKNLIGALLFDSGETAEATRLKRTARRRYTRRKNRICYLQEIFSNEMAKVDDSFFHRLEESFLVEEDKKHERHPIFGNIVDEVAYHEKYPTIYHLRKKLVDSTDKADLRLIYLALAHMIKFRGHFLIEGDLNPDNSDVDKLFIQLVQTYNQLFEENPINASGVDAKAILSARLSKSRRLENLIAQLPGEKKNGLFGNLIALSLGLTPNFKSNFDLAEDAKLQLSKDTYDDDLDNLLAQIGDQYADLFLAAKNLSDAILLSDILRVNTEITKAPLSASMIKRYDEHHQDLTLLKALVRQQLPEKYKEIFFDQSKNGYAGYIDGGASQEEFYKFIKPILEKMDGTEELLVKLNREDLLRKQRTFDNGSIPHQIHLGELHAILRRQEDFYPFLKDNREKIEKILTFRIPYYVGPLARGNSRFAWMTRKSEETITPWNFEEVVDKGASAQSFIERMTNFDKNLPNEKVLPKHSLLYEYFTVYNELTKVKYVTEGMRKPAFLSGEQKKAIVDLLFKTNRKVTVKQLKEDYFKKIECFDSVEISGVEDRFNASLGTYHDLLKIIKDKDFLDNEENEDILEDIVLTLTLFEDREMIEERLKTYAHLFDDKVMKQLKRRRYTGWGRLSRKLINGIRDKQSGKTILDFLKSDGFANRNFMQLIHDDSLTFKEDIQKAQVSGQGDSLHEHIANLAGSPAIKKGILQTVKVVDELVKVMGRHKPENIVIEMARENQTTQKGQKNSRERMKRIEEGIKELGSQILKEHPVENTQLQNEKLYLYYLQNGRDMYVDQELDINRLSDYDVDHIVPQSFLKDDSIDNKVLTRSDKARGKSDNVPSEEVVKKMKNYWRQLLNAKLITQRKFDNLTKAERGGLSELDKAGFIKRQLVETRQITKHVAQILDSRMNTKYDENDKLIREVKVITLKSKLVSDFRKDFQFYKVREINNYHHAHDAYLNAVVGTALIKKYPKLESEFVYGDYKVYDVRKMIAKSEQEIGKATAKYFFYSNIMNFFKTEITLANGEIRKRPLIETNGETGEIVWDKGRDFATVRKVLSMPQVNIVKKTEVQTGGFSKESILPKRNSDKLIARKKDWDPKKYGGFDSPTVAYSVLVVAKVEKGKSKKLKSVKELLGITIMERSSFEKNPIDFLEAKGYKEVKKDLIIKLPKYSLFELENGRKRMLASAGELQKGNELALPSKYVNFLYLASHYEKLKGSPEDNEQKQLFVEQHKHYLDEIIEQISEFSKRVILADANLDKVLSAYNKHRDKPIREQAENIIHLFTLTNLGAPAAFKYFDTTIDRKRYTSTKEVLDATLIHQSITGLYETRIDLSQLGGDGGEAAAKEAAAKEAAAKEAAAKEAAAKGGTLNIEDEYRLHETSKGPDVPLGSTWLSDFPQAWAETGGMGLAVRQAPLIIPLKATSTPVSIKQYPMSQEARLGIKPHIQRLLDQGILVPCQSPWNTPLLPVKKPGTNDYRPVQDLREVNKRVEDIHPTVPNPYNLLSGLPPSHQWYTVLDLKDAFFCLRLHPTSQSLFAFEWRDPEMGISGQLTWTRLPQGFKNSPTLFNEALHRDLADFRIQHPDLILLQYVDDLLLAATSELDCQQGTRALLQTLGDLGYRASAKKAQICQKQVKYLGYLLKEGQRWLTEARKETVMGQPTPKTPRQLREFLGKAGFCRLFIPGFAEMAAPLYPLTKPGTLFEWGPDQQKAYQEIKQALLTAPALGLPDLTKPFELFVDEKQGYAKGVLTQKLGPWRRPVAYLSKKLDPVAAGWPPCLRMVAAIAVLTKDAGKLTMGQPLVILAPHAVEALVKQPPDRWLSNARMTHYQALLLDTDRVQFGPIVALNPATLLPLPEEGLQHDCLDILAEAHGTRPDLTDQPLPDADHTWYTDGSSFLQEGQRKAGAAVTTETEVVWAKALPAGTSAQRAELIALTQALKMAEGKKLNVYTDSRYAFATAHIHGEIYRRRGWLTSEGKEIKNKDEILALLKALFLPKRLSIIHCPGHQKGNRAEARGNRMADQAAREVATRETPETSTLLAGKRTADGSEFEKRTADGSEFESPKKKAKVE

SEQ ID NO: 2537 - protein, 2097 aa, synthetic construct
MPAAKRVKLDGGDKKYSIGLDIGTNSVGWAVITDEYKVPSKKFKVLGNTDRHSIKKNLIGALLFDSGETAEATRLKRTARRRYTRRKNRICYLQEIFSNEMAKVDDSFFHRLEESFLVEEDKKHERHPIFGNIVDEVAYHEKYPTIYHLRKKLVDSTDKADLRLIYLALAHMIKFRGHFLIEGDLNPDNSDVDKLFIQLVQTYNQLFEENPINASGVDAKAILSARLSKSRRLENLIAQLPGEKKNGLFGNLIALSLGLTPNFKSNFDLAEDAKLQLSKDTYDDDLDNLLAQIGDQYADLFLAAKNLSDAILLSDILRVNTEITKAPLSASMIKRYDEHHQDLTLLKALVRQQLPEKYKEIFFDQSKNGYAGYIDGGASQEEFYKFIKPILEKMDGTEELLVKLNREDLLRKQRTFDNGSIPHQIHLGELHAILRRQEDFYPFLKDNREKIEKILTFRIPYYVGPLARGNSRFAWMTRKSEETITPWNFEEVVDKGASAQSFIERMTNFDKNLPNEKVLPKHSLLYEYFTVYNELTKVKYVTEGMRKPAFLSGEQKKAIVDLLFKTNRKVTVKQLKEDYFKKIECFDSVEISGVEDRFNASLGTYHDLLKIIKDKDFLDNEENEDILEDIVLTLTLFEDREMIEERLKTYAHLFDDKVMKQLKRRRYTGWGRLSRKLINGIRDKQSGKTILDFLKSDGFANRNFMQLIHDDSLTFKEDIQKAQVSGQGDSLHEHIANLAGSPAIKKGILQTVKVVDELVKVMGRHKPENIVIEMARENQTTQKGQKNSRERMKRIEEGIKELGSQILKEHPVENTQLQNEKLYLYYLQNGRDMYVDQELDINRLSDYDVDHIVPQSFLKDDSIDNKVLTRSDKARGKSDNVPSEEVVKKMKNYWRQLLNAKLITQRKFDNLTKAERGGLSELDKAGFIKRQLVETRQITKHVAQILDSRMNTKYDENDKLIREVKVITLKSKLVSDFRKDFQFYKVREINNYHHAHDAYLNAVVGTALIKKYPKLESEFVYGDYKVYDVRKMIAKSEQEIGKATAKYFFYSNIMNFFKTEITLANGEIRKRPLIETNGETGEIVWDKGRDFATVRKVLSMPQVNIVKKTEVQTGGFSKESILPKRNSDKLIARKKDWDPKKYGGFDSPTVAYSVLVVAKVEKGKSKKLKSVKELLGITIMERSSFEKNPIDFLEAKGYKEVKKDLIIKLPKYSLFELENGRKRMLASAGELQKGNELALPSKYVNFLYLASHYEKLKGSPEDNEQKQLFVEQHKHYLDEIIEQISEFSKRVILADANLDKVLSAYNKHRDKPIREQAENIIHLFTLTNLGAPAAFKYFDTTIDRKRYTSTKEVLDATLIHQSITGLYETRIDLSQLGGDGGGSSGSSGSSGSSGGTLNIEDEYRLHETSKGPDVPLGSTWLSDFPQAWAETGGMGLAVRQAPLIIPLKATSTPVSIKQYPMSQEARLGIKPHIQRLLDQGILVPCQSPWNTPLLPVKKPGTNDYRPVQDLREVNKRVEDIHPTVPNPYNLLSGLPPSHQWYTVLDLKDAFFCLRLHPTSQSLFAFEWRDPEMGISGQLTWTRLPQGFKNSPTLFNEALHRDLADFRIQHPDLILLQYVDDLLLAATSELDCQQGTRALLQTLGDLGYRASAKKAQICQKQVKYLGYLLKEGQRWLTEARKETVMGQPTPKTPRQLREFLGKAGFCRLFIPGFAEMAAPLYPLTKPGTLFEWGPDQQKAYQEIKQALLTAPALGLPDLTKPFELFVDEKQGYAKGVLTQKLGPWRRPVAYLSKKLDPVAAGWPPCLRMVAAIAVLTKDAGKLTMGQPLVILAPHAVEALVKQPPDRWLSNARMTHYQALLLDTDRVQFGPIVALNPATLLPLPEEGLQHDCLDILAEAHGTRPDLTDQPLPDADHTWYTDGSSFLQEGQRKAGAAVTTETEVVWAKALPAGTSAQRAELIALTQALKMAEGKKLNVYTDSRYAFATAHIHGEIYRRRGWLTSEGKEIKNKDEILALLKALFLPKRLSIIHCPGHQKGNRAEARGNRMADQAAREVATRETPETSTLLAGKRTADGSEFEKRTADGSEFESPKKKAKVE

SEQ ID NO: 2538 - protein, 2096 aa, synthetic construct
MPAAKRVKLDGGDKKYSIGLDIGTNSVGWAVITDEYKVPSKKFKVLGNTDRHSIKKNLIGALLFDSGETAEATRLKRTARRRYTRRKNRICYLQEIFSNEMAKVDDSFFHRLEESFLVEEDKKHERHPIFGNIVDEVAYHEKYPTIYHLRKKLVDSTDKADLRLIYLALAHMIKFRGHFLIEGDLNPDNSDVDKLFIQLVQTYNQLFEENPINASGVDAKAILSARLSKSRRLENLIAQLPGEKKNGLFGNLIALSLGLTPNFKSNFDLAEDAKLQLSKDTYDDDLDNLLAQIGDQYADLFLAAKNLSDAILLSDILRVNTEITKAPLSASMIKRYDEHHQDLTLLKALVRQQLPEKYKEIFFDQSKNGYAGYIDGGASQEEFYKFIKPILEKMDGTEELLVKLNREDLLRKQRTFDNGSIPHQIHLGELHAILRRQEDFYPFLKDNREKIEKILTFRIPYYVGPLARGNSRFAWMTRKSEETITPWNFEEVVDKGASAQSFIERMTNFDKNLPNEKVLPKHSLLYEYFTVYNELTKVKYVTEGMRKPAFLSGEQKKAIVDLLFKTNRKVTVKQLKEDYFKKIECFDSVEISGVEDRFNASLGTYHDLLKIIKDKDFLDNEENEDILEDIVLTLTLFEDREMIEERLKTYAHLFDDKVMKQLKRRRYTGWGRLSRKLINGIRDKQSGKTILDFLKSDGFANRNFMQLIHDDSLTFKEDIQKAQVSGQGDSLHEHIANLAGSPAIKKGILQTVKVVDELVKVMGRHKPENIVIEMARENQTTQKGQKNSRERMKRIEEGIKELGSQILKEHPVENTQLQNEKLYLYYLQNGRDMYVDQELDINRLSDYDVDHIVPQSFLKDDSIDNKVLTRSDKARGKSDNVPSEEVVKKMKNYWRQLLNAKLITQRKFDNLTKAERGGLSELDKAGFIKRQLVETRQITKHVAQILDSRMNTKYDENDKLIREVKVITLKSKLVSDFRKDFQFYKVREINNYHHAHDAYLNAVVGTALIKKYPKLESEFVYGDYKVYDVRKMIAKSEQEIGKATAKYFFYSNIMNFFKTEITLANGEIRKRPLIETNGETGEIVWDKGRDFATVRKVLSMPQVNIVKKTEVQTGGFSKESILPKRNSDKLIARKKDWDPKKYGGFDSPTVAYSVLVVAKVEKGKSKKLKSVKELLGITIMERSSFEKNPIDFLEAKGYKEVKKDLIIKLPKYSLFELENGRKRMLASAGELQKGNELALPSKYVNFLYLASHYEKLKGSPEDNEQKQLFVEQHKHYLDEIIEQISEFSKRVILADANLDKVLSAYNKHRDKPIREQAENIIHLFTLTNLGAPAAFKYFDTTIDRKRYTSTKEVLDATLIHQSITGLYETRIDLSQLGGDGGGGSGSSEAAAKGGTLNIEDEYRLHETSKGPDVPLGSTWLSDFPQAWAETGGMGLAVRQAPLIIPLKATSTPVSIKQYPMSQEARLGIKPHIQRLLDQGILVPCQSPWNTPLLPVKKPGTNDYRPVQDLREVNKRVEDIHPTVPNPYNLLSGLPPSHQWYTVLDLKDAFFCLRLHPTSQSLFAFEWRDPEMGISGQLTWTRLPQGFKNSPTLFNEALHRDLADFRIQHPDLILLQYVDDLLLAATSELDCQQGTRALLQTLGDLGYRASAKKAQICQKQVKYLGYLLKEGQRWLTEARKETVMGQPTPKTPRQLREFLGKAGFCRLFIPGFAEMAAPLYPLTKPGTLFEWGPDQQKAYQEIKQALLTAPALGLPDLTKPFELFVDEKQGYAKGVLTQKLGPWRRPVAYLSKKLDPVAAGWPPCLRMVAAIAVLTKDAGKLTMGQPLVILAPHAVEALVKQPPDRWLSNARMTHYQALLLDTDRVQFGPIVALNPATLLPLPEEGLQHDCLDILAEAHGTRPDLTDQPLPDADHTWYTDGSSFLQEGQRKAGAAVTTETEVVWAKALPAGTSAQRAELIALTQALKMAEGKKLNVYTDSRYAFATAHIHGEIYRRRGWLTSEGKEIKNKDEILALLKALFLPKRLSIIHCPGHQKGNRAEARGNRMADQAAREVATRETPETSTLLAGKRTADGSEFEKRTADGSEFESPKKKAKVE

SEQ ID NO: 2539 - protein, 2090 aa, synthetic construct
MPAAKRVKLDGGDKKYSIGLDIGTNSVGWAVITDEYKVPSKKFKVLGNTDRHSIKKNLIGALLFDSGETAEATRLKRTARRRYTRRKNRICYLQEIFSNEMAKVDDSFFHRLEESFLVEEDKKHERHPIFGNIVDEVAYHEKYPTIYHLRKKLVDSTDKADLRLIYLALAHMIKFRGHFLIEGDLNPDNSDVDKLFIQLVQTYNQLFEENPINASGVDAKAILSARLSKSRRLENLIAQLPGEKKNGLFGNLIALSLGLTPNFKSNFDLAEDAKLQLSKDTYDDDLDNLLAQIGDQYADLFLAAKNLSDAILLSDILRVNTEITKAPLSASMIKRYDEHHQDLTLLKALVRQQLPEKYKEIFFDQSKNGYAGYIDGGASQEEFYKFIKPILEKMDGTEELLVKLNREDLLRKQRTFDNGSIPHQIHLGELHAILRRQEDFYPFLKDNREKIEKILTFRIPYYVGPLARGNSRFAWMTRKSEETITPWNFEEVVDKGASAQSFIERMTNFDKNLPNEKVLPKHSLLYEYFTVYNELTKVKYVTEGMRKPAFLSGEQKKAIVDLLFKTNRKVTVKQLKEDYFKKIECFDSVEISGVEDRFNASLGTYHDLLKIIKDKDFLDNEENEDILEDIVLTLTLFEDREMIEERLKTYAHLFDDKVMKQLKRRRYTGWGRLSRKLINGIRDKQSGKTILDFLKSDGFANRNFMQLIHDDSLTFKEDIQKAQVSGQGDSLHEHIANLAGSPAIKKGILQTVKVVDELVKVMGRHKPENIVIEMARENQTTQKGQKNSRERMKRIEEGIKELGSQILKEHPVENTQLQNEKLYLYYLQNGRDMYVDQELDINRLSDYDVDHIVPQSFLKDDSIDNKVLTRSDKARGKSDNVPSEEVVKKMKNYWRQLLNAKLITQRKFDNLTKAERGGLSELDKAGFIKRQLVETRQITKHVAQILDSRMNTKYDENDKLIREVKVITLKSKLVSDFRKDFQFYKVREINNYHHAHDAYLNAVVGTALIKKYPKLESEFVYGDYKVYDVRKMIAKSEQEIGKATAKYFFYSNIMNFFKTEITLANGEIRKRPLIETNGETGEIVWDKGRDFATVRKVLSMPQVNIVKKTEVQTGGFSKESILPKRNSDKLIARKKDWDPKKYGGFDSPTVAYSVLVVAKVEKGKSKKLKSVKELLGITIMERSSFEKNPIDFLEAKGYKEVKKDLIIKLPKYSLFELENGRKRMLASAGELQKGNELALPSKYVNFLYLASHYEKLKGSPEDNEQKQLFVEQHKHYLDEIIEQISEFSKRVILADANLDKVLSAYNKHRDKPIREQAENIIHLFTLTNLGAPAAFKYFDTTIDRKRYTSTKEVLDATLIHQSITGLYETRIDLSQLGGDGGEAAAKGGTLNIEDEYRLHETSKGPDVPLGSTWLSDFPQAWAETGGMGLAVRQAPLIIPLKATSTPVSIKQYPMSQEARLGIKPHIQRLLDQGILVPCQSPWNTPLLPVKKPGTNDYRPVQDLREVNKRVEDIHPTVPNPYNLLSGLPPSHQWYTVLDLKDAFFCLRLHPTSQSLFAFEWRDPEMGISGQLTWTRLPQGFKNSPTLFNEALHRDLADFRIQHPDLILLQYVDDLLLAATSELDCQQGTRALLQTLGDLGYRASAKKAQICQKQVKYLGYLLKEGQRWLTEARKETVMGQPTPKTPRQLREFLGKAGFCRLFIPGFAEMAAPLYPLTKPGTLFEWGPDQQKAYQEIKQALLTAPALGLPDLTKPFELFVDEKQGYAKGVLTQKLGPWRRPVAYLSKKLDPVAAGWPPCLRMVAAIAVLTKDAGKLTMGQPLVILAPHAVEALVKQPPDRWLSNARMTHYQALLLDTDRVQFGPIVALNPATLLPLPEEGLQHDCLDILAEAHGTRPDLTDQPLPDADHTWYTDGSSFLQEGQRKAGAAVTTETEVVWAKALPAGTSAQRAELIALTQALKMAEGKKLNVYTDSRYAFATAHIHGEIYRRRGWLTSEGKEIKNKDEILALLKALFLPKRLSIIHCPGHQKGNRAEARGNRMADQAAREVATRETPETSTLLAGKRTADGSEFEKRTADGSEFESPKKKAKVE

SEQ ID NO: 2540 - protein, 2091 aa, synthetic construct
MPAAKRVKLDGGDKKYSIGLDIGTNSVGWAVITDEYKVPSKKFKVLGNTDRHSIKKNLIGALLFDSGETAEATRLKRTARRRYTRRKNRICYLQEIFSNEMAKVDDSFFHRLEESFLVEEDKKHERHPIFGNIVDEVAYHEKYPTIYHLRKKLVDSTDKADLRLIYLALAHMIKFRGHFLIEGDLNPDNSDVDKLFIQLVQTYNQLFEENPINASGVDAKAILSARLSKSRRLENLIAQLPGEKKNGLFGNLIALSLGLTPNFKSNFDLAEDAKLQLSKDTYDDDLDNLLAQIGDQYADLFLAAKNLSDAILLSDILRVNTEITKAPLSASMIKRYDEHHQDLTLLKALVRQQLPEKYKEIFFDQSKNGYAGYIDGGASQEEFYKFIKPILEKMDGTEELLVKLNREDLLRKQRTFDNGSIPHQIHLGELHAILRRQEDFYPFLKDNREKIEKILTFRIPYYVGPLARGNSRFAWMTRKSEETITPWNFEEVVDKGASAQSFIERMTNFDKNLPNEKVLPKHSLLYEYFTVYNELTKVKYVTEGMRKPAFLSGEQKKAIVDLLFKTNRKVTVKQLKEDYFKKIECFDSVEISGVEDRFNASLGTYHDLLKIIKDKDFLDNEENEDILEDIVLTLTLFEDREMIEERLKTYAHLFDDKVMKQLKRRRYTGWGRLSRKLINGIRDKQSGKTILDFLKSDGFANRNFMQLIHDDSLTFKEDIQKAQVSGQGDSLHEHIANLAGSPAIKKGILQTVKVVDELVKVMGRHKPENIVIEMARENQTTQKGQKNSRERMKRIEEGIKELGSQILKEHPVENTQLQNEKLYLYYLQNGRDMYVDQELDINRLSDYDVDHIVPQSFLKDDSIDNKVLTRSDKARGKSDNVPSEEVVKKMKNYWRQLLNAKLITQRKFDNLTKAERGGLSELDKAGFIKRQLVETRQITKHVAQILDSRMNTKYDENDKLIREVKVITLKSKLVSDFRKDFQFYKVREINNYHHAHDAYLNAVVGTALIKKYPKLESEFVYGDYKVYDVRKMIAKSEQEIGKATAKYFFYSNIMNFFKTEITLANGEIRKRPLIETNGETGEIVWDKGRDFATVRKVLSMPQVNIVKKTEVQTGGFSKESILPKRNSDKLIARKKDWDPKKYGGFDSPTVAYSVLVVAKVEKGKSKKLKSVKELLGITIMERSSFEKNPIDFLEAKGYKEVKKDLIIKLPKYSLFELENGRKRMLASAGELQKGNELALPSKYVNFLYLASHYEKLKGSPEDNEQKQLFVEQHKHYLDEIIEQISEFSKRVILADANLDKVLSAYNKHRDKPIREQAENIIHLFTLTNLGAPAAFKYFDTTIDRKRYTSTKEVLDATLIHQSITGLYETRIDLSQLGGDGGPAPGGGGGTLNIEDEYRLHETSKGPDVPLGSTWLSDFPQAWAETGGMGLAVRQAPLIIPLKATSTPVSIKQYPMSQEARLGIKPHIQRLLDQGILVPCQSPWNTPLLPVKKPGTNDYRPVQDLREVNKRVEDIHPTVPNPYNLLSGLPPSHQWYTVLDLKDAFFCLRLHPTSQSLFAFEWRDPEMGISGQLTWTRLPQGFKNSPTLFNEALHRDLADFRIQHPDLILLQYVDDLLLAATSELDCQQGTRALLQTLGDLGYRASAKKAQICQKQVKYLGYLLKEGQRWLTEARKETVMGQPTPKTPRQLREFLGKAGFCRLFIPGFAEMAAPLYPLTKPGTLFEWGPDQQKAYQEIKQALLTAPALGLPDLTKPFELFVDEKQGYAKGVLTQKLGPWRRPVAYLSKKLDPVAAGWPPCLRMVAAIAVLTKDAGKLTMGQPLVILAPHAVEALVKQPPDRWLSNARMTHYQALLLDTDRVQFGPIVALNPATLLPLPEEGLQHDCLDILAEAHGTRPDLTDQPLPDADHTWYTDGSSFLQEGQRKAGAAVTTETEVVWAKALPAGTSAQRAELIALTQALKMAEGKKLNVYTDSRYAFATAHIHGEIYRRRGWLTSEGKEIKNKDEILALLKALFLPKRLSIIHCPGHQKGNRAEARGNRMADQAAREVATRETPETSTLLAGKRTADGSEFEKRTADGSEFESPKKKAKVE

SEQ ID NO: 2541 - protein, 2115 aa, synthetic construct
MPAAKRVKLDGGDKKYSIGLDIGTNSVGWAVITDEYKVPSKKFKVLGNTDRHSIKKNLIGALLFDSGETAEATRLKRTARRRYTRRKNRICYLQEIFSNEMAKVDDSFFHRLEESFLVEEDKKHERHPIFGNIVDEVAYHEKYPTIYHLRKKLVDSTDKADLRLIYLALAHMIKFRGHFLIEGDLNPDNSDVDKLFIQLVQTYNQLFEENPINASGVDAKAILSARLSKSRRLENLIAQLPGEKKNGLFGNLIALSLGLTPNFKSNFDLAEDAKLQLSKDTYDDDLDNLLAQIGDQYADLFLAAKNLSDAILLSDILRVNTEITKAPLSASMIKRYDEHHQDLTLLKALVRQQLPEKYKEIFFDQSKNGYAGYIDGGASQEEFYKFIKPILEKMDGTEELLVKLNREDLLRKQRTFDNGSIPHQIHLGELHAILRRQEDFYPFLKDNREKIEKILTFRIPYYVGPLARGNSRFAWMTRKSEETITPWNFEEVVDKGASAQSFIERMTNFDKNLPNEKVLPKHSLLYEYFTVYNELTKVKYVTEGMRKPAFLSGEQKKAIVDLLFKTNRKVTVKQLKEDYFKKIECFDSVEISGVEDRFNASLGTYHDLLKIIKDKDFLDNEENEDILEDIVLTLTLFEDREMIEERLKTYAHLFDDKVMKQLKRRRYTGWGRLSRKLINGIRDKQSGKTILDFLKSDGFANRNFMQLIHDDSLTFKEDIQKAQVSGQGDSLHEHIANLAGSPAIKKGILQTVKVVDELVKVMGRHKPENIVIEMARENQTTQKGQKNSRERMKRIEEGIKELGSQILKEHPVENTQLQNEKLYLYYLQNGRDMYVDQELDINRLSDYDVDHIVPQSFLKDDSIDNKVLTRSDKARGKSDNVPSEEVVKKMKNYWRQLLNAKLITQRKFDNLTKAERGGLSELDKAGFIKRQLVETRQITKHVAQILDSRMNTKYDENDKLIREVKVITLKSKLVSDFRKDFQFYKVREINNYHHAHDAYLNAVVGTALIKKYPKLESEFVYGDYKVYDVRKMIAKSEQEIGKATAKYFFYSNIMNFFKTEITLANGEIRKRPLIETNGETGEIVWDKGRDFATVRKVLSMPQVNIVKKTEVQTGGFSKESILPKRNSDKLIARKKDWDPKKYGGFDSPTVAYSVLVVAKVEKGKSKKLKSVKELLGITIMERSSFEKNPIDFLEAKGYKEVKKDLIIKLPKYSLFELENGRKRMLASAGELQKGNELALPSKYVNFLYLASHYEKLKGSPEDNEQKQLFVEQHKHYLDEIIEQISEFSKRVILADANLDKVLSAYNKHRDKPIREQAENIIHLFTLTNLGAPAAFKYFDTTIDRKRYTSTKEVLDATLIHQSITGLYETRIDLSQLGGDGGEAAAKEAAAKEAAAKEAAAKEAAAKEAAAKGGTLNIEDEYRLHETSKGPDVPLGSTWLSDFPQAWAETGGMGLAVRQAPLIIPLKATSTPVSIKQYPMSQEARLGIKPHIQRLLDQGILVPCQSPWNTPLLPVKKPGTNDYRPVQDLREVNKRVEDIHPTVPNPYNLLSGLPPSHQWYTVLDLKDAFFCLRLHPTSQSLFAFEWRDPEMGISGQLTWTRLPQGFKNSPTLFNEALHRDLADFRIQHPDLILLQYVDDLLLAATSELDCQQGTRALLQTLGDLGYRASAKKAQICQKQVKYLGYLLKEGQRWLTEARKETVMGQPTPKTPRQLREFLGKAGFCRLFIPGFAEMAAPLYPLTKPGTLFEWGPDQQKAYQEIKQALLTAPALGLPDLTKPFELFVDEKQGYAKGVLTQKLGPWRRPVAYLSKKLDPVAAGWPPCLRMVAAIAVLTKDAGKLTMGQPLVILAPHAVEALVKQPPDRWLSNARMTHYQALLLDTDRVQFGPIVALNPATLLPLPEEGLQHDCLDILAEAHGTRPDLTDQPLPDADHTWYTDGSSFLQEGQRKAGAAVTTETEVVWAKALPAGTSAQRAELIALTQALKMAEGKKLNVYTDSRYAFATAHIHGEIYRRRGWLTSEGKEIKNKDEILALLKALFLPKRLSIIHCPGHQKGNRAEARGNRMADQAAREVATRETPETSTLLAGKRTADGSEFEKRTADGSEFESPKKKAKVE

SEQ ID NO: 2542 - protein, 2096 aa, synthetic construct
MPAAKRVKLDGGDKKYSIGLDIGTNSVGWAVITDEYKVPSKKFKVLGNTDRHSIKKNLIGALLFDSGETAEATRLKRTARRRYTRRKNRICYLQEIFSNEMAKVDDSFFHRLEESFLVEEDKKHERHPIFGNIVDEVAYHEKYPTIYHLRKKLVDSTDKADLRLIYLALAHMIKFRGHFLIEGDLNPDNSDVDKLFIQLVQTYNQLFEENPINASGVDAKAILSARLSKSRRLENLIAQLPGEKKNGLFGNLIALSLGLTPNFKSNFDLAEDAKLQLSKDTYDDDLDNLLAQIGDQYADLFLAAKNLSDAILLSDILRVNTEITKAPLSASMIKRYDEHHQDLTLLKALVRQQLPEKYKEIFFDQSKNGYAGYIDGGASQEEFYKFIKPILEKMDGTEELLVKLNREDLLRKQRTFDNGSIPHQIHLGELHAILRRQEDFYPFLKDNREKIEKILTFRIPYYVGPLARGNSRFAWMTRKSEETITPWNFEEVVDKGASAQSFIERMTNFDKNLPNEKVLPKHSLLYEYFTVYNELTKVKYVTEGMRKPAFLSGEQKKAIVDLLFKTNRKVTVKQLKEDYFKKIECFDSVEISGVEDRFNASLGTYHDLLKIIKDKDFLDNEENEDILEDIVLTLTLFEDREMIEERLKTYAHLFDDKVMKQLKRRRYTGWGRLSRKLINGIRDKQSGKTILDFLKSDGFANRNFMQLIHDDSLTFKEDIQKAQVSGQGDSLHEHIANLAGSPAIKKGILQTVKVVDELVKVMGRHKPENIVIEMARENQTTQKGQKNSRERMKRIEEGIKELGSQILKEHPVENTQLQNEKLYLYYLQNGRDMYVDQELDINRLSDYDVDHIVPQSFLKDDSIDNKVLTRSDKARGKSDNVPSEEVVKKMKNYWRQLLNAKLITQRKFDNLTKAERGGLSELDKAGFIKRQLVETRQITKHVAQILDSRMNTKYDENDKLIREVKVITLKSKLVSDFRKDFQFYKVREINNYHHAHDAYLNAVVGTALIKKYPKLESEFVYGDYKVYDVRKMIAKSEQEIGKATAKYFFYSNIMNFFKTEITLANGEIRKRPLIETNGETGEIVWDKGRDFATVRKVLSMPQVNIVKKTEVQTGGFSKESILPKRNSDKLIARKKDWDPKKYGGFDSPTVAYSVLVVAKVEKGKSKKLKSVKELLGITIMERSSFEKNPIDFLEAKGYKEVKKDLIIKLPKYSLFELENGRKRMLASAGELQKGNELALPSKYVNFLYLASHYEKLKGSPEDNEQKQLFVEQHKHYLDEIIEQISEFSKRVILADANLDKVLSAYNKHRDKPIREQAENIIHLFTLTNLGAPAAFKYFDTTIDRKRYTSTKEVLDATLIHQSITGLYETRIDLSQLGGDGGPAPGSSEAAAKGGTLNIEDEYRLHETSKGPDVPLGSTWLSDFPQAWAETGGMGLAVRQAPLIIPLKATSTPVSIKQYPMSQEARLGIKPHIQRLLDQGILVPCQSPWNTPLLPVKKPGTNDYRPVQDLREVNKRVEDIHPTVPNPYNLLSGLPPSHQWYTVLDLKDAFFCLRLHPTSQSLFAFEWRDPEMGISGQLTWTRLPQGFKNSPTLFNEALHRDLADFRIQHPDLILLQYVDDLLLAATSELDCQQGTRALLQTLGDLGYRASAKKAQICQKQVKYLGYLLKEGQRWLTEARKETVMGQPTPKTPRQLREFLGKAGFCRLFIPGFAEMAAPLYPLTKPGTLFEWGPDQQKAYQEIKQALLTAPALGLPDLTKPFELFVDEKQGYAKGVLTQKLGPWRRPVAYLSKKLDPVAAGWPPCLRMVAAIAVLTKDAGKLTMGQPLVILAPHAVEALVKQPPDRWLSNARMTHYQALLLDTDRVQFGPIVALNPATLLPLPEEGLQHDCLDILAEAHGTRPDLTDQPLPDADHTWYTDGSSFLQEGQRKAGAAVTTETEVVWAKALPAGTSAQRAELIALTQALKMAEGKKLNVYTDSRYAFATAHIHGEIYRRRGWLTSEGKEIKNKDEILALLKALFLPKRLSIIHCPGHQKGNRAEARGNRMADQAAREVATRETPETSTLLAGKRTADGSEFEKRTADGSEFESPKKKAKVE

SEQ ID NO: 2543 - protein, 2094 aa, synthetic construct
MPAAKRVKLDGGDKKYSIGLDIGTNSVGWAVITDEYKVPSKKFKVLGNTDRHSIKKNLIGALLFDSGETAEATRLKRTARRRYTRRKNRICYLQEIFSNEMAKVDDSFFHRLEESFLVEEDKKHERHPIFGNIVDEVAYHEKYPTIYHLRKKLVDSTDKADLRLIYLALAHMIKFRGHFLIEGDLNPDNSDVDKLFIQLVQTYNQLFEENPINASGVDAKAILSARLSKSRRLENLIAQLPGEKKNGLFGNLIALSLGLTPNFKSNFDLAEDAKLQLSKDTYDDDLDNLLAQIGDQYADLFLAAKNLSDAILLSDILRVNTEITKAPLSASMIKRYDEHHQDLTLLKALVRQQLPEKYKEIFFDQSKNGYAGYIDGGASQEEFYKFIKPILEKMDGTEELLVKLNREDLLRKQRTFDNGSIPHQIHLGELHAILRRQEDFYPFLKDNREKIEKILTFRIPYYVGPLARGNSRFAWMTRKSEETITPWNFEEVVDKGASAQSFIERMTNFDKNLPNEKVLPKHSLLYEYFTVYNELTKVKYVTEGMRKPAFLSGEQKKAIVDLLFKTNRKVTVKQLKEDYFKKIECFDSVEISGVEDRFNASLGTYHDLLKIIKDKDFLDNEENEDILEDIVLTLTLFEDREMIEERLKTYAHLFDDKVMKQLKRRRYTGWGRLSRKLINGIRDKQSGKTILDFLKSDGFANRNFMQLIHDDSLTFKEDIQKAQVSGQGDSLHEHIANLAGSPAIKKGILQTVKVVDELVKVMGRHKPENIVIEMARENQTTQKGQKNSRERMKRIEEGIKELGSQILKEHPVENTQLQNEKLYLYYLQNGRDMYVDQELDINRLSDYDVDHIVPQSFLKDDSIDNKVLTRSDKARGKSDNVPSEEVVKKMKNYWRQLLNAKLITQRKFDNLTKAERGGLSELDKAGFIKRQLVETRQITKHVAQILDSRMNTKYDENDKLIREVKVITLKSKLVSDFRKDFQFYKVREINNYHHAHDAYLNAVVGTALIKKYPKLESEFVYGDYKVYDVRKMIAKSEQEIGKATAKYFFYSNIMNFFKTEITLANGEIRKRPLIETNGETGEIVWDKGRDFATVRKVLSMPQVNIVKKTEVQTGGFSKESILPKRNSDKLIARKKDWDPKKYGGFDSPTVAYSVLVVAKVEKGKSKKLKSVKELLGITIMERSSFEKNPIDFLEAKGYKEVKKDLIIKLPKYSLFELENGRKRMLASAGELQKGNELALPSKYVNFLYLASHYEKLKGSPEDNEQKQLFVEQHKHYLDEIIEQISEFSKRVILADANLDKVLSAYNKHRDKPIREQAENIIHLFTLTNLGAPAAFKYFDTTIDRKRYTSTKEVLDATLIHQSITGLYETRIDLSQLGGDGGGGGPAPGGSGGTLNIEDEYRLHETSKGPDVPLGSTWLSDFPQAWAETGGMGLAVRQAPLIIPLKATSTPVSIKQYPMSQEARLGIKPHIQRLLDQGILVPCQSPWNTPLLPVKKPGTNDYRPVQDLREVNKRVEDIHPTVPNPYNLLSGLPPSHQWYTVLDLKDAFFCLRLHPTSQSLFAFEWRDPEMGISGQLTWTRLPQGFKNSPTLFNEALHRDLADFRIQHPDLILLQYVDDLLLAATSELDCQQGTRALLQTLGDLGYRASAKKAQICQKQVKYLGYLLKEGQRWLTEARKETVMGQPTPKTPRQLREFLGKAGFCRLFIPGFAEMAAPLYPLTKPGTLFEWGPDQQKAYQEIKQALLTAPALGLPDLTKPFELFVDEKQGYAKGVLTQKLGPWRRPVAYLSKKLDPVAAGWPPCLRMVAAIAVLTKDAGKLTMGQPLVILAPHAVEALVKQPPDRWLSNARMTHYQALLLDTDRVQFGPIVALNPATLLPLPEEGLQHDCLDILAEAHGTRPDLTDQPLPDADHTWYTDGSSFLQEGQRKAGAAVTTETEVVWAKALPAGTSAQRAELIALTQALKMAEGKKLNVYTDSRYAFATAHIHGEIYRRRGWLTSEGKEIKNKDEILALLKALFLPKRLSIIHCPGHQKGNRAEARGNRMADQAAREVATRETPETSTLLAGKRTADGSEFEKRTADGSEFESPKKKAKVE

SEQ ID NO: 2544 - protein, 2097 aa, synthetic construct
MPAAKRVKLDGGDKKYSIGLDIGTNSVGWAVITDEYKVPSKKFKVLGNTDRHSIKKNLIGALLFDSGETAEATRLKRTARRRYTRRKNRICYLQEIFSNEMAKVDDSFFHRLEESFLVEEDKKHERHPIFGNIVDEVAYHEKYPTIYHLRKKLVDSTDKADLRLIYLALAHMIKFRGHFLIEGDLNPDNSDVDKLFIQLVQTYNQLFEENPINASGVDAKAILSARLSKSRRLENLIAQLPGEKKNGLFGNLIALSLGLTPNFKSNFDLAEDAKLQLSKDTYDDDLDNLLAQIGDQYADLFLAAKNLSDAILLSDILRVNTEITKAPLSASMIKRYDEHHQDLTLLKALVRQQLPEKYKEIFFDQSKNGYAGYIDGGASQEEFYKFIKPILEKMDGTEELLVKLNREDLLRKQRTFDNGSIPHQIHLGELHAILRRQEDFYPFLKDNREKIEKILTFRIPYYVGPLARGNSRFAWMTRKSEETITPWNFEEVVDKGASAQSFIERMTNFDKNLPNEKVLPKHSLLYEYFTVYNELTKVKYVTEGMRKPAFLSGEQKKAIVDLLFKTNRKVTVKQLKEDYFKKIECFDSVEISGVEDRFNASLGTYHDLLKIIKDKDFLDNEENEDILEDIVLTLTLFEDREMIEERLKTYAHLFDDKVMKQLKRRRYTGWGRLSRKLINGIRDKQSGKTILDFLKSDGFANRNFMQLIHDDSLTFKEDIQKAQVSGQGDSLHEHIANLAGSPAIKKGILQTVKVVDELVKVMGRHKPENIVIEMARENQTTQKGQKNSRERMKRIEEGIKELGSQILKEHPVENTQLQNEKLYLYYLQNGRDMYVDQELDINRLSDYDVDHIVPQSFLKDDSIDNKVLTRSDKARGKSDNVPSEEVVKKMKNYWRQLLNAKLITQRKFDNLTKAERGGLSELDKAGFIKRQLVETRQITKHVAQILDSRMNTKYDENDKLIREVKVITLKSKLVSDFRKDFQFYKVREINNYHHAHDAYLNAVVGTALIKKYPKLESEFVYGDYKVYDVRKMIAKSEQEIGKATAKYFFYSNIMNFFKTEITLANGEIRKRPLIETNGETGEIVWDKGRDFATVRKVLSMPQVNIVKKTEVQTGGFSKESILPKRNSDKLIARKKDWDPKKYGGFDSPTVAYSVLVVAKVEKGKSKKLKSVKELLGITIMERSSFEKNPIDFLEAKGYKEVKKDLIIKLPKYSLFELENGRKRMLASAGELQKGNELALPSKYVNFLYLASHYEKLKGSPEDNEQKQLFVEQHKHYLDEIIEQISEFSKRVILADANLDKVLSAYNKHRDKPIREQAENIIHLFTLTNLGAPAAFKYFDTTIDRKRYTSTKEVLDATLIHQSITGLYETRIDLSQLGGDGGGGSGGSGGSGGSGGTLNIEDEYRLHETSKGPDVPLGSTWLSDFPQAWAETGGMGLAVRQAPLIIPLKATSTPVSIKQYPMSQEARLGIKPHIQRLLDQGILVPCQSPWNTPLLPVKKPGTNDYRPVQDLREVNKRVEDIHPTVPNPYNLLSGLPPSHQWYTVLDLKDAFFCLRLHPTSQSLFAFEWRDPEMGISGQLTWTRLPQGFKNSPTLFNEALHRDLADFRIQHPDLILLQYVDDLLLAATSELDCQQGTRALLQTLGDLGYRASAKKAQICQKQVKYLGYLLKEGQRWLTEARKETVMGQPTPKTPRQLREFLGKAGFCRLFIPGFAEMAAPLYPLTKPGTLFEWGPDQQKAYQEIKQALLTAPALGLPDLTKPFELFVDEKQGYAKGVLTQKLGPWRRPVAYLSKKLDPVAAGWPPCLRMVAAIAVLTKDAGKLTMGQPLVILAPHAVEALVKQPPDRWLSNARMTHYQALLLDTDRVQFGPIVALNPATLLPLPEEGLQHDCLDILAEAHGTRPDLTDQPLPDADHTWYTDGSSFLQEGQRKAGAAVTTETEVVWAKALPAGTSAQRAELIALTQALKMAEGKKLNVYTDSRYAFATAHIHGEIYRRRGWLTSEGKEIKNKDEILALLKALFLPKRLSIIHCPGHQKGNRAEARGNRMADQAAREVATRETPETSTLLAGKRTADGSEFEKRTADGSEFESPKKKAKVE

SEQ ID NO: 2545 - protein, 2094 aa, synthetic construct
MPAAKRVKLDGGDKKYSIGLDIGTNSVGWAVITDEYKVPSKKFKVLGNTDRHSIKKNLIGALLFDSGETAEATRLKRTARRRYTRRKNRICYLQEIFSNEMAKVDDSFFHRLEESFLVEEDKKHERHPIFGNIVDEVAYHEKYPTIYHLRKKLVDSTDKADLRLIYLALAHMIKFRGHFLIEGDLNPDNSDVDKLFIQLVQTYNQLFEENPINASGVDAKAILSARLSKSRRLENLIAQLPGEKKNGLFGNLIALSLGLTPNFKSNFDLAEDAKLQLSKDTYDDDLDNLLAQIGDQYADLFLAAKNLSDAILLSDILRVNTEITKAPLSASMIKRYDEHHQDLTLLKALVRQQLPEKYKEIFFDQSKNGYAGYIDGGASQEEFYKFIKPILEKMDGTEELLVKLNREDLLRKQRTFDNGSIPHQIHLGELHAILRRQEDFYPFLKDNREKIEKILTFRIPYYVGPLARGNSRFAWMTRKSEETITPWNFEEVVDKGASAQSFIERMTNFDKNLPNEKVLPKHSLLYEYFTVYNELTKVKYVTEGMRKPAFLSGEQKKAIVDLLFKTNRKVTVKQLKEDYFKKIECFDSVEISGVEDRFNASLGTYHDLLKIIKDKDFLDNEENEDILEDIVLTLTLFEDREMIEERLKTYAHLFDDKVMKQLKRRRYTGWGRLSRKLINGIRDKQSGKTILDFLKSDGFANRNFMQLIHDDSLTFKEDIQKAQVSGQGDSLHEHIANLAGSPAIKKGILQTVKVVDELVKVMGRHKPENIVIEMARENQTTQKGQKNSRERMKRIEEGIKELGSQILKEHPVENTQLQNEKLYLYYLQNGRDMYVDQELDINRLSDYDVDHIVPQSFLKDDSIDNKVLTRSDKARGKSDNVPSEEVVKKMKNYWRQLLNAKLITQRKFDNLTKAERGGLSELDKAGFIKRQLVETRQITKHVAQILDSRMNTKYDENDKLIREVKVITLKSKLVSDFRKDFQFYKVREINNYHHAHDAYLNAVVGTALIKKYPKLESEFVYGDYKVYDVRKMIAKSEQEIGKATAKYFFYSNIMNFFKTEITLANGEIRKRPLIETNGETGEIVWDKGRDFATVRKVLSMPQVNIVKKTEVQTGGFSKESILPKRNSDKLIARKKDWDPKKYGGFDSPTVAYSVLVVAKVEKGKSKKLKSVKELLGITIMERSSFEKNPIDFLEAKGYKEVKKDLIIKLPKYSLFELENGRKRMLASAGELQKGNELALPSKYVNFLYLASHYEKLKGSPEDNEQKQLFVEQHKHYLDEIIEQISEFSKRVILADANLDKVLSAYNKHRDKPIREQAENIIHLFTLTNLGAPAAFKYFDTTIDRKRYTSTKEVLDATLIHQSITGLYETRIDLSQLGGDGGGGSGSSGGGGGTLNIEDEYRLHETSKGPDVPLGSTWLSDFPQAWAETGGMGLAVRQAPLIIPLKATSTPVSIKQYPMSQEARLGIKPHIQRLLDQGILVPCQSPWNTPLLPVKKPGTNDYRPVQDLREVNKRVEDIHPTVPNPYNLLSGLPPSHQWYTVLDLKDAFFCLRLHPTSQSLFAFEWRDPEMGISGQLTWTRLPQGFKNSPTLFNEALHRDLADFRIQHPDLILLQYVDDLLLAATSELDCQQGTRALLQTLGDLGYRASAKKAQICQKQVKYLGYLLKEGQRWLTEARKETVMGQPTPKTPRQLREFLGKAGFCRLFIPGFAEMAAPLYPLTKPGTLFEWGPDQQKAYQEIKQALLTAPALGLPDLTKPFELFVDEKQGYAKGVLTQKLGPWRRPVAYLSKKLDPVAAGWPPCLRMVAAIAVLTKDAGKLTMGQPLVILAPHAVEALVKQPPDRWLSNARMTHYQALLLDTDRVQFGPIVALNPATLLPLPEEGLQHDCLDILAEAHGTRPDLTDQPLPDADHTWYTDGSSFLQEGQRKAGAAVTTETEVVWAKALPAGTSAQRAELIALTQALKMAEGKKLNVYTDSRYAFATAHIHGEIYRRRGWLTSEGKEIKNKDEILALLKALFLPKRLSIIHCPGHQKGNRAEARGNRMADQAAREVATRETPETSTLLAGKRTADGSEFEKRTADGSEFESPKKKAKVE

SEQ ID NO: 2546 - protein, 2091 aa, synthetic construct
MPAAKRVKLDGGDKKYSIGLDIGTNSVGWAVITDEYKVPSKKFKVLGNTDRHSIKKNLIGALLFDSGETAEATRLKRTARRRYTRRKNRICYLQEIFSNEMAKVDDSFFHRLEESFLVEEDKKHERHPIFGNIVDEVAYHEKYPTIYHLRKKLVDSTDKADLRLIYLALAHMIKFRGHFLIEGDLNPDNSDVDKLFIQLVQTYNQLFEENPINASGVDAKAILSARLSKSRRLENLIAQLPGEKKNGLFGNLIALSLGLTPNFKSNFDLAEDAKLQLSKDTYDDDLDNLLAQIGDQYADLFLAAKNLSDAILLSDILRVNTEITKAPLSASMIKRYDEHHQDLTLLKALVRQQLPEKYKEIFFDQSKNGYAGYIDGGASQEEFYKFIKPILEKMDGTEELLVKLNREDLLRKQRTFDNGSIPHQIHLGELHAILRRQEDFYPFLKDNREKIEKILTFRIPYYVGPLARGNSRFAWMTRKSEETITPWNFEEVVDKGASAQSFIERMTNFDKNLPNEKVLPKHSLLYEYFTVYNELTKVKYVTEGMRKPAFLSGEQKKAIVDLLFKTNRKVTVKQLKEDYFKKIECFDSVEISGVEDRFNASLGTYHDLLKIIKDKDFLDNEENEDILEDIVLTLTLFEDREMIEERLKTYAHLFDDKVMKQLKRRRYTGWGRLSRKLINGIRDKQSGKTILDFLKSDGFANRNFMQLIHDDSLTFKEDIQKAQVSGQGDSLHEHIANLAGSPAIKKGILQTVKVVDELVKVMGRHKPENIVIEMARENQTTQKGQKNSRERMKRIEEGIKELGSQILKEHPVENTQLQNEKLYLYYLQNGRDMYVDQELDINRLSDYDVDHIVPQSFLKDDSIDNKVLTRSDKARGKSDNVPSEEVVKKMKNYWRQLLNAKLITQRKFDNLTKAERGGLSELDKAGFIKRQLVETRQITKHVAQILDSRMNTKYDENDKLIREVKVITLKSKLVSDFRKDFQFYKVREINNYHHAHDAYLNAVVGTALIKKYPKLESEFVYGDYKVYDVRKMIAKSEQEIGKATAKYFFYSNIMNFFKTEITLANGEIRKRPLIETNGETGEIVWDKGRDFATVRKVLSMPQVNIVKKTEVQTGGFSKESILPKRNSDKLIARKKDWDPKKYGGFDSPTVAYSVLVVAKVEKGKSKKLKSVKELLGITIMERSSFEKNPIDFLEAKGYKEVKKDLIIKLPKYSLFELENGRKRMLASAGELQKGNELALPSKYVNFLYLASHYEKLKGSPEDNEQKQLFVEQHKHYLDEIIEQISEFSKRVILADANLDKVLSAYNKHRDKPIREQAENIIHLFTLTNLGAPAAFKYFDTTIDRKRYTSTKEVLDATLIHQSITGLYETRIDLSQLGGDGGPAPGGSGGTLNIEDEYRLHETSKGPDVPLGSTWLSDFPQAWAETGGMGLAVRQAPLIIPLKATSTPVSIKQYPMSQEARLGIKPHIQRLLDQGILVPCQSPWNTPLLPVKKPGTNDYRPVQDLREVNKRVEDIHPTVPNPYNLLSGLPPSHQWYTVLDLKDAFFCLRLHPTSQSLFAFEWRDPEMGISGQLTWTRLPQGFKNSPTLFNEALHRDLADFRIQHPDLILLQYVDDLLLAATSELDCQQGTRALLQTLGDLGYRASAKKAQICQKQVKYLGYLLKEGQRWLTEARKETVMGQPTPKTPRQLREFLGKAGFCRLFIPGFAEMAAPLYPLTKPGTLFEWGPDQQKAYQEIKQALLTAPALGLPDLTKPFELFVDEKQGYAKGVLTQKLGPWRRPVAYLSKKLDPVAAGWPPCLRMVAAIAVLTKDAGKLTMGQPLVILAPHAVEALVKQPPDRWLSNARMTHYQALLLDTDRVQFGPIVALNPATLLPLPEEGLQHDCLDILAEAHGTRPDLTDQPLPDADHTWYTDGSSFLQEGQRKAGAAVTTETEVVWAKALPAGTSAQRAELIALTQALKMAEGKKLNVYTDSRYAFATAHIHGEIYRRRGWLTSEGKEIKNKDEILALLKALFLPKRLSIIHCPGHQKGNRAEARGNRMADQAAREVATRETPETSTLLAGKRTADGSEFEKRTADGSEFESPKKKAKVE

SEQ ID NO: 2547 - protein, 2091 aa, synthetic construct
MPAAKRVKLDGGDKKYSIGLDIGTNSVGWAVITDEYKVPSKKFKVLGNTDRHSIKKNLIGALLFDSGETAEATRLKRTARRRYTRRKNRICYLQEIFSNEMAKVDDSFFHRLEESFLVEEDKKHERHPIFGNIVDEVAYHEKYPTIYHLRKKLVDSTDKADLRLIYLALAHMIKFRGHFLIEGDLNPDNSDVDKLFIQLVQTYNQLFEENPINASGVDAKAILSARLSKSRRLENLIAQLPGEKKNGLFGNLIALSLGLTPNFKSNFDLAEDAKLQLSKDTYDDDLDNLLAQIGDQYADLFLAAKNLSDAILLSDILRVNTEITKAPLSASMIKRYDEHHQDLTLLKALVRQQLPEKYKEIFFDQSKNGYAGYIDGGASQEEFYKFIKPILEKMDGTEELLVKLNREDLLRKQRTFDNGSIPHQIHLGELHAILRRQEDFYPFLKDNREKIEKILTFRIPYYVGPLARGNSRFAWMTRKSEETITPWNFEEVVDKGASAQSFIERMTNFDKNLPNEKVLPKHSLLYEYFTVYNELTKVKYVTEGMRKPAFLSGEQKKAIVDLLFKTNRKVTVKQLKEDYFKKIECFDSVEISGVEDRFNASLGTYHDLLKIIKDKDFLDNEENEDILEDIVLTLTLFEDREMIEERLKTYAHLFDDKVMKQLKRRRYTGWGRLSRKLINGIRDKQSGKTILDFLKSDGFANRNFMQLIHDDSLTFKEDIQKAQVSGQGDSLHEHIANLAGSPAIKKGILQTVKVVDELVKVMGRHKPENIVIEMARENQTTQKGQKNSRERMKRIEEGIKELGSQILKEHPVENTQLQNEKLYLYYLQNGRDMYVDQELDINRLSDYDVDHIVPQSFLKDDSIDNKVLTRSDKARGKSDNVPSEEVVKKMKNYWRQLLNAKLITQRKFDNLTKAERGGLSELDKAGFIKRQLVETRQITKHVAQILDSRMNTKYDENDKLIREVKVITLKSKLVSDFRKDFQFYKVREINNYHHAHDAYLNAVVGTALIKKYPKLESEFVYGDYKVYDVRKMIAKSEQEIGKATAKYFFYSNIMNFFKTEITLANGEIRKRPLIETNGETGEIVWDKGRDFATVRKVLSMPQVNIVKKTEVQTGGFSKESILPKRNSDKLIARKKDWDPKKYGGFDSPTVAYSVLVVAKVEKGKSKKLKSVKELLGITIMERSSFEKNPIDFLEAKGYKEVKKDLIIKLPKYSLFELENGRKRMLASAGELQKGNELALPSKYVNFLYLASHYEKLKGSPEDNEQKQLFVEQHKHYLDEIIEQISEFSKRVILADANLDKVLSAYNKHRDKPIREQAENIIHLFTLTNLGAPAAFKYFDTTIDRKRYTSTKEVLDATLIHQSITGLYETRIDLSQLGGDGGGGGPAPGGTLNIEDEYRLHETSKGPDVPLGSTWLSDFPQAWAETGGMGLAVRQAPLIIPLKATSTPVSIKQYPMSQEARLGIKPHIQRLLDQGILVPCQSPWNTPLLPVKKPGTNDYRPVQDLREVNKRVEDIHPTVPNPYNLLSGLPPSHQWYTVLDLKDAFFCLRLHPTSQSLFAFEWRDPEMGISGQLTWTRLPQGFKNSPTLFNEALHRDLADFRIQHPDLILLQYVDDLLLAATSELDCQQGTRALLQTLGDLGYRASAKKAQICQKQVKYLGYLLKEGQRWLTEARKETVMGQPTPKTPRQLREFLGKAGFCRLFIPGFAEMAAPLYPLTKPGTLFEWGPDQQKAYQEIKQALLTAPALGLPDLTKPFELFVDEKQGYAKGVLTQKLGPWRRPVAYLSKKLDPVAAGWPPCLRMVAAIAVLTKDAGKLTMGQPLVILAPHAVEALVKQPPDRWLSNARMTHYQALLLDTDRVQFGPIVALNPATLLPLPEEGLQHDCLDILAEAHGTRPDLTDQPLPDADHTWYTDGSSFLQEGQRKAGAAVTTETEVVWAKALPAGTSAQRAELIALTQALKMAEGKKLNVYTDSRYAFATAHIHGEIYRRRGWLTSEGKEIKNKDEILALLKALFLPKRLSIIHCPGHQKGNRAEARGNRMADQAAREVATRETPETSTLLAGKRTADGSEFEKRTADGSEFESPKKKAKVE

SEQ ID NO: 2548 - protein, 2096 aa, synthetic construct
MPAAKRVKLDGGDKKYSIGLDIGTNSVGWAVITDEYKVPSKKFKVLGNTDRHSIKKNLIGALLFDSGETAEATRLKRTARRRYTRRKNRICYLQEIFSNEMAKVDDSFFHRLEESFLVEEDKKHERHPIFGNIVDEVAYHEKYPTIYHLRKKLVDSTDKADLRLIYLALAHMIKFRGHFLIEGDLNPDNSDVDKLFIQLVQTYNQLFEENPINASGVDAKAILSARLSKSRRLENLIAQLPGEKKNGLFGNLIALSLGLTPNFKSNFDLAEDAKLQLSKDTYDDDLDNLLAQIGDQYADLFLAAKNLSDAILLSDILRVNTEITKAPLSASMIKRYDEHHQDLTLLKALVRQQLPEKYKEIFFDQSKNGYAGYIDGGASQEEFYKFIKPILEKMDGTEELLVKLNREDLLRKQRTFDNGSIPHQIHLGELHAILRRQEDFYPFLKDNREKIEKILTFRIPYYVGPLARGNSRFAWMTRKSEETITPWNFEEVVDKGASAQSFIERMTNFDKNLPNEKVLPKHSLLYEYFTVYNELTKVKYVTEGMRKPAFLSGEQKKAIVDLLFKTNRKVTVKQLKEDYFKKIECFDSVEISGVEDRFNASLGTYHDLLKIIKDKDFLDNEENEDILEDIVLTLTLFEDREMIEERLKTYAHLFDDKVMKQLKRRRYTGWGRLSRKLINGIRDKQSGKTILDFLKSDGFANRNFMQLIHDDSLTFKEDIQKAQVSGQGDSLHEHIANLAGSPAIKKGILQTVKVVDELVKVMGRHKPENIVIEMARENQTTQKGQKNSRERMKRIEEGIKELGSQILKEHPVENTQLQNEKLYLYYLQNGRDMYVDQELDINRLSDYDVDHIVPQSFLKDDSIDNKVLTRSDKARGKSDNVPSEEVVKKMKNYWRQLLNAKLITQRKFDNLTKAERGGLSELDKAGFIKRQLVETRQITKHVAQILDSRMNTKYDENDKLIREVKVITLKSKLVSDFRKDFQFYKVREINNYHHAHDAYLNAVVGTALIKKYPKLESEFVYGDYKVYDVRKMIAKSEQEIGKATAKYFFYSNIMNFFKTEITLANGEIRKRPLIETNGETGEIVWDKGRDFATVRKVLSMPQVNIVKKTEVQTGGFSKESILPKRNSDKLIARKKDWDPKKYGGFDSPTVAYSVLVVAKVEKGKSKKLKSVKELLGITIMERSSFEKNPIDFLEAKGYKEVKKDLIIKLPKYSLFELENGRKRMLASAGELQKGNELALPSKYVNFLYLASHYEKLKGSPEDNEQKQLFVEQHKHYLDEIIEQISEFSKRVILADANLDKVLSAYNKHRDKPIREQAENIIHLFTLTNLGAPAAFKYFDTTIDRKRYTSTKEVLDATLIHQSITGLYETRIDLSQLGGDGGEAAAKGGSGSSGGTLNIEDEYRLHETSKGPDVPLGSTWLSDFPQAWAETGGMGLAVRQAPLIIPLKATSTPVSIKQYPMSQEARLGIKPHIQRLLDQGILVPCQSPWNTPLLPVKKPGTNDYRPVQDLREVNKRVEDIHPTVPNPYNLLSGLPPSHQWYTVLDLKDAFFCLRLHPTSQSLFAFEWRDPEMGISGQLTWTRLPQGFKNSPTLFNEALHRDLADFRIQHPDLILLQYVDDLLLAATSELDCQQGTRALLQTLGDLGYRASAKKAQICQKQVKYLGYLLKEGQRWLTEARKETVMGQPTPKTPRQLREFLGKAGFCRLFIPGFAEMAAPLYPLTKPGTLFEWGPDQQKAYQEIKQALLTAPALGLPDLTKPFELFVDEKQGYAKGVLTQKLGPWRRPVAYLSKKLDPVAAGWPPCLRMVAAIAVLTKDAGKLTMGQPLVILAPHAVEALVKQPPDRWLSNARMTHYQALLLDTDRVQFGPIVALNPATLLPLPEEGLQHDCLDILAEAHGTRPDLTDQPLPDADHTWYTDGSSFLQEGQRKAGAAVTTETEVVWAKALPAGTSAQRAELIALTQALKMAEGKKLNVYTDSRYAFATAHIHGEIYRRRGWLTSEGKEIKNKDEILALLKALFLPKRLSIIHCPGHQKGNRAEARGNRMADQAAREVATRETPETSTLLAGKRTADGSEFEKRTADGSEFESPKKKAKVE

SEQ ID NO: 2549 - protein, 2093 aa, synthetic construct
MPAAKRVKLDGGDKKYSIGLDIGTNSVGWAVITDEYKVPSKKFKVLGNTDRHSIKKNLIGALLFDSGETAEATRLKRTARRRYTRRKNRICYLQEIFSNEMAKVDDSFFHRLEESFLVEEDKKHERHPIFGNIVDEVAYHEKYPTIYHLRKKLVDSTDKADLRLIYLALAHMIKFRGHFLIEGDLNPDNSDVDKLFIQLVQTYNQLFEENPINASGVDAKAILSARLSKSRRLENLIAQLPGEKKNGLFGNLIALSLGLTPNFKSNFDLAEDAKLQLSKDTYDDDLDNLLAQIGDQYADLFLAAKNLSDAILLSDILRVNTEITKAPLSASMIKRYDEHHQDLTLLKALVRQQLPEKYKEIFFDQSKNGYAGYIDGGASQEEFYKFIKPILEKMDGTEELLVKLNREDLLRKQRTFDNGSIPHQIHLGELHAILRRQEDFYPFLKDNREKIEKILTFRIPYYVGPLARGNSRFAWMTRKSEETITPWNFEEVVDKGASAQSFIERMTNFDKNLPNEKVLPKHSLLYEYFTVYNELTKVKYVTEGMRKPAFLSGEQKKAIVDLLFKTNRKVTVKQLKEDYFKKIECFDSVEISGVEDRFNASLGTYHDLLKIIKDKDFLDNEENEDILEDIVLTLTLFEDREMIEERLKTYAHLFDDKVMKQLKRRRYTGWGRLSRKLINGIRDKQSGKTILDFLKSDGFANRNFMQLIHDDSLTFKEDIQKAQVSGQGDSLHEHIANLAGSPAIKKGILQTVKVVDELVKVMGRHKPENIVIEMARENQTTQKGQKNSRERMKRIEEGIKELGSQILKEHPVENTQLQNEKLYLYYLQNGRDMYVDQELDINRLSDYDVDHIVPQSFLKDDSIDNKVLTRSDKARGKSDNVPSEEVVKKMKNYWRQLLNAKLITQRKFDNLTKAERGGLSELDKAGFIKRQLVETRQITKHVAQILDSRMNTKYDENDKLIREVKVITLKSKLVSDFRKDFQFYKVREINNYHHAHDAYLNAVVGTALIKKYPKLESEFVYGDYKVYDVRKMIAKSEQEIGKATAKYFFYSNIMNFFKTEITLANGEIRKRPLIETNGETGEIVWDKGRDFATVRKVLSMPQVNIVKKTEVQTGGFSKESILPKRNSDKLIARKKDWDPKKYGGFDSPTVAYSVLVVAKVEKGKSKKLKSVKELLGITIMERSSFEKNPIDFLEAKGYKEVKKDLIIKLPKYSLFELENGRKRMLASAGELQKGNELALPSKYVNFLYLASHYEKLKGSPEDNEQKQLFVEQHKHYLDEIIEQISEFSKRVILADANLDKVLSAYNKHRDKPIREQAENIIHLFTLTNLGAPAAFKYFDTTIDRKRYTSTKEVLDATLIHQSITGLYETRIDLSQLGGDGGGGGGGGGGGGTLNIEDEYRLHETSKGPDVPLGSTWLSDFPQAWAETGGMGLAVRQAPLIIPLKATSTPVSIKQYPMSQEARLGIKPHIQRLLDQGILVPCQSPWNTPLLPVKKPGTNDYRPVQDLREVNKRVEDIHPTVPNPYNLLSGLPPSHQWYTVLDLKDAFFCLRLHPTSQSLFAFEWRDPEMGISGQLTWTRLPQGFKNSPTLFNEALHRDLADFRIQHPDLILLQYVDDLLLAATSELDCQQGTRALLQTLGDLGYRASAKKAQICQKQVKYLGYLLKEGQRWLTEARKETVMGQPTPKTPRQLREFLGKAGFCRLFIPGFAEMAAPLYPLTKPGTLFEWGPDQQKAYQEIKQALLTAPALGLPDLTKPFELFVDEKQGYAKGVLTQKLGPWRRPVAYLSKKLDPVAAGWPPCLRMVAAIAVLTKDAGKLTMGQPLVILAPHAVEALVKQPPDRWLSNARMTHYQALLLDTDRVQFGPIVALNPATLLPLPEEGLQHDCLDILAEAHGTRPDLTDQPLPDADHTWYTDGSSFLQEGQRKAGAAVTTETEVVWAKALPAGTSAQRAELIALTQALKMAEGKKLNVYTDSRYAFATAHIHGEIYRRRGWLTSEGKEIKNKDEILALLKALFLPKRLSIIHCPGHQKGNRAEARGNRMADQAAREVATRETPETSTLLAGKRTADGSEFEKRTADGSEFESPKKKAKVE

SEQ ID NO: 2550 - protein, 2096 aa, synthetic construct
MPAAKRVKLDGGDKKYSIGLDIGTNSVGWAVITDEYKVPSKKFKVLGNTDRHSIKKNLIGALLFDSGETAEATRLKRTARRRYTRRKNRICYLQEIFSNEMAKVDDSFFHRLEESFLVEEDKKHERHPIFGNIVDEVAYHEKYPTIYHLRKKLVDSTDKADLRLIYLALAHMIKFRGHFLIEGDLNPDNSDVDKLFIQLVQTYNQLFEENPINASGVDAKAILSARLSKSRRLENLIAQLPGEKKNGLFGNLIALSLGLTPNFKSNFDLAEDAKLQLSKDTYDDDLDNLLAQIGDQYADLFLAAKNLSDAILLSDILRVNTEITKAPLSASMIKRYDEHHQDLTLLKALVRQQLPEKYKEIFFDQSKNGYAGYIDGGASQEEFYKFIKPILEKMDGTEELLVKLNREDLLRKQRTFDNGSIPHQIHLGELHAILRRQEDFYPFLKDNREKIEKILTFRIPYYVGPLARGNSRFAWMTRKSEETITPWNFEEVVDKGASAQSFIERMTNFDKNLPNEKVLPKHSLLYEYFTVYNELTKVKYVTEGMRKPAFLSGEQKKAIVDLLFKTNRKVTVKQLKEDYFKKIECFDSVEISGVEDRFNASLGTYHDLLKIIKDKDFLDNEENEDILEDIVLTLTLFEDREMIEERLKTYAHLFDDKVMKQLKRRRYTGWGRLSRKLINGIRDKQSGKTILDFLKSDGFANRNFMQLIHDDSLTFKEDIQKAQVSGQGDSLHEHIANLAGSPAIKKGILQTVKVVDELVKVMGRHKPENIVIEMARENQTTQKGQKNSRERMKRIEEGIKELGSQILKEHPVENTQLQNEKLYLYYLQNGRDMYVDQELDINRLSDYDVDHIVPQSFLKDDSIDNKVLTRSDKARGKSDNVPSEEVVKKMKNYWRQLLNAKLITQRKFDNLTKAERGGLSELDKAGFIKRQLVETRQITKHVAQILDSRMNTKYDENDKLIREVKVITLKSKLVSDFRKDFQFYKVREINNYHHAHDAYLNAVVGTALIKKYPKLESEFVYGDYKVYDVRKMIAKSEQEIGKATAKYFFYSNIMNFFKTEITLANGEIRKRPLIETNGETGEIVWDKGRDFATVRKVLSMPQVNIVKKTEVQTGGFSKESILPKRNSDKLIARKKDWDPKKYGGFDSPTVAYSVLVVAKVEKGKSKKLKSVKELLGITIMERSSFEKNPIDFLEAKGYKEVKKDLIIKLPKYSLFELENGRKRMLASAGELQKGNELALPSKYVNFLYLASHYEKLKGSPEDNEQKQLFVEQHKHYLDEIIEQISEFSKRVILADANLDKVLSAYNKHRDKPIREQAENIIHLFTLTNLGAPAAFKYFDTTIDRKRYTSTKEVLDATLIHQSITGLYETRIDLSQLGGDGGGSSEAAAKGGGGGTLNIEDEYRLHETSKGPDVPLGSTWLSDFPQAWAETGGMGLAVRQAPLIIPLKATSTPVSIKQYPMSQEARLGIKPHIQRLLDQGILVPCQSPWNTPLLPVKKPGTNDYRPVQDLREVNKRVEDIHPTVPNPYNLLSGLPPSHQWYTVLDLKDAFFCLRLHPTSQSLFAFEWRDPEMGISGQLTWTRLPQGFKNSPTLFNEALHRDLADFRIQHPDLILLQYVDDLLLAATSELDCQQGTRALLQTLGDLGYRASAKKAQICQKQVKYLGYLLKEGQRWLTEARKETVMGQPTPKTPRQLREFLGKAGFCRLFIPGFAEMAAPLYPLTKPGTLFEWGPDQQKAYQEIKQALLTAPALGLPDLTKPFELFVDEKQGYAKGVLTQKLGPWRRPVAYLSKKLDPVAAGWPPCLRMVAAIAVLTKDAGKLTMGQPLVILAPHAVEALVKQPPDRWLSNARMTHYQALLLDTDRVQFGPIVALNPATLLPLPEEGLQHDCLDILAEAHGTRPDLTDQPLPDADHTWYTDGSSFLQEGQRKAGAAVTTETEVVWAKALPAGTSAQRAELIALTQALKMAEGKKLNVYTDSRYAFATAHIHGEIYRRRGWLTSEGKEIKNKDEILALLKALFLPKRLSIIHCPGHQKGNRAEARGNRMADQAAREVATRETPETSTLLAGKRTADGSEFEKRTADGSEFESPKKKAKVE

SEQ ID NO: 2551 - protein, 2096 aa, synthetic construct
MPAAKRVKLDGGDKKYSIGLDIGTNSVGWAVITDEYKVPSKKFKVLGNTDRHSIKKNLIGALLFDSGETAEATRLKRTARRRYTRRKNRICYLQEIFSNEMAKVDDSFFHRLEESFLVEEDKKHERHPIFGNIVDEVAYHEKYPTIYHLRKKLVDSTDKADLRLIYLALAHMIKFRGHFLIEGDLNPDNSDVDKLFIQLVQTYNQLFEENPINASGVDAKAILSARLSKSRRLENLIAQLPGEKKNGLFGNLIALSLGLTPNFKSNFDLAEDAKLQLSKDTYDDDLDNLLAQIGDQYADLFLAAKNLSDAILLSDILRVNTEITKAPLSASMIKRYDEHHQDLTLLKALVRQQLPEKYKEIFFDQSKNGYAGYIDGGASQEEFYKFIKPILEKMDGTEELLVKLNREDLLRKQRTFDNGSIPHQIHLGELHAILRRQEDFYPFLKDNREKIEKILTFRIPYYVGPLARGNSRFAWMTRKSEETITPWNFEEVVDKGASAQSFIERMTNFDKNLPNEKVLPKHSLLYEYFTVYNELTKVKYVTEGMRKPAFLSGEQKKAIVDLLFKTNRKVTVKQLKEDYFKKIECFDSVEISGVEDRFNASLGTYHDLLKIIKDKDFLDNEENEDILEDIVLTLTLFEDREMIEERLKTYAHLFDDKVMKQLKRRRYTGWGRLSRKLINGIRDKQSGKTILDFLKSDGFANRNFMQLIHDDSLTFKEDIQKAQVSGQGDSLHEHIANLAGSPAIKKGILQTVKVVDELVKVMGRHKPENIVIEMARENQTTQKGQKNSRERMKRIEEGIKELGSQILKEHPVENTQLQNEKLYLYYLQNGRDMYVDQELDINRLSDYDVDHIVPQSFLKDDSIDNKVLTRSDKARGKSDNVPSEEVVKKMKNYWRQLLNAKLITQRKFDNLTKAERGGLSELDKAGFIKRQLVETRQITKHVAQILDSRMNTKYDENDKLIREVKVITLKSKLVSDFRKDFQFYKVREINNYHHAHDAYLNAVVGTALIKKYPKLESEFVYGDYKVYDVRKMIAKSEQEIGKATAKYFFYSNIMNFFKTEITLANGEIRKRPLIETNGETGEIVWDKGRDFATVRKVLSMPQVNIVKKTEVQTGGFSKESILPKRNSDKLIARKKDWDPKKYGGFDSPTVAYSVLVVAKVEKGKSKKLKSVKELLGITIMERSSFEKNPIDFLEAKGYKEVKKDLIIKLPKYSLFELENGRKRMLASAGELQKGNELALPSKYVNFLYLASHYEKLKGSPEDNEQKQLFVEQHKHYLDEIIEQISEFSKRVILADANLDKVLSAYNKHRDKPIREQAENIIHLFTLTNLGAPAAFKYFDTTIDRKRYTSTKEVLDATLIHQSITGLYETRIDLSQLGGDGGEAAAKGGSGGGGGTLNIEDEYRLHETSKGPDVPLGSTWLSDFPQAWAETGGMGLAVRQAPLIIPLKATSTPVSIKQYPMSQEARLGIKPHIQRLLDQGILVPCQSPWNTPLLPVKKPGTNDYRPVQDLREVNKRVEDIHPTVPNPYNLLSGLPPSHQWYTVLDLKDAFFCLRLHPTSQSLFAFEWRDPEMGISGQLTWTRLPQGFKNSPTLFNEALHRDLADFRIQHPDLILLQYVDDLLLAATSELDCQQGTRALLQTLGDLGYRASAKKAQICQKQVKYLGYLLKEGQRWLTEARKETVMGQPTPKTPRQLREFLGKAGFCRLFIPGFAEMAAPLYPLTKPGTLFEWGPDQQKAYQEIKQALLTAPALGLPDLTKPFELFVDEKQGYAKGVLTQKLGPWRRPVAYLSKKLDPVAAGWPPCLRMVAAIAVLTKDAGKLTMGQPLVILAPHAVEALVKQPPDRWLSNARMTHYQALLLDTDRVQFGPIVALNPATLLPLPEEGLQHDCLDILAEAHGTRPDLTDQPLPDADHTWYTDGSSFLQEGQRKAGAAVTTETEVVWAKALPAGTSAQRAELIALTQALKMAEGKKLNVYTDSRYAFATAHIHGEIYRRRGWLTSEGKEIKNKDEILALLKALFLPKRLSIIHCPGHQKGNRAEARGNRMADQAAREVATRETPETSTLLAGKRTADGSEFEKRTADGSEFESPKKKAKVE

SEQ ID NO: 2552 - protein, 2094 aa, synthetic construct
MPAAKRVKLDGGDKKYSIGLDIGTNSVGWAVITDEYKVPSKKFKVLGNTDRHSIKKNLIGALLFDSGETAEATRLKRTARRRYTRRKNRICYLQEIFSNEMAKVDDSFFHRLEESFLVEEDKKHERHPIFGNIVDEVAYHEKYPTIYHLRKKLVDSTDKADLRLIYLALAHMIKFRGHFLIEGDLNPDNSDVDKLFIQLVQTYNQLFEENPINASGVDAKAILSARLSKSRRLENLIAQLPGEKKNGLFGNLIALSLGLTPNFKSNFDLAEDAKLQLSKDTYDDDLDNLLAQIGDQYADLFLAAKNLSDAILLSDILRVNTEITKAPLSASMIKRYDEHHQDLTLLKALVRQQLPEKYKEIFFDQSKNGYAGYIDGGASQEEFYKFIKPILEKMDGTEELLVKLNREDLLRKQRTFDNGSIPHQIHLGELHAILRRQEDFYPFLKDNREKIEKILTFRIPYYVGPLARGNSRFAWMTRKSEETITPWNFEEVVDKGASAQSFIERMTNFDKNLPNEKVLPKHSLLYEYFTVYNELTKVKYVTEGMRKPAFLSGEQKKAIVDLLFKTNRKVTVKQLKEDYFKKIECFDSVEISGVEDRFNASLGTYHDLLKIIKDKDFLDNEENEDILEDIVLTLTLFEDREMIEERLKTYAHLFDDKVMKQLKRRRYTGWGRLSRKLINGIRDKQSGKTILDFLKSDGFANRNFMQLIHDDSLTFKEDIQKAQVSGQGDSLHEHIANLAGSPAIKKGILQTVKVVDELVKVMGRHKPENIVIEMARENQTTQKGQKNSRERMKRIEEGIKELGSQILKEHPVENTQLQNEKLYLYYLQNGRDMYVDQELDINRLSDYDVDHIVPQSFLKDDSIDNKVLTRSDKARGKSDNVPSEEVVKKMKNYWRQLLNAKLITQRKFDNLTKAERGGLSELDKAGFIKRQLVETRQITKHVAQILDSRMNTKYDENDKLIREVKVITLKSKLVSDFRKDFQFYKVREINNYHHAHDAYLNAVVGTALIKKYPKLESEFVYGDYKVYDVRKMIAKSEQEIGKATAKYFFYSNIMNFFKTEITLANGEIRKRPLIETNGETGEIVWDKGRDFATVRKVLSMPQVNIVKKTEVQTGGFSKESILPKRNSDKLIARKKDWDPKKYGGFDSPTVAYSVLVVAKVEKGKSKKLKSVKELLGITIMERSSFEKNPIDFLEAKGYKEVKKDLIIKLPKYSLFELENGRKRMLASAGELQKGNELALPSKYVNFLYLASHYEKLKGSPEDNEQKQLFVEQHKHYLDEIIEQISEFSKRVILADANLDKVLSAYNKHRDKPIREQAENIIHLFTLTNLGAPAAFKYFDTTIDRKRYTSTKEVLDATLIHQSITGLYETRIDLSQLGGDGGGSSPAPGGSGGTLNIEDEYRLHETSKGPDVPLGSTWLSDFPQAWAETGGMGLAVRQAPLIIPLKATSTPVSIKQYPMSQEARLGIKPHIQRLLDQGILVPCQSPWNTPLLPVKKPGTNDYRPVQDLREVNKRVEDIHPTVPNPYNLLSGLPPSHQWYTVLDLKDAFFCLRLHPTSQSLFAFEWRDPEMGISGQLTWTRLPQGFKNSPTLFNEALHRDLADFRIQHPDLILLQYVDDLLLAATSELDCQQGTRALLQTLGDLGYRASAKKAQICQKQVKYLGYLLKEGQRWLTEARKETVMGQPTPKTPRQLREFLGKAGFCRLFIPGFAEMAAPLYPLTKPGTLFEWGPDQQKAYQEIKQALLTAPALGLPDLTKPFELFVDEKQGYAKGVLTQKLGPWRRPVAYLSKKLDPVAAGWPPCLRMVAAIAVLTKDAGKLTMGQPLVILAPHAVEALVKQPPDRWLSNARMTHYQALLLDTDRVQFGPIVALNPATLLPLPEEGLQHDCLDILAEAHGTRPDLTDQPLPDADHTWYTDGSSFLQEGQRKAGAAVTTETEVVWAKALPAGTSAQRAELIALTQALKMAEGKKLNVYTDSRYAFATAHIHGEIYRRRGWLTSEGKEIKNKDEILALLKALFLPKRLSIIHCPGHQKGNRAEARGNRMADQAAREVATRETPETSTLLAGKRTADGSEFEKRTADGSEFESPKKKAKVE

SEQ ID NO: 2553 - protein, 2096 aa, synthetic construct
MPAAKRVKLDGGDKKYSIGLDIGTNSVGWAVITDEYKVPSKKFKVLGNTDRHSIKKNLIGALLFDSGETAEATRLKRTARRRYTRRKNRICYLQEIFSNEMAKVDDSFFHRLEESFLVEEDKKHERHPIFGNIVDEVAYHEKYPTIYHLRKKLVDSTDKADLRLIYLALAHMIKFRGHFLIEGDLNPDNSDVDKLFIQLVQTYNQLFEENPINASGVDAKAILSARLSKSRRLENLIAQLPGEKKNGLFGNLIALSLGLTPNFKSNFDLAEDAKLQLSKDTYDDDLDNLLAQIGDQYADLFLAAKNLSDAILLSDILRVNTEITKAPLSASMIKRYDEHHQDLTLLKALVRQQLPEKYKEIFFDQSKNGYAGYIDGGASQEEFYKFIKPILEKMDGTEELLVKLNREDLLRKQRTFDNGSIPHQIHLGELHAILRRQEDFYPFLKDNREKIEKILTFRIPYYVGPLARGNSRFAWMTRKSEETITPWNFEEVVDKGASAQSFIERMTNFDKNLPNEKVLPKHSLLYEYFTVYNELTKVKYVTEGMRKPAFLSGEQKKAIVDLLFKTNRKVTVKQLKEDYFKKIECFDSVEISGVEDRFNASLGTYHDLLKIIKDKDFLDNEENEDILEDIVLTLTLFEDREMIEERLKTYAHLFDDKVMKQLKRRRYTGWGRLSRKLINGIRDKQSGKTILDFLKSDGFANRNFMQLIHDDSLTFKEDIQKAQVSGQGDSLHEHIANLAGSPAIKKGILQTVKVVDELVKVMGRHKPENIVIEMARENQTTQKGQKNSRERMKRIEEGIKELGSQILKEHPVENTQLQNEKLYLYYLQNGRDMYVDQELDINRLSDYDVDHIVPQSFLKDDSIDNKVLTRSDKARGKSDNVPSEEVVKKMKNYWRQLLNAKLITQRKFDNLTKAERGGLSELDKAGFIKRQLVETRQITKHVAQILDSRMNTKYDENDKLIREVKVITLKSKLVSDFRKDFQFYKVREINNYHHAHDAYLNAVVGTALIKKYPKLESEFVYGDYKVYDVRKMIAKSEQEIGKATAKYFFYSNIMNFFKTEITLANGEIRKRPLIETNGETGEIVWDKGRDFATVRKVLSMPQVNIVKKTEVQTGGFSKESILPKRNSDKLIARKKDWDPKKYGGFDSPTVAYSVLVVAKVEKGKSKKLKSVKELLGITIMERSSFEKNPIDFLEAKGYKEVKKDLIIKLPKYSLFELENGRKRMLASAGELQKGNELALPSKYVNFLYLASHYEKLKGSPEDNEQKQLFVEQHKHYLDEIIEQISEFSKRVILADANLDKVLSAYNKHRDKPIREQAENIIHLFTLTNLGAPAAFKYFDTTIDRKRYTSTKEVLDATLIHQSITGLYETRIDLSQLGGDGGGSSEAAAKGGSGGTLNIEDEYRLHETSKGPDVPLGSTWLSDFPQAWAETGGMGLAVRQAPLIIPLKATSTPVSIKQYPMSQEARLGIKPHIQRLLDQGILVPCQSPWNTPLLPVKKPGTNDYRPVQDLREVNKRVEDIHPTVPNPYNLLSGLPPSHQWYTVLDLKDAFFCLRLHPTSQSLFAFEWRDPEMGISGQLTWTRLPQGFKNSPTLFNEALHRDLADFRIQHPDLILLQYVDDLLLAATSELDCQQGTRALLQTLGDLGYRASAKKAQICQKQVKYLGYLLKEGQRWLTEARKETVMGQPTPKTPRQLREFLGKAGFCRLFIPGFAEMAAPLYPLTKPGTLFEWGPDQQKAYQEIKQALLTAPALGLPDLTKPFELFVDEKQGYAKGVLTQKLGPWRRPVAYLSKKLDPVAAGWPPCLRMVAAIAVLTKDAGKLTMGQPLVILAPHAVEALVKQPPDRWLSNARMTHYQALLLDTDRVQFGPIVALNPATLLPLPEEGLQHDCLDILAEAHGTRPDLTDQPLPDADHTWYTDGSSFLQEGQRKAGAAVTTETEVVWAKALPAGTSAQRAELIALTQALKMAEGKKLNVYTDSRYAFATAHIHGEIYRRRGWLTSEGKEIKNKDEILALLKALFLPKRLSIIHCPGHQKGNRAEARGNRMADQAAREVATRETPETSTLLAGKRTADGSEFEKRTADGSEFESPKKKAKVE

SEQ ID NO: 2554 - protein, 2094 aa, synthetic construct
MPAAKRVKLDGGDKKYSIGLDIGTNSVGWAVITDEYKVPSKKFKVLGNTDRHSIKKNLIGALLFDSGETAEATRLKRTARRRYTRRKNRICYLQEIFSNEMAKVDDSFFHRLEESFLVEEDKKHERHPIFGNIVDEVAYHEKYPTIYHLRKKLVDSTDKADLRLIYLALAHMIKFRGHFLIEGDLNPDNSDVDKLFIQLVQTYNQLFEENPINASGVDAKAILSARLSKSRRLENLIAQLPGEKKNGLFGNLIALSLGLTPNFKSNFDLAEDAKLQLSKDTYDDDLDNLLAQIGDQYADLFLAAKNLSDAILLSDILRVNTEITKAPLSASMIKRYDEHHQDLTLLKALVRQQLPEKYKEIFFDQSKNGYAGYIDGGASQEEFYKFIKPILEKMDGTEELLVKLNREDLLRKQRTFDNGSIPHQIHLGELHAILRRQEDFYPFLKDNREKIEKILTFRIPYYVGPLARGNSRFAWMTRKSEETITPWNFEEVVDKGASAQSFIERMTNFDKNLPNEKVLPKHSLLYEYFTVYNELTKVKYVTEGMRKPAFLSGEQKKAIVDLLFKTNRKVTVKQLKEDYFKKIECFDSVEISGVEDRFNASLGTYHDLLKIIKDKDFLDNEENEDILEDIVLTLTLFEDREMIEERLKTYAHLFDDKVMKQLKRRRYTGWGRLSRKLINGIRDKQSGKTILDFLKSDGFANRNFMQLIHDDSLTFKEDIQKAQVSGQGDSLHEHIANLAGSPAIKKGILQTVKVVDELVKVMGRHKPENIVIEMARENQTTQKGQKNSRERMKRIEEGIKELGSQILKEHPVENTQLQNEKLYLYYLQNGRDMYVDQELDINRLSDYDVDHIVPQSFLKDDSIDNKVLTRSDKARGKSDNVPSEEVVKKMKNYWRQLLNAKLITQRKFDNLTKAERGGLSELDKAGFIKRQLVETRQITKHVAQILDSRMNTKYDENDKLIREVKVITLKSKLVSDFRKDFQFYKVREINNYHHAHDAYLNAVVGTALIKKYPKLESEFVYGDYKVYDVRKMIAKSEQEIGKATAKYFFYSNIMNFFKTEITLANGEIRKRPLIETNGETGEIVWDKGRDFATVRKVLSMPQVNIVKKTEVQTGGFSKESILPKRNSDKLIARKKDWDPKKYGGFDSPTVAYSVLVVAKVEKGKSKKLKSVKELLGITIMERSSFEKNPIDFLEAKGYKEVKKDLIIKLPKYSLFELENGRKRMLASAGELQKGNELALPSKYVNFLYLASHYEKLKGSPEDNEQKQLFVEQHKHYLDEIIEQISEFSKRVILADANLDKVLSAYNKHRDKPIREQAENIIHLFTLTNLGAPAAFKYFDTTIDRKRYTSTKEVLDATLIHQSITGLYETRIDLSQLGGDGGGSSGGGPAPGGTLNIEDEYRLHETSKGPDVPLGSTWLSDFPQAWAETGGMGLAVRQAPLIIPLKATSTPVSIKQYPMSQEARLGIKPHIQRLLDQGILVPCQSPWNTPLLPVKKPGTNDYRPVQDLREVNKRVEDIHPTVPNPYNLLSGLPPSHQWYTVLDLKDAFFCLRLHPTSQSLFAFEWRDPEMGISGQLTWTRLPQGFKNSPTLFNEALHRDLADFRIQHPDLILLQYVDDLLLAATSELDCQQGTRALLQTLGDLGYRASAKKAQICQKQVKYLGYLLKEGQRWLTEARKETVMGQPTPKTPRQLREFLGKAGFCRLFIPGFAEMAAPLYPLTKPGTLFEWGPDQQKAYQEIKQALLTAPALGLPDLTKPFELFVDEKQGYAKGVLTQKLGPWRRPVAYLSKKLDPVAAGWPPCLRMVAAIAVLTKDAGKLTMGQPLVILAPHAVEALVKQPPDRWLSNARMTHYQALLLDTDRVQFGPIVALNPATLLPLPEEGLQHDCLDILAEAHGTRPDLTDQPLPDADHTWYTDGSSFLQEGQRKAGAAVTTETEVVWAKALPAGTSAQRAELIALTQALKMAEGKKLNVYTDSRYAFATAHIHGEIYRRRGWLTSEGKEIKNKDEILALLKALFLPKRLSIIHCPGHQKGNRAEARGNRMADQAAREVATRETPETSTLLAGKRTADGSEFEKRTADGSEFESPKKKAKVE

SEQ ID NO: 2555 - protein, 2100 aa, synthetic construct
MPAAKRVKLDGGDKKYSIGLDIGTNSVGWAVITDEYKVPSKKFKVLGNTDRHSIKKNLIGALLFDSGETAEATRLKRTARRRYTRRKNRICYLQEIFSNEMAKVDDSFFHRLEESFLVEEDKKHERHPIFGNIVDEVAYHEKYPTIYHLRKKLVDSTDKADLRLIYLALAHMIKFRGHFLIEGDLNPDNSDVDKLFIQLVQTYNQLFEENPINASGVDAKAILSARLSKSRRLENLIAQLPGEKKNGLFGNLIALSLGLTPNFKSNFDLAEDAKLQLSKDTYDDDLDNLLAQIGDQYADLFLAAKNLSDAILLSDILRVNTEITKAPLSASMIKRYDEHHQDLTLLKALVRQQLPEKYKEIFFDQSKNGYAGYIDGGASQEEFYKFIKPILEKMDGTEELLVKLNREDLLRKQRTFDNGSIPHQIHLGELHAILRRQEDFYPFLKDNREKIEKILTFRIPYYVGPLARGNSRFAWMTRKSEETITPWNFEEVVDKGASAQSFIERMTNFDKNLPNEKVLPKHSLLYEYFTVYNELTKVKYVTEGMRKPAFLSGEQKKAIVDLLFKTNRKVTVKQLKEDYFKKIECFDSVEISGVEDRFNASLGTYHDLLKIIKDKDFLDNEENEDILEDIVLTLTLFEDREMIEERLKTYAHLFDDKVMKQLKRRRYTGWGRLSRKLINGIRDKQSGKTILDFLKSDGFANRNFMQLIHDDSLTFKEDIQKAQVSGQGDSLHEHIANLAGSPAIKKGILQTVKVVDELVKVMGRHKPENIVIEMARENQTTQKGQKNSRERMKRIEEGIKELGSQILKEHPVENTQLQNEKLYLYYLQNGRDMYVDQELDINRLSDYDVDHIVPQSFLKDDSIDNKVLTRSDKARGKSDNVPSEEVVKKMKNYWRQLLNAKLITQRKFDNLTKAERGGLSELDKAGFIKRQLVETRQITKHVAQILDSRMNTKYDENDKLIREVKVITLKSKLVSDFRKDFQFYKVREINNYHHAHDAYLNAVVGTALIKKYPKLESEFVYGDYKVYDVRKMIAKSEQEIGKATAKYFFYSNIMNFFKTEITLANGEIRKRPLIETNGETGEIVWDKGRDFATVRKVLSMPQVNIVKKTEVQTGGFSKESILPKRNSDKLIARKKDWDPKKYGGFDSPTVAYSVLVVAKVEKGKSKKLKSVKELLGITIMERSSFEKNPIDFLEAKGYKEVKKDLIIKLPKYSLFELENGRKRMLASAGELQKGNELALPSKYVNFLYLASHYEKLKGSPEDNEQKQLFVEQHKHYLDEIIEQISEFSKRVILADANLDKVLSAYNKHRDKPIREQAENIIHLFTLTNLGAPAAFKYFDTTIDRKRYTSTKEVLDATLIHQSITGLYETRIDLSQLGGDGGGGSGGSGGSGGSGGSGGTLNIEDEYRLHETSKGPDVPLGSTWLSDFPQAWAETGGMGLAVRQAPLIIPLKATSTPVSIKQYPMSQEARLGIKPHIQRLLDQGILVPCQSPWNTPLLPVKKPGTNDYRPVQDLREVNKRVEDIHPTVPNPYNLLSGLPPSHQWYTVLDLKDAFFCLRLHPTSQSLFAFEWRDPEMGISGQLTWTRLPQGFKNSPTLFNEALHRDLADFRIQHPDLILLQYVDDLLLAATSELDCQQGTRALLQTLGDLGYRASAKKAQICQKQVKYLGYLLKEGQRWLTEARKETVMGQPTPKTPRQLREFLGKAGFCRLFIPGFAEMAAPLYPLTKPGTLFEWGPDQQKAYQEIKQALLTAPALGLPDLTKPFELFVDEKQGYAKGVLTQKLGPWRRPVAYLSKKLDPVAAGWPPCLRMVAAIAVLTKDAGKLTMGQPLVILAPHAVEALVKQPPDRWLSNARMTHYQALLLDTDRVQFGPIVALNPATLLPLPEEGLQHDCLDILAEAHGTRPDLTDQPLPDADHTWYTDGSSFLQEGQRKAGAAVTTETEVVWAKALPAGTSAQRAELIALTQALKMAEGKKLNVYTDSRYAFATAHIHGEIYRRRGWLTSEGKEIKNKDEILALLKALFLPKRLSIIHCPGHQKGNRAEARGNRMADQAAREVATRETPETSTLLAGKRTADGSEFEKRTADGSEFESPKKKAKVE

SEQ ID NO: 2556 - protein, 2096 aa, synthetic construct
MPAAKRVKLDGGDKKYSIGLDIGTNSVGWAVITDEYKVPSKKFKVLGNTDRHSIKKNLIGALLFDSGETAEATRLKRTARRRYTRRKNRICYLQEIFSNEMAKVDDSFFHRLEESFLVEEDKKHERHPIFGNIVDEVAYHEKYPTIYHLRKKLVDSTDKADLRLIYLALAHMIKFRGHFLIEGDLNPDNSDVDKLFIQLVQTYNQLFEENPINASGVDAKAILSARLSKSRRLENLIAQLPGEKKNGLFGNLIALSLGLTPNFKSNFDLAEDAKLQLSKDTYDDDLDNLLAQIGDQYADLFLAAKNLSDAILLSDILRVNTEITKAPLSASMIKRYDEHHQDLTLLKALVRQQLPEKYKEIFFDQSKNGYAGYIDGGASQEEFYKFIKPILEKMDGTEELLVKLNREDLLRKQRTFDNGSIPHQIHLGELHAILRRQEDFYPFLKDNREKIEKILTFRIPYYVGPLARGNSRFAWMTRKSEETITPWNFEEVVDKGASAQSFIERMTNFDKNLPNEKVLPKHSLLYEYFTVYNELTKVKYVTEGMRKPAFLSGEQKKAIVDLLFKTNRKVTVKQLKEDYFKKIECFDSVEISGVEDRFNASLGTYHDLLKIIKDKDFLDNEENEDILEDIVLTLTLFEDREMIEERLKTYAHLFDDKVMKQLKRRRYTGWGRLSRKLINGIRDKQSGKTILDFLKSDGFANRNFMQLIHDDSLTFKEDIQKAQVSGQGDSLHEHIANLAGSPAIKKGILQTVKVVDELVKVMGRHKPENIVIEMARENQTTQKGQKNSRERMKRIEEGIKELGSQILKEHPVENTQLQNEKLYLYYLQNGRDMYVDQELDINRLSDYDVDHIVPQSFLKDDSIDNKVLTRSDKARGKSDNVPSEEVVKKMKNYWRQLLNAKLITQRKFDNLTKAERGGLSELDKAGFIKRQLVETRQITKHVAQILDSRMNTKYDENDKLIREVKVITLKSKLVSDFRKDFQFYKVREINNYHHAHDAYLNAVVGTALIKKYPKLESEFVYGDYKVYDVRKMIAKSEQEIGKATAKYFFYSNIMNFFKTEITLANGEIRKRPLIETNGETGEIVWDKGRDFATVRKVLSMPQVNIVKKTEVQTGGFSKESILPKRNSDKLIARKKDWDPKKYGGFDSPTVAYSVLVVAKVEKGKSKKLKSVKELLGITIMERSSFEKNPIDFLEAKGYKEVKKDLIIKLPKYSLFELENGRKRMLASAGELQKGNELALPSKYVNFLYLASHYEKLKGSPEDNEQKQLFVEQHKHYLDEIIEQISEFSKRVILADANLDKVLSAYNKHRDKPIREQAENIIHLFTLTNLGAPAAFKYFDTTIDRKRYTSTKEVLDATLIHQSITGLYETRIDLSQLGGDGGEAAAKGGGPAPGGTLNIEDEYRLHETSKGPDVPLGSTWLSDFPQAWAETGGMGLAVRQAPLIIPLKATSTPVSIKQYPMSQEARLGIKPHIQRLLDQGILVPCQSPWNTPLLPVKKPGTNDYRPVQDLREVNKRVEDIHPTVPNPYNLLSGLPPSHQWYTVLDLKDAFFCLRLHPTSQSLFAFEWRDPEMGISGQLTWTRLPQGFKNSPTLFNEALHRDLADFRIQHPDLILLQYVDDLLLAATSELDCQQGTRALLQTLGDLGYRASAKKAQICQKQVKYLGYLLKEGQRWLTEARKETVMGQPTPKTPRQLREFLGKAGFCRLFIPGFAEMAAPLYPLTKPGTLFEWGPDQQKAYQEIKQALLTAPALGLPDLTKPFELFVDEKQGYAKGVLTQKLGPWRRPVAYLSKKLDPVAAGWPPCLRMVAAIAVLTKDAGKLTMGQPLVILAPHAVEALVKQPPDRWLSNARMTHYQALLLDTDRVQFGPIVALNPATLLPLPEEGLQHDCLDILAEAHGTRPDLTDQPLPDADHTWYTDGSSFLQEGQRKAGAAVTTETEVVWAKALPAGTSAQRAELIALTQALKMAEGKKLNVYTDSRYAFATAHIHGEIYRRRGWLTSEGKEIKNKDEILALLKALFLPKRLSIIHCPGHQKGNRAEARGNRMADQAAREVATRETPETSTLLAGKRTADGSEFEKRTADGSEFESPKKKAKVE

SEQ ID NO: 2557 - protein, 2094 aa, synthetic construct
MPAAKRVKLDGGDKKYSIGLDIGTNSVGWAVITDEYKVPSKKFKVLGNTDRHSIKKNLIGALLFDSGETAEATRLKRTARRRYTRRKNRICYLQEIFSNEMAKVDDSFFHRLEESFLVEEDKKHERHPIFGNIVDEVAYHEKYPTIYHLRKKLVDSTDKADLRLIYLALAHMIKFRGHFLIEGDLNPDNSDVDKLFIQLVQTYNQLFEENPINASGVDAKAILSARLSKSRRLENLIAQLPGEKKNGLFGNLIALSLGLTPNFKSNFDLAEDAKLQLSKDTYDDDLDNLLAQIGDQYADLFLAAKNLSDAILLSDILRVNTEITKAPLSASMIKRYDEHHQDLTLLKALVRQQLPEKYKEIFFDQSKNGYAGYIDGGASQEEFYKFIKPILEKMDGTEELLVKLNREDLLRKQRTFDNGSIPHQIHLGELHAILRRQEDFYPFLKDNREKIEKILTFRIPYYVGPLARGNSRFAWMTRKSEETITPWNFEEVVDKGASAQSFIERMTNFDKNLPNEKVLPKHSLLYEYFTVYNELTKVKYVTEGMRKPAFLSGEQKKAIVDLLFKTNRKVTVKQLKEDYFKKIECFDSVEISGVEDRFNASLGTYHDLLKIIKDKDFLDNEENEDILEDIVLTLTLFEDREMIEERLKTYAHLFDDKVMKQLKRRRYTGWGRLSRKLINGIRDKQSGKTILDFLKSDGFANRNFMQLIHDDSLTFKEDIQKAQVSGQGDSLHEHIANLAGSPAIKKGILQTVKVVDELVKVMGRHKPENIVIEMARENQTTQKGQKNSRERMKRIEEGIKELGSQILKEHPVENTQLQNEKLYLYYLQNGRDMYVDQELDINRLSDYDVDHIVPQSFLKDDSIDNKVLTRSDKARGKSDNVPSEEVVKKMKNYWRQLLNAKLITQRKFDNLTKAERGGLSELDKAGFIKRQLVETRQITKHVAQILDSRMNTKYDENDKLIREVKVITLKSKLVSDFRKDFQFYKVREINNYHHAHDAYLNAVVGTALIKKYPKLESEFVYGDYKVYDVRKMIAKSEQEIGKATAKYFFYSNIMNFFKTEITLANGEIRKRPLIETNGETGEIVWDKGRDFATVRKVLSMPQVNIVKKTEVQTGGFSKESILPKRNSDKLIARKKDWDPKKYGGFDSPTVAYSVLVVAKVEKGKSKKLKSVKELLGITIMERSSFEKNPIDFLEAKGYKEVKKDLIIKLPKYSLFELENGRKRMLASAGELQKGNELALPSKYVNFLYLASHYEKLKGSPEDNEQKQLFVEQHKHYLDEIIEQISEFSKRVILADANLDKVLSAYNKHRDKPIREQAENIIHLFTLTNLGAPAAFKYFDTTIDRKRYTSTKEVLDATLIHQSITGLYETRIDLSQLGGDGGGSSGSSGSSGGTLNIEDEYRLHETSKGPDVPLGSTWLSDFPQAWAETGGMGLAVRQAPLIIPLKATSTPVSIKQYPMSQEARLGIKPHIQRLLDQGILVPCQSPWNTPLLPVKKPGTNDYRPVQDLREVNKRVEDIHPTVPNPYNLLSGLPPSHQWYTVLDLKDAFFCLRLHPTSQSLFAFEWRDPEMGISGQLTWTRLPQGFKNSPTLFNEALHRDLADFRIQHPDLILLQYVDDLLLAATSELDCQQGTRALLQTLGDLGYRASAKKAQICQKQVKYLGYLLKEGQRWLTEARKETVMGQPTPKTPRQLREFLGKAGFCRLFIPGFAEMAAPLYPLTKPGTLFEWGPDQQKAYQEIKQALLTAPALGLPDLTKPFELFVDEKQGYAKGVLTQKLGPWRRPVAYLSKKLDPVAAGWPPCLRMVAAIAVLTKDAGKLTMGQPLVILAPHAVEALVKQPPDRWLSNARMTHYQALLLDTDRVQFGPIVALNPATLLPLPEEGLQHDCLDILAEAHGTRPDLTDQPLPDADHTWYTDGSSFLQEGQRKAGAAVTTETEVVWAKALPAGTSAQRAELIALTQALKMAEGKKLNVYTDSRYAFATAHIHGEIYRRRGWLTSEGKEIKNKDEILALLKALFLPKRLSIIHCPGHQKGNRAEARGNRMADQAAREVATRETPETSTLLAGKRTADGSEFEKRTADGSEFESPKKKAKVE

SEQ ID NO: 2558 - protein, 2094 aa, synthetic construct
MPAAKRVKLDGGDKKYSIGLDIGTNSVGWAVITDEYKVPSKKFKVLGNTDRHSIKKNLIGALLFDSGETAEATRLKRTARRRYTRRKNRICYLQEIFSNEMAKVDDSFFHRLEESFLVEEDKKHERHPIFGNIVDEVAYHEKYPTIYHLRKKLVDSTDKADLRLIYLALAHMIKFRGHFLIEGDLNPDNSDVDKLFIQLVQTYNQLFEENPINASGVDAKAILSARLSKSRRLENLIAQLPGEKKNGLFGNLIALSLGLTPNFKSNFDLAEDAKLQLSKDTYDDDLDNLLAQIGDQYADLFLAAKNLSDAILLSDILRVNTEITKAPLSASMIKRYDEHHQDLTLLKALVRQQLPEKYKEIFFDQSKNGYAGYIDGGASQEEFYKFIKPILEKMDGTEELLVKLNREDLLRKQRTFDNGSIPHQIHLGELHAILRRQEDFYPFLKDNREKIEKILTFRIPYYVGPLARGNSRFAWMTRKSEETITPWNFEEVVDKGASAQSFIERMTNFDKNLPNEKVLPKHSLLYEYFTVYNELTKVKYVTEGMRKPAFLSGEQKKAIVDLLFKTNRKVTVKQLKEDYFKKIECFDSVEISGVEDRFNASLGTYHDLLKIIKDKDFLDNEENEDILEDIVLTLTLFEDREMIEERLKTYAHLFDDKVMKQLKRRRYTGWGRLSRKLINGIRDKQSGKTILDFLKSDGFANRNFMQLIHDDSLTFKEDIQKAQVSGQGDSLHEHIANLAGSPAIKKGILQTVKVVDELVKVMGRHKPENIVIEMARENQTTQKGQKNSRERMKRIEEGIKELGSQILKEHPVENTQLQNEKLYLYYLQNGRDMYVDQELDINRLSDYDVDHIVPQSFLKDDSIDNKVLTRSDKARGKSDNVPSEEVVKKMKNYWRQLLNAKLITQRKFDNLTKAERGGLSELDKAGFIKRQLVETRQITKHVAQILDSRMNTKYDENDKLIREVKVITLKSKLVSDFRKDFQFYKVREINNYHHAHDAYLNAVVGTALIKKYPKLESEFVYGDYKVYDVRKMIAKSEQEIGKATAKYFFYSNIMNFFKTEITLANGEIRKRPLIETNGETGEIVWDKGRDFATVRKVLSMPQVNIVKKTEVQTGGFSKESILPKRNSDKLIARKKDWDPKKYGGFDSPTVAYSVLVVAKVEKGKSKKLKSVKELLGITIMERSSFEKNPIDFLEAKGYKEVKKDLIIKLPKYSLFELENGRKRMLASAGELQKGNELALPSKYVNFLYLASHYEKLKGSPEDNEQKQLFVEQHKHYLDEIIEQISEFSKRVILADANLDKVLSAYNKHRDKPIREQAENIIHLFTLTNLGAPAAFKYFDTTIDRKRYTSTKEVLDATLIHQSITGLYETRIDLSQLGGDGGGGSGSSPAPGGTLNIEDEYRLHETSKGPDVPLGSTWLSDFPQAWAETGGMGLAVRQAPLIIPLKATSTPVSIKQYPMSQEARLGIKPHIQRLLDQGILVPCQSPWNTPLLPVKKPGTNDYRPVQDLREVNKRVEDIHPTVPNPYNLLSGLPPSHQWYTVLDLKDAFFCLRLHPTSQSLFAFEWRDPEMGISGQLTWTRLPQGFKNSPTLFNEALHRDLADFRIQHPDLILLQYVDDLLLAATSELDCQQGTRALLQTLGDLGYRASAKKAQICQKQVKYLGYLLKEGQRWLTEARKETVMGQPTPKTPRQLREFLGKAGFCRLFIPGFAEMAAPLYPLTKPGTLFEWGPDQQKAYQEIKQALLTAPALGLPDLTKPFELFVDEKQGYAKGVLTQKLGPWRRPVAYLSKKLDPVAAGWPPCLRMVAAIAVLTKDAGKLTMGQPLVILAPHAVEALVKQPPDRWLSNARMTHYQALLLDTDRVQFGPIVALNPATLLPLPEEGLQHDCLDILAEAHGTRPDLTDQPLPDADHTWYTDGSSFLQEGQRKAGAAVTTETEVVWAKALPAGTSAQRAELIALTQALKMAEGKKLNVYTDSRYAFATAHIHGEIYRRRGWLTSEGKEIKNKDEILALLKALFLPKRLSIIHCPGHQKGNRAEARGNRMADQAAREVATRETPETSTLLAGKRTADGSEFEKRTADGSEFESPKKKAKVE

SEQ ID NO: 2559 - protein, 2091 aa, synthetic construct
MPAAKRVKLDGGDKKYSIGLDIGTNSVGWAVITDEYKVPSKKFKVLGNTDRHSIKKNLIGALLFDSGETAEATRLKRTARRRYTRRKNRICYLQEIFSNEMAKVDDSFFHRLEESFLVEEDKKHERHPIFGNIVDEVAYHEKYPTIYHLRKKLVDSTDKADLRLIYLALAHMIKFRGHFLIEGDLNPDNSDVDKLFIQLVQTYNQLFEENPINASGVDAKAILSARLSKSRRLENLIAQLPGEKKNGLFGNLIALSLGLTPNFKSNFDLAEDAKLQLSKDTYDDDLDNLLAQIGDQYADLFLAAKNLSDAILLSDILRVNTEITKAPLSASMIKRYDEHHQDLTLLKALVRQQLPEKYKEIFFDQSKNGYAGYIDGGASQEEFYKFIKPILEKMDGTEELLVKLNREDLLRKQRTFDNGSIPHQIHLGELHAILRRQEDFYPFLKDNREKIEKILTFRIPYYVGPLARGNSRFAWMTRKSEETITPWNFEEVVDKGASAQSFIERMTNFDKNLPNEKVLPKHSLLYEYFTVYNELTKVKYVTEGMRKPAFLSGEQKKAIVDLLFKTNRKVTVKQLKEDYFKKIECFDSVEISGVEDRFNASLGTYHDLLKIIKDKDFLDNEENEDILEDIVLTLTLFEDREMIEERLKTYAHLFDDKVMKQLKRRRYTGWGRLSRKLINGIRDKQSGKTILDFLKSDGFANRNFMQLIHDDSLTFKEDIQKAQVSGQGDSLHEHIANLAGSPAIKKGILQTVKVVDELVKVMGRHKPENIVIEMARENQTTQKGQKNSRERMKRIEEGIKELGSQILKEHPVENTQLQNEKLYLYYLQNGRDMYVDQELDINRLSDYDVDHIVPQSFLKDDSIDNKVLTRSDKARGKSDNVPSEEVVKKMKNYWRQLLNAKLITQRKFDNLTKAERGGLSELDKAGFIKRQLVETRQITKHVAQILDSRMNTKYDENDKLIREVKVITLKSKLVSDFRKDFQFYKVREINNYHHAHDAYLNAVVGTALIKKYPKLESEFVYGDYKVYDVRKMIAKSEQEIGKATAKYFFYSNIMNFFKTEITLANGEIRKRPLIETNGETGEIVWDKGRDFATVRKVLSMPQVNIVKKTEVQTGGFSKESILPKRNSDKLIARKKDWDPKKYGGFDSPTVAYSVLVVAKVEKGKSKKLKSVKELLGITIMERSSFEKNPIDFLEAKGYKEVKKDLIIKLPKYSLFELENGRKRMLASAGELQKGNELALPSKYVNFLYLASHYEKLKGSPEDNEQKQLFVEQHKHYLDEIIEQISEFSKRVILADANLDKVLSAYNKHRDKPIREQAENIIHLFTLTNLGAPAAFKYFDTTIDRKRYTSTKEVLDATLIHQSITGLYETRIDLSQLGGDGGGGSGGGGGTLNIEDEYRLHETSKGPDVPLGSTWLSDFPQAWAETGGMGLAVRQAPLIIPLKATSTPVSIKQYPMSQEARLGIKPHIQRLLDQGILVPCQSPWNTPLLPVKKPGTNDYRPVQDLREVNKRVEDIHPTVPNPYNLLSGLPPSHQWYTVLDLKDAFFCLRLHPTSQSLFAFEWRDPEMGISGQLTWTRLPQGFKNSPTLFNEALHRDLADFRIQHPDLILLQYVDDLLLAATSELDCQQGTRALLQTLGDLGYRASAKKAQICQKQVKYLGYLLKEGQRWLTEARKETVMGQPTPKTPRQLREFLGKAGFCRLFIPGFAEMAAPLYPLTKPGTLFEWGPDQQKAYQEIKQALLTAPALGLPDLTKPFELFVDEKQGYAKGVLTQKLGPWRRPVAYLSKKLDPVAAGWPPCLRMVAAIAVLTKDAGKLTMGQPLVILAPHAVEALVKQPPDRWLSNARMTHYQALLLDTDRVQFGPIVALNPATLLPLPEEGLQHDCLDILAEAHGTRPDLTDQPLPDADHTWYTDGSSFLQEGQRKAGAAVTTETEVVWAKALPAGTSAQRAELIALTQALKMAEGKKLNVYTDSRYAFATAHIHGEIYRRRGWLTSEGKEIKNKDEILALLKALFLPKRLSIIHCPGHQKGNRAEARGNRMADQAAREVATRETPETSTLLAGKRTADGSEFEKRTADGSEFESPKKKAKVE

SEQ ID NO: 2560 - protein, 2092 aa, synthetic construct
MPAAKRVKLDGGDKKYSIGLDIGTNSVGWAVITDEYKVPSKKFKVLGNTDRHSIKKNLIGALLFDSGETAEATRLKRTARRRYTRRKNRICYLQEIFSNEMAKVDDSFFHRLEESFLVEEDKKHERHPIFGNIVDEVAYHEKYPTIYHLRKKLVDSTDKADLRLIYLALAHMIKFRGHFLIEGDLNPDNSDVDKLFIQLVQTYNQLFEENPINASGVDAKAILSARLSKSRRLENLIAQLPGEKKNGLFGNLIALSLGLTPNFKSNFDLAEDAKLQLSKDTYDDDLDNLLAQIGDQYADLFLAAKNLSDAILLSDILRVNTEITKAPLSASMIKRYDEHHQDLTLLKALVRQQLPEKYKEIFFDQSKNGYAGYIDGGASQEEFYKFIKPILEKMDGTEELLVKLNREDLLRKQRTFDNGSIPHQIHLGELHAILRRQEDFYPFLKDNREKIEKILTFRIPYYVGPLARGNSRFAWMTRKSEETITPWNFEEVVDKGASAQSFIERMTNFDKNLPNEKVLPKHSLLYEYFTVYNELTKVKYVTEGMRKPAFLSGEQKKAIVDLLFKTNRKVTVKQLKEDYFKKIECFDSVEISGVEDRFNASLGTYHDLLKIIKDKDFLDNEENEDILEDIVLTLTLFEDREMIEERLKTYAHLFDDKVMKQLKRRRYTGWGRLSRKLINGIRDKQSGKTILDFLKSDGFANRNFMQLIHDDSLTFKEDIQKAQVSGQGDSLHEHIANLAGSPAIKKGILQTVKVVDELVKVMGRHKPENIVIEMARENQTTQKGQKNSRERMKRIEEGIKELGSQILKEHPVENTQLQNEKLYLYYLQNGRDMYVDQELDINRLSDYDVDHIVPQSFLKDDSIDNKVLTRSDKARGKSDNVPSEEVVKKMKNYWRQLLNAKLITQRKFDNLTKAERGGLSELDKAGFIKRQLVETRQITKHVAQILDSRMNTKYDENDKLIREVKVITLKSKLVSDFRKDFQFYKVREINNYHHAHDAYLNAVVGTALIKKYPKLESEFVYGDYKVYDVRKMIAKSEQEIGKATAKYFFYSNIMNFFKTEITLANGEIRKRPLIETNGETGEIVWDKGRDFATVRKVLSMPQVNIVKKTEVQTGGFSKESILPKRNSDKLIARKKDWDPKKYGGFDSPTVAYSVLVVAKVEKGKSKKLKSVKELLGITIMERSSFEKNPIDFLEAKGYKEVKKDLIIKLPKYSLFELENGRKRMLASAGELQKGNELALPSKYVNFLYLASHYEKLKGSPEDNEQKQLFVEQHKHYLDEIIEQISEFSKRVILADANLDKVLSAYNKHRDKPIREQAENIIHLFTLTNLGAPAAFKYFDTTIDRKRYTSTKEVLDATLIHQSITGLYETRIDLSQLGGDGGGGGGGGGGGTLNIEDEYRLHETSKGPDVPLGSTWLSDFPQAWAETGGMGLAVRQAPLIIPLKATSTPVSIKQYPMSQEARLGIKPHIQRLLDQGILVPCQSPWNTPLLPVKKPGTNDYRPVQDLREVNKRVEDIHPTVPNPYNLLSGLPPSHQWYTVLDLKDAFFCLRLHPTSQSLFAFEWRDPEMGISGQLTWTRLPQGFKNSPTLFNEALHRDLADFRIQHPDLILLQYVDDLLLAATSELDCQQGTRALLQTLGDLGYRASAKKAQICQKQVKYLGYLLKEGQRWLTEARKETVMGQPTPKTPRQLREFLGKAGFCRLFIPGFAEMAAPLYPLTKPGTLFEWGPDQQKAYQEIKQALLTAPALGLPDLTKPFELFVDEKQGYAKGVLTQKLGPWRRPVAYLSKKLDPVAAGWPPCLRMVAAIAVLTKDAGKLTMGQPLVILAPHAVEALVKQPPDRWLSNARMTHYQALLLDTDRVQFGPIVALNPATLLPLPEEGLQHDCLDILAEAHGTRPDLTDQPLPDADHTWYTDGSSFLQEGQRKAGAAVTTETEVVWAKALPAGTSAQRAELIALTQALKMAEGKKLNVYTDSRYAFATAHIHGEIYRRRGWLTSEGKEIKNKDEILALLKALFLPKRLSIIHCPGHQKGNRAEARGNRMADQAAREVATRETPETSTLLAGKRTADGSEFEKRTADGSEFESPKKKAKVE

SEQ ID NO: 2561 - protein, 2100 aa, synthetic construct
MPAAKRVKLDGGDKKYSIGLDIGTNSVGWAVITDEYKVPSKKFKVLGNTDRHSIKKNLIGALLFDSGETAEATRLKRTARRRYTRRKNRICYLQEIFSNEMAKVDDSFFHRLEESFLVEEDKKHERHPIFGNIVDEVAYHEKYPTIYHLRKKLVDSTDKADLRLIYLALAHMIKFRGHFLIEGDLNPDNSDVDKLFIQLVQTYNQLFEENPINASGVDAKAILSARLSKSRRLENLIAQLPGEKKNGLFGNLIALSLGLTPNFKSNFDLAEDAKLQLSKDTYDDDLDNLLAQIGDQYADLFLAAKNLSDAILLSDILRVNTEITKAPLSASMIKRYDEHHQDLTLLKALVRQQLPEKYKEIFFDQSKNGYAGYIDGGASQEEFYKFIKPILEKMDGTEELLVKLNREDLLRKQRTFDNGSIPHQIHLGELHAILRRQEDFYPFLKDNREKIEKILTFRIPYYVGPLARGNSRFAWMTRKSEETITPWNFEEVVDKGASAQSFIERMTNFDKNLPNEKVLPKHSLLYEYFTVYNELTKVKYVTEGMRKPAFLSGEQKKAIVDLLFKTNRKVTVKQLKEDYFKKIECFDSVEISGVEDRFNASLGTYHDLLKIIKDKDFLDNEENEDILEDIVLTLTLFEDREMIEERLKTYAHLFDDKVMKQLKRRRYTGWGRLSRKLINGIRDKQSGKTILDFLKSDGFANRNFMQLIHDDSLTFKEDIQKAQVSGQGDSLHEHIANLAGSPAIKKGILQTVKVVDELVKVMGRHKPENIVIEMARENQTTQKGQKNSRERMKRIEEGIKELGSQILKEHPVENTQLQNEKLYLYYLQNGRDMYVDQELDINRLSDYDVDHIVPQSFLKDDSIDNKVLTRSDKARGKSDNVPSEEVVKKMKNYWRQLLNAKLITQRKFDNLTKAERGGLSELDKAGFIKRQLVETRQITKHVAQILDSRMNTKYDENDKLIREVKVITLKSKLVSDFRKDFQFYKVREINNYHHAHDAYLNAVVGTALIKKYPKLESEFVYGDYKVYDVRKMIAKSEQEIGKATAKYFFYSNIMNFFKTEITLANGEIRKRPLIETNGETGEIVWDKGRDFATVRKVLSMPQVNIVKKTEVQTGGFSKESILPKRNSDKLIARKKDWDPKKYGGFDSPTVAYSVLVVAKVEKGKSKKLKSVKELLGITIMERSSFEKNPIDFLEAKGYKEVKKDLIIKLPKYSLFELENGRKRMLASAGELQKGNELALPSKYVNFLYLASHYEKLKGSPEDNEQKQLFVEQHKHYLDEIIEQISEFSKRVILADANLDKVLSAYNKHRDKPIREQAENIIHLFTLTNLGAPAAFKYFDTTIDRKRYTSTKEVLDATLIHQSITGLYETRIDLSQLGGDGGEAAAKGGGGSEAAAKGGTLNIEDEYRLHETSKGPDVPLGSTWLSDFPQAWAETGGMGLAVRQAPLIIPLKATSTPVSIKQYPMSQEARLGIKPHIQRLLDQGILVPCQSPWNTPLLPVKKPGTNDYRPVQDLREVNKRVEDIHPTVPNPYNLLSGLPPSHQWYTVLDLKDAFFCLRLHPTSQSLFAFEWRDPEMGISGQLTWTRLPQGFKNSPTLFNEALHRDLADFRIQHPDLILLQYVDDLLLAATSELDCQQGTRALLQTLGDLGYRASAKKAQICQKQVKYLGYLLKEGQRWLTEARKETVMGQPTPKTPRQLREFLGKAGFCRLFIPGFAEMAAPLYPLTKPGTLFEWGPDQQKAYQEIKQALLTAPALGLPDLTKPFELFVDEKQGYAKGVLTQKLGPWRRPVAYLSKKLDPVAAGWPPCLRMVAAIAVLTKDAGKLTMGQPLVILAPHAVEALVKQPPDRWLSNARMTHYQALLLDTDRVQFGPIVALNPATLLPLPEEGLQHDCLDILAEAHGTRPDLTDQPLPDADHTWYTDGSSFLQEGQRKAGAAVTTETEVVWAKALPAGTSAQRAELIALTQALKMAEGKKLNVYTDSRYAFATAHIHGEIYRRRGWLTSEGKEIKNKDEILALLKALFLPKRLSIIHCPGHQKGNRAEARGNRMADQAAREVATRETPETSTLLAGKRTADGSEFEKRTADGSEFESPKKKAKVE

SEQ ID NO: 2562 - protein, 2091 aa, synthetic construct
MPAAKRVKLDGGDKKYSIGLDIGTNSVGWAVITDEYKVPSKKFKVLGNTDRHSIKKNLIGALLFDSGETAEATRLKRTARRRYTRRKNRICYLQEIFSNEMAKVDDSFFHRLEESFLVEEDKKHERHPIFGNIVDEVAYHEKYPTIYHLRKKLVDSTDKADLRLIYLALAHMIKFRGHFLIEGDLNPDNSDVDKLFIQLVQTYNQLFEENPINASGVDAKAILSARLSKSRRLENLIAQLPGEKKNGLFGNLIALSLGLTPNFKSNFDLAEDAKLQLSKDTYDDDLDNLLAQIGDQYADLFLAAKNLSDAILLSDILRVNTEITKAPLSASMIKRYDEHHQDLTLLKALVRQQLPEKYKEIFFDQSKNGYAGYIDGGASQEEFYKFIKPILEKMDGTEELLVKLNREDLLRKQRTFDNGSIPHQIHLGELHAILRRQEDFYPFLKDNREKIEKILTFRIPYYVGPLARGNSRFAWMTRKSEETITPWNFEEVVDKGASAQSFIERMTNFDKNLPNEKVLPKHSLLYEYFTVYNELTKVKYVTEGMRKPAFLSGEQKKAIVDLLFKTNRKVTVKQLKEDYFKKIECFDSVEISGVEDRFNASLGTYHDLLKIIKDKDFLDNEENEDILEDIVLTLTLFEDREMIEERLKTYAHLFDDKVMKQLKRRRYTGWGRLSRKLINGIRDKQSGKTILDFLKSDGFANRNFMQLIHDDSLTFKEDIQKAQVSGQGDSLHEHIANLAGSPAIKKGILQTVKVVDELVKVMGRHKPENIVIEMARENQTTQKGQKNSRERMKRIEEGIKELGSQILKEHPVENTQLQNEKLYLYYLQNGRDMYVDQELDINRLSDYDVDHIVPQSFLKDDSIDNKVLTRSDKARGKSDNVPSEEVVKKMKNYWRQLLNAKLITQRKFDNLTKAERGGLSELDKAGFIKRQLVETRQITKHVAQILDSRMNTKYDENDKLIREVKVITLKSKLVSDFRKDFQFYKVREINNYHHAHDAYLNAVVGTALIKKYPKLESEFVYGDYKVYDVRKMIAKSEQEIGKATAKYFFYSNIMNFFKTEITLANGEIRKRPLIETNGETGEIVWDKGRDFATVRKVLSMPQVNIVKKTEVQTGGFSKESILPKRNSDKLIARKKDWDPKKYGGFDSPTVAYSVLVVAKVEKGKSKKLKSVKELLGITIMERSSFEKNPIDFLEAKGYKEVKKDLIIKLPKYSLFELENGRKRMLASAGELQKGNELALPSKYVNFLYLASHYEKLKGSPEDNEQKQLFVEQHKHYLDEIIEQISEFSKRVILADANLDKVLSAYNKHRDKPIREQAENIIHLFTLTNLGAPAAFKYFDTTIDRKRYTSTKEVLDATLIHQSITGLYETRIDLSQLGGDGGGGGGGGGGTLNIEDEYRLHETSKGPDVPLGSTWLSDFPQAWAETGGMGLAVRQAPLIIPLKATSTPVSIKQYPMSQEARLGIKPHIQRLLDQGILVPCQSPWNTPLLPVKKPGTNDYRPVQDLREVNKRVEDIHPTVPNPYNLLSGLPPSHQWYTVLDLKDAFFCLRLHPTSQSLFAFEWRDPEMGISGQLTWTRLPQGFKNSPTLFNEALHRDLADFRIQHPDLILLQYVDDLLLAATSELDCQQGTRALLQTLGDLGYRASAKKAQICQKQVKYLGYLLKEGQRWLTEARKETVMGQPTPKTPRQLREFLGKAGFCRLFIPGFAEMAAPLYPLTKPGTLFEWGPDQQKAYQEIKQALLTAPALGLPDLTKPFELFVDEKQGYAKGVLTQKLGPWRRPVAYLSKKLDPVAAGWPPCLRMVAAIAVLTKDAGKLTMGQPLVILAPHAVEALVKQPPDRWLSNARMTHYQALLLDTDRVQFGPIVALNPATLLPLPEEGLQHDCLDILAEAHGTRPDLTDQPLPDADHTWYTDGSSFLQEGQRKAGAAVTTETEVVWAKALPAGTSAQRAELIALTQALKMAEGKKLNVYTDSRYAFATAHIHGEIYRRRGWLTSEGKEIKNKDEILALLKALFLPKRLSIIHCPGHQKGNRAEARGNRMADQAAREVATRETPETSTLLAGKRTADGSEFEKRTADGSEFESPKKKAKVE

SEQ ID NO: 2563 - protein, 2094 aa, synthetic construct
MPAAKRVKLDGGDKKYSIGLDIGTNSVGWAVITDEYKVPSKKFKVLGNTDRHSIKKNLIGALLFDSGETAEATRLKRTARRRYTRRKNRICYLQEIFSNEMAKVDDSFFHRLEESFLVEEDKKHERHPIFGNIVDEVAYHEKYPTIYHLRKKLVDSTDKADLRLIYLALAHMIKFRGHFLIEGDLNPDNSDVDKLFIQLVQTYNQLFEENPINASGVDAKAILSARLSKSRRLENLIAQLPGEKKNGLFGNLIALSLGLTPNFKSNFDLAEDAKLQLSKDTYDDDLDNLLAQIGDQYADLFLAAKNLSDAILLSDILRVNTEITKAPLSASMIKRYDEHHQDLTLLKALVRQQLPEKYKEIFFDQSKNGYAGYIDGGASQEEFYKFIKPILEKMDGTEELLVKLNREDLLRKQRTFDNGSIPHQIHLGELHAILRRQEDFYPFLKDNREKIEKILTFRIPYYVGPLARGNSRFAWMTRKSEETITPWNFEEVVDKGASAQSFIERMTNFDKNLPNEKVLPKHSLLYEYFTVYNELTKVKYVTEGMRKPAFLSGEQKKAIVDLLFKTNRKVTVKQLKEDYFKKIECFDSVEISGVEDRFNASLGTYHDLLKIIKDKDFLDNEENEDILEDIVLTLTLFEDREMIEERLKTYAHLFDDKVMKQLKRRRYTGWGRLSRKLINGIRDKQSGKTILDFLKSDGFANRNFMQLIHDDSLTFKEDIQKAQVSGQGDSLHEHIANLAGSPAIKKGILQTVKVVDELVKVMGRHKPENIVIEMARENQTTQKGQKNSRERMKRIEEGIKELGSQILKEHPVENTQLQNEKLYLYYLQNGRDMYVDQELDINRLSDYDVDHIVPQSFLKDDSIDNKVLTRSDKARGKSDNVPSEEVVKKMKNYWRQLLNAKLITQRKFDNLTKAERGGLSELDKAGFIKRQLVETRQITKHVAQILDSRMNTKYDENDKLIREVKVITLKSKLVSDFRKDFQFYKVREINNYHHAHDAYLNAVVGTALIKKYPKLESEFVYGDYKVYDVRKMIAKSEQEIGKATAKYFFYSNIMNFFKTEITLANGEIRKRPLIETNGETGEIVWDKGRDFATVRKVLSMPQVNIVKKTEVQTGGFSKESILPKRNSDKLIARKKDWDPKKYGGFDSPTVAYSVLVVAKVEKGKSKKLKSVKELLGITIMERSSFEKNPIDFLEAKGYKEVKKDLIIKLPKYSLFELENGRKRMLASAGELQKGNELALPSKYVNFLYLASHYEKLKGSPEDNEQKQLFVEQHKHYLDEIIEQISEFSKRVILADANLDKVLSAYNKHRDKPIREQAENIIHLFTLTNLGAPAAFKYFDTTIDRKRYTSTKEVLDATLIHQSITGLYETRIDLSQLGGDGGGGSPAPGSSGGTLNIEDEYRLHETSKGPDVPLGSTWLSDFPQAWAETGGMGLAVRQAPLIIPLKATSTPVSIKQYPMSQEARLGIKPHIQRLLDQGILVPCQSPWNTPLLPVKKPGTNDYRPVQDLREVNKRVEDIHPTVPNPYNLLSGLPPSHQWYTVLDLKDAFFCLRLHPTSQSLFAFEWRDPEMGISGQLTWTRLPQGFKNSPTLFNEALHRDLADFRIQHPDLILLQYVDDLLLAATSELDCQQGTRALLQTLGDLGYRASAKKAQICQKQVKYLGYLLKEGQRWLTEARKETVMGQPTPKTPRQLREFLGKAGFCRLFIPGFAEMAAPLYPLTKPGTLFEWGPDQQKAYQEIKQALLTAPALGLPDLTKPFELFVDEKQGYAKGVLTQKLGPWRRPVAYLSKKLDPVAAGWPPCLRMVAAIAVLTKDAGKLTMGQPLVILAPHAVEALVKQPPDRWLSNARMTHYQALLLDTDRVQFGPIVALNPATLLPLPEEGLQHDCLDILAEAHGTRPDLTDQPLPDADHTWYTDGSSFLQEGQRKAGAAVTTETEVVWAKALPAGTSAQRAELIALTQALKMAEGKKLNVYTDSRYAFATAHIHGEIYRRRGWLTSEGKEIKNKDEILALLKALFLPKRLSIIHCPGHQKGNRAEARGNRMADQAAREVATRETPETSTLLAGKRTADGSEFEKRTADGSEFESPKKKAKVE

SEQ ID NO: 2564 - protein, 2096 aa, synthetic construct
MPAAKRVKLDGGDKKYSIGLDIGTNSVGWAVITDEYKVPSKKFKVLGNTDRHSIKKNLIGALLFDSGETAEATRLKRTARRRYTRRKNRICYLQEIFSNEMAKVDDSFFHRLEESFLVEEDKKHERHPIFGNIVDEVAYHEKYPTIYHLRKKLVDSTDKADLRLIYLALAHMIKFRGHFLIEGDLNPDNSDVDKLFIQLVQTYNQLFEENPINASGVDAKAILSARLSKSRRLENLIAQLPGEKKNGLFGNLIALSLGLTPNFKSNFDLAEDAKLQLSKDTYDDDLDNLLAQIGDQYADLFLAAKNLSDAILLSDILRVNTEITKAPLSASMIKRYDEHHQDLTLLKALVRQQLPEKYKEIFFDQSKNGYAGYIDGGASQEEFYKFIKPILEKMDGTEELLVKLNREDLLRKQRTFDNGSIPHQIHLGELHAILRRQEDFYPFLKDNREKIEKILTFRIPYYVGPLARGNSRFAWMTRKSEETITPWNFEEVVDKGASAQSFIERMTNFDKNLPNEKVLPKHSLLYEYFTVYNELTKVKYVTEGMRKPAFLSGEQKKAIVDLLFKTNRKVTVKQLKEDYFKKIECFDSVEISGVEDRFNASLGTYHDLLKIIKDKDFLDNEENEDILEDIVLTLTLFEDREMIEERLKTYAHLFDDKVMKQLKRRRYTGWGRLSRKLINGIRDKQSGKTILDFLKSDGFANRNFMQLIHDDSLTFKEDIQKAQVSGQGDSLHEHIANLAGSPAIKKGILQTVKVVDELVKVMGRHKPENIVIEMARENQTTQKGQKNSRERMKRIEEGIKELGSQILKEHPVENTQLQNEKLYLYYLQNGRDMYVDQELDINRLSDYDVDHIVPQSFLKDDSIDNKVLTRSDKARGKSDNVPSEEVVKKMKNYWRQLLNAKLITQRKFDNLTKAERGGLSELDKAGFIKRQLVETRQITKHVAQILDSRMNTKYDENDKLIREVKVITLKSKLVSDFRKDFQFYKVREINNYHHAHDAYLNAVVGTALIKKYPKLESEFVYGDYKVYDVRKMIAKSEQEIGKATAKYFFYSNIMNFFKTEITLANGEIRKRPLIETNGETGEIVWDKGRDFATVRKVLSMPQVNIVKKTEVQTGGFSKESILPKRNSDKLIARKKDWDPKKYGGFDSPTVAYSVLVVAKVEKGKSKKLKSVKELLGITIMERSSFEKNPIDFLEAKGYKEVKKDLIIKLPKYSLFELENGRKRMLASAGELQKGNELALPSKYVNFLYLASHYEKLKGSPEDNEQKQLFVEQHKHYLDEIIEQISEFSKRVILADANLDKVLSAYNKHRDKPIREQAENIIHLFTLTNLGAPAAFKYFDTTIDRKRYTSTKEVLDATLIHQSITGLYETRIDLSQLGGDGGPAPGGSEAAAKGGTLNIEDEYRLHETSKGPDVPLGSTWLSDFPQAWAETGGMGLAVRQAPLIIPLKATSTPVSIKQYPMSQEARLGIKPHIQRLLDQGILVPCQSPWNTPLLPVKKPGTNDYRPVQDLREVNKRVEDIHPTVPNPYNLLSGLPPSHQWYTVLDLKDAFFCLRLHPTSQSLFAFEWRDPEMGISGQLTWTRLPQGFKNSPTLFNEALHRDLADFRIQHPDLILLQYVDDLLLAATSELDCQQGTRALLQTLGDLGYRASAKKAQICQKQVKYLGYLLKEGQRWLTEARKETVMGQPTPKTPRQLREFLGKAGFCRLFIPGFAEMAAPLYPLTKPGTLFEWGPDQQKAYQEIKQALLTAPALGLPDLTKPFELFVDEKQGYAKGVLTQKLGPWRRPVAYLSKKLDPVAAGWPPCLRMVAAIAVLTKDAGKLTMGQPLVILAPHAVEALVKQPPDRWLSNARMTHYQALLLDTDRVQFGPIVALNPATLLPLPEEGLQHDCLDILAEAHGTRPDLTDQPLPDADHTWYTDGSSFLQEGQRKAGAAVTTETEVVWAKALPAGTSAQRAELIALTQALKMAEGKKLNVYTDSRYAFATAHIHGEIYRRRGWLTSEGKEIKNKDEILALLKALFLPKRLSIIHCPGHQKGNRAEARGNRMADQAAREVATRETPETSTLLAGKRTADGSEFEKRTADGSEFESPKKKAKVE

SEQ ID NO: 2565 - protein, 2094 aa, synthetic construct
MPAAKRVKLDGGDKKYSIGLDIGTNSVGWAVITDEYKVPSKKFKVLGNTDRHSIKKNLIGALLFDSGETAEATRLKRTARRRYTRRKNRICYLQEIFSNEMAKVDDSFFHRLEESFLVEEDKKHERHPIFGNIVDEVAYHEKYPTIYHLRKKLVDSTDKADLRLIYLALAHMIKFRGHFLIEGDLNPDNSDVDKLFIQLVQTYNQLFEENPINASGVDAKAILSARLSKSRRLENLIAQLPGEKKNGLFGNLIALSLGLTPNFKSNFDLAEDAKLQLSKDTYDDDLDNLLAQIGDQYADLFLAAKNLSDAILLSDILRVNTEITKAPLSASMIKRYDEHHQDLTLLKALVRQQLPEKYKEIFFDQSKNGYAGYIDGGASQEEFYKFIKPILEKMDGTEELLVKLNREDLLRKQRTFDNGSIPHQIHLGELHAILRRQEDFYPFLKDNREKIEKILTFRIPYYVGPLARGNSRFAWMTRKSEETITPWNFEEVVDKGASAQSFIERMTNFDKNLPNEKVLPKHSLLYEYFTVYNELTKVKYVTEGMRKPAFLSGEQKKAIVDLLFKTNRKVTVKQLKEDYFKKIECFDSVEISGVEDRFNASLGTYHDLLKIIKDKDFLDNEENEDILEDIVLTLTLFEDREMIEERLKTYAHLFDDKVMKQLKRRRYTGWGRLSRKLINGIRDKQSGKTILDFLKSDGFANRNFMQLIHDDSLTFKEDIQKAQVSGQGDSLHEHIANLAGSPAIKKGILQTVKVVDELVKVMGRHKPENIVIEMARENQTTQKGQKNSRERMKRIEEGIKELGSQILKEHPVENTQLQNEKLYLYYLQNGRDMYVDQELDINRLSDYDVDHIVPQSFLKDDSIDNKVLTRSDKARGKSDNVPSEEVVKKMKNYWRQLLNAKLITQRKFDNLTKAERGGLSELDKAGFIKRQLVETRQITKHVAQILDSRMNTKYDENDKLIREVKVITLKSKLVSDFRKDFQFYKVREINNYHHAHDAYLNAVVGTALIKKYPKLESEFVYGDYKVYDVRKMIAKSEQEIGKATAKYFFYSNIMNFFKTEITLANGEIRKRPLIETNGETGEIVWDKGRDFATVRKVLSMPQVNIVKKTEVQTGGFSKESILPKRNSDKLIARKKDWDPKKYGGFDSPTVAYSVLVVAKVEKGKSKKLKSVKELLGITIMERSSFEKNPIDFLEAKGYKEVKKDLIIKLPKYSLFELENGRKRMLASAGELQKGNELALPSKYVNFLYLASHYEKLKGSPEDNEQKQLFVEQHKHYLDEIIEQISEFSKRVILADANLDKVLSAYNKHRDKPIREQAENIIHLFTLTNLGAPAAFKYFDTTIDRKRYTSTKEVLDATLIHQSITGLYETRIDLSQLGGDGGGSSGGGGGSGGTLNIEDEYRLHETSKGPDVPLGSTWLSDFPQAWAETGGMGLAVRQAPLIIPLKATSTPVSIKQYPMSQEARLGIKPHIQRLLDQGILVPCQSPWNTPLLPVKKPGTNDYRPVQDLREVNKRVEDIHPTVPNPYNLLSGLPPSHQWYTVLDLKDAFFCLRLHPTSQSLFAFEWRDPEMGISGQLTWTRLPQGFKNSPTLFNEALHRDLADFRIQHPDLILLQYVDDLLLAATSELDCQQGTRALLQTLGDLGYRASAKKAQICQKQVKYLGYLLKEGQRWLTEARKETVMGQPTPKTPRQLREFLGKAGFCRLFIPGFAEMAAPLYPLTKPGTLFEWGPDQQKAYQEIKQALLTAPALGLPDLTKPFELFVDEKQGYAKGVLTQKLGPWRRPVAYLSKKLDPVAAGWPPCLRMVAAIAVLTKDAGKLTMGQPLVILAPHAVEALVKQPPDRWLSNARMTHYQALLLDTDRVQFGPIVALNPATLLPLPEEGLQHDCLDILAEAHGTRPDLTDQPLPDADHTWYTDGSSFLQEGQRKAGAAVTTETEVVWAKALPAGTSAQRAELIALTQALKMAEGKKLNVYTDSRYAFATAHIHGEIYRRRGWLTSEGKEIKNKDEILALLKALFLPKRLSIIHCPGHQKGNRAEARGNRMADQAAREVATRETPETSTLLAGKRTADGSEFEKRTADGSEFESPKKKAKVE

SEQ ID NO: 2566 - protein, 2115 aa, synthetic construct
MPAAKRVKLDGGDKKYSIGLDIGTNSVGWAVITDEYKVPSKKFKVLGNTDRHSIKKNLIGALLFDSGETAEATRLKRTARRRYTRRKNRICYLQEIFSNEMAKVDDSFFHRLEESFLVEEDKKHERHPIFGNIVDEVAYHEKYPTIYHLRKKLVDSTDKADLRLIYLALAHMIKFRGHFLIEGDLNPDNSDVDKLFIQLVQTYNQLFEENPINASGVDAKAILSARLSKSRRLENLIAQLPGEKKNGLFGNLIALSLGLTPNFKSNFDLAEDAKLQLSKDTYDDDLDNLLAQIGDQYADLFLAAKNLSDAILLSDILRVNTEITKAPLSASMIKRYDEHHQDLTLLKALVRQQLPEKYKEIFFDQSKNGYAGYIDGGASQEEFYKFIKPILEKMDGTEELLVKLNREDLLRKQRTFDNGSIPHQIHLGELHAILRRQEDFYPFLKDNREKIEKILTFRIPYYVGPLARGNSRFAWMTRKSEETITPWNFEEVVDKGASAQSFIERMTNFDKNLPNEKVLPKHSLLYEYFTVYNELTKVKYVTEGMRKPAFLSGEQKKAIVDLLFKTNRKVTVKQLKEDYFKKIECFDSVEISGVEDRFNASLGTYHDLLKIIKDKDFLDNEENEDILEDIVLTLTLFEDREMIEERLKTYAHLFDDKVMKQLKRRRYTGWGRLSRKLINGIRDKQSGKTILDFLKSDGFANRNFMQLIHDDSLTFKEDIQKAQVSGQGDSLHEHIANLAGSPAIKKGILQTVKVVDELVKVMGRHKPENIVIEMARENQTTQKGQKNSRERMKRIEEGIKELGSQILKEHPVENTQLQNEKLYLYYLQNGRDMYVDQELDINRLSDYDVDHIVPQSFLKDDSIDNKVLTRSDKARGKSDNVPSEEVVKKMKNYWRQLLNAKLITQRKFDNLTKAERGGLSELDKAGFIKRQLVETRQITKHVAQILDSRMNTKYDENDKLIREVKVITLKSKLVSDFRKDFQFYKVREINNYHHAHDAYLNAVVGTALIKKYPKLESEFVYGDYKVYDVRKMIAKSEQEIGKATAKYFFYSNIMNFFKTEITLANGEIRKRPLIETNGETGEIVWDKGRDFATVRKVLSMPQVNIVKKTEVQTGGFSKESILPKRNSDKLIARKKDWDPKKYGGFDSPTVAYSVLVVAKVEKGKSKKLKSVKELLGITIMERSSFEKNPIDFLEAKGYKEVKKDLIIKLPKYSLFELENGRKRMLASAGELQKGNELALPSKYVNFLYLASHYEKLKGSPEDNEQKQLFVEQHKHYLDEIIEQISEFSKRVILADANLDKVLSAYNKHRDKPIREQAENIIHLFTLTNLGAPAAFKYFDTTIDRKRYTSTKEVLDATLIHQSITGLYETRIDLSQLGGDGGGGGGSGGGGSGGGGSGGGGSGGGGSGGGGSGGTLNIEDEYRLHETSKGPDVPLGSTWLSDFPQAWAETGGMGLAVRQAPLIIPLKATSTPVSIKQYPMSQEARLGIKPHIQRLLDQGILVPCQSPWNTPLLPVKKPGTNDYRPVQDLREVNKRVEDIHPTVPNPYNLLSGLPPSHQWYTVLDLKDAFFCLRLHPTSQSLFAFEWRDPEMGISGQLTWTRLPQGFKNSPTLFNEALHRDLADFRIQHPDLILLQYVDDLLLAATSELDCQQGTRALLQTLGDLGYRASAKKAQICQKQVKYLGYLLKEGQRWLTEARKETVMGQPTPKTPRQLREFLGKAGFCRLFIPGFAEMAAPLYPLTKPGTLFEWGPDQQKAYQEIKQALLTAPALGLPDLTKPFELFVDEKQGYAKGVLTQKLGPWRRPVAYLSKKLDPVAAGWPPCLRMVAAIAVLTKDAGKLTMGQPLVILAPHAVEALVKQPPDRWLSNARMTHYQALLLDTDRVQFGPIVALNPATLLPLPEEGLQHDCLDILAEAHGTRPDLTDQPLPDADHTWYTDGSSFLQEGQRKAGAAVTTETEVVWAKALPAGTSAQRAELIALTQALKMAEGKKLNVYTDSRYAFATAHIHGEIYRRRGWLTSEGKEIKNKDEILALLKALFLPKRLSIIHCPGHQKGNRAEARGNRMADQAAREVATRETPETSTLLAGKRTADGSEFEKRTADGSEFESPKKKAKVE

SEQ ID NO: 2567 - protein, 2094 aa, synthetic construct
MPAAKRVKLDGGDKKYSIGLDIGTNSVGWAVITDEYKVPSKKFKVLGNTDRHSIKKNLIGALLFDSGETAEATRLKRTARRRYTRRKNRICYLQEIFSNEMAKVDDSFFHRLEESFLVEEDKKHERHPIFGNIVDEVAYHEKYPTIYHLRKKLVDSTDKADLRLIYLALAHMIKFRGHFLIEGDLNPDNSDVDKLFIQLVQTYNQLFEENPINASGVDAKAILSARLSKSRRLENLIAQLPGEKKNGLFGNLIALSLGLTPNFKSNFDLAEDAKLQLSKDTYDDDLDNLLAQIGDQYADLFLAAKNLSDAILLSDILRVNTEITKAPLSASMIKRYDEHHQDLTLLKALVRQQLPEKYKEIFFDQSKNGYAGYIDGGASQEEFYKFIKPILEKMDGTEELLVKLNREDLLRKQRTFDNGSIPHQIHLGELHAILRRQEDFYPFLKDNREKIEKILTFRIPYYVGPLARGNSRFAWMTRKSEETITPWNFEEVVDKGASAQSFIERMTNFDKNLPNEKVLPKHSLLYEYFTVYNELTKVKYVTEGMRKPAFLSGEQKKAIVDLLFKTNRKVTVKQLKEDYFKKIECFDSVEISGVEDRFNASLGTYHDLLKIIKDKDFLDNEENEDILEDIVLTLTLFEDREMIEERLKTYAHLFDDKVMKQLKRRRYTGWGRLSRKLINGIRDKQSGKTILDFLKSDGFANRNFMQLIHDDSLTFKEDIQKAQVSGQGDSLHEHIANLAGSPAIKKGILQTVKVVDELVKVMGRHKPENIVIEMARENQTTQKGQKNSRERMKRIEEGIKELGSQILKEHPVENTQLQNEKLYLYYLQNGRDMYVDQELDINRLSDYDVDHIVPQSFLKDDSIDNKVLTRSDKARGKSDNVPSEEVVKKMKNYWRQLLNAKLITQRKFDNLTKAERGGLSELDKAGFIKRQLVETRQITKHVAQILDSRMNTKYDENDKLIREVKVITLKSKLVSDFRKDFQFYKVREINNYHHAHDAYLNAVVGTALIKKYPKLESEFVYGDYKVYDVRKMIAKSEQEIGKATAKYFFYSNIMNFFKTEITLANGEIRKRPLIETNGETGEIVWDKGRDFATVRKVLSMPQVNIVKKTEVQTGGFSKESILPKRNSDKLIARKKDWDPKKYGGFDSPTVAYSVLVVAKVEKGKSKKLKSVKELLGITIMERSSFEKNPIDFLEAKGYKEVKKDLIIKLPKYSLFELENGRKRMLASAGELQKGNELALPSKYVNFLYLASHYEKLKGSPEDNEQKQLFVEQHKHYLDEIIEQISEFSKRVILADANLDKVLSAYNKHRDKPIREQAENIIHLFTLTNLGAPAAFKYFDTTIDRKRYTSTKEVLDATLIHQSITGLYETRIDLSQLGGDGGGSSGGSGGGGGTLNIEDEYRLHETSKGPDVPLGSTWLSDFPQAWAETGGMGLAVRQAPLIIPLKATSTPVSIKQYPMSQEARLGIKPHIQRLLDQGILVPCQSPWNTPLLPVKKPGTNDYRPVQDLREVNKRVEDIHPTVPNPYNLLSGLPPSHQWYTVLDLKDAFFCLRLHPTSQSLFAFEWRDPEMGISGQLTWTRLPQGFKNSPTLFNEALHRDLADFRIQHPDLILLQYVDDLLLAATSELDCQQGTRALLQTLGDLGYRASAKKAQICQKQVKYLGYLLKEGQRWLTEARKETVMGQPTPKTPRQLREFLGKAGFCRLFIPGFAEMAAPLYPLTKPGTLFEWGPDQQKAYQEIKQALLTAPALGLPDLTKPFELFVDEKQGYAKGVLTQKLGPWRRPVAYLSKKLDPVAAGWPPCLRMVAAIAVLTKDAGKLTMGQPLVILAPHAVEALVKQPPDRWLSNARMTHYQALLLDTDRVQFGPIVALNPATLLPLPEEGLQHDCLDILAEAHGTRPDLTDQPLPDADHTWYTDGSSFLQEGQRKAGAAVTTETEVVWAKALPAGTSAQRAELIALTQALKMAEGKKLNVYTDSRYAFATAHIHGEIYRRRGWLTSEGKEIKNKDEILALLKALFLPKRLSIIHCPGHQKGNRAEARGNRMADQAAREVATRETPETSTLLAGKRTADGSEFEKRTADGSEFESPKKKAKVE

SEQ ID NO: 2568 - protein, 2090 aa, synthetic construct
MPAAKRVKLDGGDKKYSIGLDIGTNSVGWAVITDEYKVPSKKFKVLGNTDRHSIKKNLIGALLFDSGETAEATRLKRTARRRYTRRKNRICYLQEIFSNEMAKVDDSFFHRLEESFLVEEDKKHERHPIFGNIVDEVAYHEKYPTIYHLRKKLVDSTDKADLRLIYLALAHMIKFRGHFLIEGDLNPDNSDVDKLFIQLVQTYNQLFEENPINASGVDAKAILSARLSKSRRLENLIAQLPGEKKNGLFGNLIALSLGLTPNFKSNFDLAEDAKLQLSKDTYDDDLDNLLAQIGDQYADLFLAAKNLSDAILLSDILRVNTEITKAPLSASMIKRYDEHHQDLTLLKALVRQQLPEKYKEIFFDQSKNGYAGYIDGGASQEEFYKFIKPILEKMDGTEELLVKLNREDLLRKQRTFDNGSIPHQIHLGELHAILRRQEDFYPFLKDNREKIEKILTFRIPYYVGPLARGNSRFAWMTRKSEETITPWNFEEVVDKGASAQSFIERMTNFDKNLPNEKVLPKHSLLYEYFTVYNELTKVKYVTEGMRKPAFLSGEQKKAIVDLLFKTNRKVTVKQLKEDYFKKIECFDSVEISGVEDRFNASLGTYHDLLKIIKDKDFLDNEENEDILEDIVLTLTLFEDREMIEERLKTYAHLFDDKVMKQLKRRRYTGWGRLSRKLINGIRDKQSGKTILDFLKSDGFANRNFMQLIHDDSLTFKEDIQKAQVSGQGDSLHEHIANLAGSPAIKKGILQTVKVVDELVKVMGRHKPENIVIEMARENQTTQKGQKNSRERMKRIEEGIKELGSQILKEHPVENTQLQNEKLYLYYLQNGRDMYVDQELDINRLSDYDVDHIVPQSFLKDDSIDNKVLTRSDKARGKSDNVPSEEVVKKMKNYWRQLLNAKLITQRKFDNLTKAERGGLSELDKAGFIKRQLVETRQITKHVAQILDSRMNTKYDENDKLIREVKVITLKSKLVSDFRKDFQFYKVREINNYHHAHDAYLNAVVGTALIKKYPKLESEFVYGDYKVYDVRKMIAKSEQEIGKATAKYFFYSNIMNFFKTEITLANGEIRKRPLIETNGETGEIVWDKGRDFATVRKVLSMPQVNIVKKTEVQTGGFSKESILPKRNSDKLIARKKDWDPKKYGGFDSPTVAYSVLVVAKVEKGKSKKLKSVKELLGITIMERSSFEKNPIDFLEAKGYKEVKKDLIIKLPKYSLFELENGRKRMLASAGELQKGNELALPSKYVNFLYLASHYEKLKGSPEDNEQKQLFVEQHKHYLDEIIEQISEFSKRVILADANLDKVLSAYNKHRDKPIREQAENIIHLFTLTNLGAPAAFKYFDTTIDRKRYTSTKEVLDATLIHQSITGLYETRIDLSQLGGDGGPAPAPGGTLNIEDEYRLHETSKGPDVPLGSTWLSDFPQAWAETGGMGLAVRQAPLIIPLKATSTPVSIKQYPMSQEARLGIKPHIQRLLDQGILVPCQSPWNTPLLPVKKPGTNDYRPVQDLREVNKRVEDIHPTVPNPYNLLSGLPPSHQWYTVLDLKDAFFCLRLHPTSQSLFAFEWRDPEMGISGQLTWTRLPQGFKNSPTLFNEALHRDLADFRIQHPDLILLQYVDDLLLAATSELDCQQGTRALLQTLGDLGYRASAKKAQICQKQVKYLGYLLKEGQRWLTEARKETVMGQPTPKTPRQLREFLGKAGFCRLFIPGFAEMAAPLYPLTKPGTLFEWGPDQQKAYQEIKQALLTAPALGLPDLTKPFELFVDEKQGYAKGVLTQKLGPWRRPVAYLSKKLDPVAAGWPPCLRMVAAIAVLTKDAGKLTMGQPLVILAPHAVEALVKQPPDRWLSNARMTHYQALLLDTDRVQFGPIVALNPATLLPLPEEGLQHDCLDILAEAHGTRPDLTDQPLPDADHTWYTDGSSFLQEGQRKAGAAVTTETEVVWAKALPAGTSAQRAELIALTQALKMAEGKKLNVYTDSRYAFATAHIHGEIYRRRGWLTSEGKEIKNKDEILALLKALFLPKRLSIIHCPGHQKGNRAEARGNRMADQAAREVATRETPETSTLLAGKRTADGSEFEKRTADGSEFESPKKKAKVE

SEQ ID NO: 2569 - protein, 2095 aa, synthetic construct
MPAAKRVKLDGGDKKYSIGLDIGTNSVGWAVITDEYKVPSKKFKVLGNTDRHSIKKNLIGALLFDSGETAEATRLKRTARRRYTRRKNRICYLQEIFSNEMAKVDDSFFHRLEESFLVEEDKKHERHPIFGNIVDEVAYHEKYPTIYHLRKKLVDSTDKADLRLIYLALAHMIKFRGHFLIEGDLNPDNSDVDKLFIQLVQTYNQLFEENPINASGVDAKAILSARLSKSRRLENLIAQLPGEKKNGLFGNLIALSLGLTPNFKSNFDLAEDAKLQLSKDTYDDDLDNLLAQIGDQYADLFLAAKNLSDAILLSDILRVNTEITKAPLSASMIKRYDEHHQDLTLLKALVRQQLPEKYKEIFFDQSKNGYAGYIDGGASQEEFYKFIKPILEKMDGTEELLVKLNREDLLRKQRTFDNGSIPHQIHLGELHAILRRQEDFYPFLKDNREKIEKILTFRIPYYVGPLARGNSRFAWMTRKSEETITPWNFEEVVDKGASAQSFIERMTNFDKNLPNEKVLPKHSLLYEYFTVYNELTKVKYVTEGMRKPAFLSGEQKKAIVDLLFKTNRKVTVKQLKEDYFKKIECFDSVEISGVEDRFNASLGTYHDLLKIIKDKDFLDNEENEDILEDIVLTLTLFEDREMIEERLKTYAHLFDDKVMKQLKRRRYTGWGRLSRKLINGIRDKQSGKTILDFLKSDGFANRNFMQLIHDDSLTFKEDIQKAQVSGQGDSLHEHIANLAGSPAIKKGILQTVKVVDELVKVMGRHKPENIVIEMARENQTTQKGQKNSRERMKRIEEGIKELGSQILKEHPVENTQLQNEKLYLYYLQNGRDMYVDQELDINRLSDYDVDHIVPQSFLKDDSIDNKVLTRSDKARGKSDNVPSEEVVKKMKNYWRQLLNAKLITQRKFDNLTKAERGGLSELDKAGFIKRQLVETRQITKHVAQILDSRMNTKYDENDKLIREVKVITLKSKLVSDFRKDFQFYKVREINNYHHAHDAYLNAVVGTALIKKYPKLESEFVYGDYKVYDVRKMIAKSEQEIGKATAKYFFYSNIMNFFKTEITLANGEIRKRPLIETNGETGEIVWDKGRDFATVRKVLSMPQVNIVKKTEVQTGGFSKESILPKRNSDKLIARKKDWDPKKYGGFDSPTVAYSVLVVAKVEKGKSKKLKSVKELLGITIMERSSFEKNPIDFLEAKGYKEVKKDLIIKLPKYSLFELENGRKRMLASAGELQKGNELALPSKYVNFLYLASHYEKLKGSPEDNEQKQLFVEQHKHYLDEIIEQISEFSKRVILADANLDKVLSAYNKHRDKPIREQAENIIHLFTLTNLGAPAAFKYFDTTIDRKRYTSTKEVLDATLIHQSITGLYETRIDLSQLGGDGGEAAAKEAAAKGGTLNIEDEYRLHETSKGPDVPLGSTWLSDFPQAWAETGGMGLAVRQAPLIIPLKATSTPVSIKQYPMSQEARLGIKPHIQRLLDQGILVPCQSPWNTPLLPVKKPGTNDYRPVQDLREVNKRVEDIHPTVPNPYNLLSGLPPSHQWYTVLDLKDAFFCLRLHPTSQSLFAFEWRDPEMGISGQLTWTRLPQGFKNSPTLFNEALHRDLADFRIQHPDLILLQYVDDLLLAATSELDCQQGTRALLQTLGDLGYRASAKKAQICQKQVKYLGYLLKEGQRWLTEARKETVMGQPTPKTPRQLREFLGKAGFCRLFIPGFAEMAAPLYPLTKPGTLFEWGPDQQKAYQEIKQALLTAPALGLPDLTKPFELFVDEKQGYAKGVLTQKLGPWRRPVAYLSKKLDPVAAGWPPCLRMVAAIAVLTKDAGKLTMGQPLVILAPHAVEALVKQPPDRWLSNARMTHYQALLLDTDRVQFGPIVALNPATLLPLPEEGLQHDCLDILAEAHGTRPDLTDQPLPDADHTWYTDGSSFLQEGQRKAGAAVTTETEVVWAKALPAGTSAQRAELIALTQALKMAEGKKLNVYTDSRYAFATAHIHGEIYRRRGWLTSEGKEIKNKDEILALLKALFLPKRLSIIHCPGHQKGNRAEARGNRMADQAAREVATRETPETSTLLAGKRTADGSEFEKRTADGSEFESPKKKAKVE

SEQ ID NO: 2570 - protein, 2096 aa, synthetic construct
MPAAKRVKLDGGDKKYSIGLDIGTNSVGWAVITDEYKVPSKKFKVLGNTDRHSIKKNLIGALLFDSGETAEATRLKRTARRRYTRRKNRICYLQEIFSNEMAKVDDSFFHRLEESFLVEEDKKHERHPIFGNIVDEVAYHEKYPTIYHLRKKLVDSTDKADLRLIYLALAHMIKFRGHFLIEGDLNPDNSDVDKLFIQLVQTYNQLFEENPINASGVDAKAILSARLSKSRRLENLIAQLPGEKKNGLFGNLIALSLGLTPNFKSNFDLAEDAKLQLSKDTYDDDLDNLLAQIGDQYADLFLAAKNLSDAILLSDILRVNTEITKAPLSASMIKRYDEHHQDLTLLKALVRQQLPEKYKEIFFDQSKNGYAGYIDGGASQEEFYKFIKPILEKMDGTEELLVKLNREDLLRKQRTFDNGSIPHQIHLGELHAILRRQEDFYPFLKDNREKIEKILTFRIPYYVGPLARGNSRFAWMTRKSEETITPWNFEEVVDKGASAQSFIERMTNFDKNLPNEKVLPKHSLLYEYFTVYNELTKVKYVTEGMRKPAFLSGEQKKAIVDLLFKTNRKVTVKQLKEDYFKKIECFDSVEISGVEDRFNASLGTYHDLLKIIKDKDFLDNEENEDILEDIVLTLTLFEDREMIEERLKTYAHLFDDKVMKQLKRRRYTGWGRLSRKLINGIRDKQSGKTILDFLKSDGFANRNFMQLIHDDSLTFKEDIQKAQVSGQGDSLHEHIANLAGSPAIKKGILQTVKVVDELVKVMGRHKPENIVIEMARENQTTQKGQKNSRERMKRIEEGIKELGSQILKEHPVENTQLQNEKLYLYYLQNGRDMYVDQELDINRLSDYDVDHIVPQSFLKDDSIDNKVLTRSDKARGKSDNVPSEEVVKKMKNYWRQLLNAKLITQRKFDNLTKAERGGLSELDKAGFIKRQLVETRQITKHVAQILDSRMNTKYDENDKLIREVKVITLKSKLVSDFRKDFQFYKVREINNYHHAHDAYLNAVVGTALIKKYPKLESEFVYGDYKVYDVRKMIAKSEQEIGKATAKYFFYSNIMNFFKTEITLANGEIRKRPLIETNGETGEIVWDKGRDFATVRKVLSMPQVNIVKKTEVQTGGFSKESILPKRNSDKLIARKKDWDPKKYGGFDSPTVAYSVLVVAKVEKGKSKKLKSVKELLGITIMERSSFEKNPIDFLEAKGYKEVKKDLIIKLPKYSLFELENGRKRMLASAGELQKGNELALPSKYVNFLYLASHYEKLKGSPEDNEQKQLFVEQHKHYLDEIIEQISEFSKRVILADANLDKVLSAYNKHRDKPIREQAENIIHLFTLTNLGAPAAFKYFDTTIDRKRYTSTKEVLDATLIHQSITGLYETRIDLSQLGGDGGGSSGGSEAAAKGGTLNIEDEYRLHETSKGPDVPLGSTWLSDFPQAWAETGGMGLAVRQAPLIIPLKATSTPVSIKQYPMSQEARLGIKPHIQRLLDQGILVPCQSPWNTPLLPVKKPGTNDYRPVQDLREVNKRVEDIHPTVPNPYNLLSGLPPSHQWYTVLDLKDAFFCLRLHPTSQSLFAFEWRDPEMGISGQLTWTRLPQGFKNSPTLFNEALHRDLADFRIQHPDLILLQYVDDLLLAATSELDCQQGTRALLQTLGDLGYRASAKKAQICQKQVKYLGYLLKEGQRWLTEARKETVMGQPTPKTPRQLREFLGKAGFCRLFIPGFAEMAAPLYPLTKPGTLFEWGPDQQKAYQEIKQALLTAPALGLPDLTKPFELFVDEKQGYAKGVLTQKLGPWRRPVAYLSKKLDPVAAGWPPCLRMVAAIAVLTKDAGKLTMGQPLVILAPHAVEALVKQPPDRWLSNARMTHYQALLLDTDRVQFGPIVALNPATLLPLPEEGLQHDCLDILAEAHGTRPDLTDQPLPDADHTWYTDGSSFLQEGQRKAGAAVTTETEVVWAKALPAGTSAQRAELIALTQALKMAEGKKLNVYTDSRYAFATAHIHGEIYRRRGWLTSEGKEIKNKDEILALLKALFLPKRLSIIHCPGHQKGNRAEARGNRMADQAAREVATRETPETSTLLAGKRTADGSEFEKRTADGSEFESPKKKAKVE

SEQ ID NO: 2571 - protein, 2094 aa, synthetic construct
MPAAKRVKLDGGDKKYSIGLDIGTNSVGWAVITDEYKVPSKKFKVLGNTDRHSIKKNLIGALLFDSGETAEATRLKRTARRRYTRRKNRICYLQEIFSNEMAKVDDSFFHRLEESFLVEEDKKHERHPIFGNIVDEVAYHEKYPTIYHLRKKLVDSTDKADLRLIYLALAHMIKFRGHFLIEGDLNPDNSDVDKLFIQLVQTYNQLFEENPINASGVDAKAILSARLSKSRRLENLIAQLPGEKKNGLFGNLIALSLGLTPNFKSNFDLAEDAKLQLSKDTYDDDLDNLLAQIGDQYADLFLAAKNLSDAILLSDILRVNTEITKAPLSASMIKRYDEHHQDLTLLKALVRQQLPEKYKEIFFDQSKNGYAGYIDGGASQEEFYKFIKPILEKMDGTEELLVKLNREDLLRKQRTFDNGSIPHQIHLGELHAILRRQEDFYPFLKDNREKIEKILTFRIPYYVGPLARGNSRFAWMTRKSEETITPWNFEEVVDKGASAQSFIERMTNFDKNLPNEKVLPKHSLLYEYFTVYNELTKVKYVTEGMRKPAFLSGEQKKAIVDLLFKTNRKVTVKQLKEDYFKKIECFDSVEISGVEDRFNASLGTYHDLLKIIKDKDFLDNEENEDILEDIVLTLTLFEDREMIEERLKTYAHLFDDKVMKQLKRRRYTGWGRLSRKLINGIRDKQSGKTILDFLKSDGFANRNFMQLIHDDSLTFKEDIQKAQVSGQGDSLHEHIANLAGSPAIKKGILQTVKVVDELVKVMGRHKPENIVIEMARENQTTQKGQKNSRERMKRIEEGIKELGSQILKEHPVENTQLQNEKLYLYYLQNGRDMYVDQELDINRLSDYDVDHIVPQSFLKDDSIDNKVLTRSDKARGKSDNVPSEEVVKKMKNYWRQLLNAKLITQRKFDNLTKAERGGLSELDKAGFIKRQLVETRQITKHVAQILDSRMNTKYDENDKLIREVKVITLKSKLVSDFRKDFQFYKVREINNYHHAHDAYLNAVVGTALIKKYPKLESEFVYGDYKVYDVRKMIAKSEQEIGKATAKYFFYSNIMNFFKTEITLANGEIRKRPLIETNGETGEIVWDKGRDFATVRKVLSMPQVNIVKKTEVQTGGFSKESILPKRNSDKLIARKKDWDPKKYGGFDSPTVAYSVLVVAKVEKGKSKKLKSVKELLGITIMERSSFEKNPIDFLEAKGYKEVKKDLIIKLPKYSLFELENGRKRMLASAGELQKGNELALPSKYVNFLYLASHYEKLKGSPEDNEQKQLFVEQHKHYLDEIIEQISEFSKRVILADANLDKVLSAYNKHRDKPIREQAENIIHLFTLTNLGAPAAFKYFDTTIDRKRYTSTKEVLDATLIHQSITGLYETRIDLSQLGGDGGGGGGSSGGSGGTLNIEDEYRLHETSKGPDVPLGSTWLSDFPQAWAETGGMGLAVRQAPLIIPLKATSTPVSIKQYPMSQEARLGIKPHIQRLLDQGILVPCQSPWNTPLLPVKKPGTNDYRPVQDLREVNKRVEDIHPTVPNPYNLLSGLPPSHQWYTVLDLKDAFFCLRLHPTSQSLFAFEWRDPEMGISGQLTWTRLPQGFKNSPTLFNEALHRDLADFRIQHPDLILLQYVDDLLLAATSELDCQQGTRALLQTLGDLGYRASAKKAQICQKQVKYLGYLLKEGQRWLTEARKETVMGQPTPKTPRQLREFLGKAGFCRLFIPGFAEMAAPLYPLTKPGTLFEWGPDQQKAYQEIKQALLTAPALGLPDLTKPFELFVDEKQGYAKGVLTQKLGPWRRPVAYLSKKLDPVAAGWPPCLRMVAAIAVLTKDAGKLTMGQPLVILAPHAVEALVKQPPDRWLSNARMTHYQALLLDTDRVQFGPIVALNPATLLPLPEEGLQHDCLDILAEAHGTRPDLTDQPLPDADHTWYTDGSSFLQEGQRKAGAAVTTETEVVWAKALPAGTSAQRAELIALTQALKMAEGKKLNVYTDSRYAFATAHIHGEIYRRRGWLTSEGKEIKNKDEILALLKALFLPKRLSIIHCPGHQKGNRAEARGNRMADQAAREVATRETPETSTLLAGKRTADGSEFEKRTADGSEFESPKKKAKVE

SEQ ID NO: 2572 - protein, 2091 aa, synthetic construct
MPAAKRVKLDGGDKKYSIGLDIGTNSVGWAVITDEYKVPSKKFKVLGNTDRHSIKKNLIGALLFDSGETAEATRLKRTARRRYTRRKNRICYLQEIFSNEMAKVDDSFFHRLEESFLVEEDKKHERHPIFGNIVDEVAYHEKYPTIYHLRKKLVDSTDKADLRLIYLALAHMIKFRGHFLIEGDLNPDNSDVDKLFIQLVQTYNQLFEENPINASGVDAKAILSARLSKSRRLENLIAQLPGEKKNGLFGNLIALSLGLTPNFKSNFDLAEDAKLQLSKDTYDDDLDNLLAQIGDQYADLFLAAKNLSDAILLSDILRVNTEITKAPLSASMIKRYDEHHQDLTLLKALVRQQLPEKYKEIFFDQSKNGYAGYIDGGASQEEFYKFIKPILEKMDGTEELLVKLNREDLLRKQRTFDNGSIPHQIHLGELHAILRRQEDFYPFLKDNREKIEKILTFRIPYYVGPLARGNSRFAWMTRKSEETITPWNFEEVVDKGASAQSFIERMTNFDKNLPNEKVLPKHSLLYEYFTVYNELTKVKYVTEGMRKPAFLSGEQKKAIVDLLFKTNRKVTVKQLKEDYFKKIECFDSVEISGVEDRFNASLGTYHDLLKIIKDKDFLDNEENEDILEDIVLTLTLFEDREMIEERLKTYAHLFDDKVMKQLKRRRYTGWGRLSRKLINGIRDKQSGKTILDFLKSDGFANRNFMQLIHDDSLTFKEDIQKAQVSGQGDSLHEHIANLAGSPAIKKGILQTVKVVDELVKVMGRHKPENIVIEMARENQTTQKGQKNSRERMKRIEEGIKELGSQILKEHPVENTQLQNEKLYLYYLQNGRDMYVDQELDINRLSDYDVDHIVPQSFLKDDSIDNKVLTRSDKARGKSDNVPSEEVVKKMKNYWRQLLNAKLITQRKFDNLTKAERGGLSELDKAGFIKRQLVETRQITKHVAQILDSRMNTKYDENDKLIREVKVITLKSKLVSDFRKDFQFYKVREINNYHHAHDAYLNAVVGTALIKKYPKLESEFVYGDYKVYDVRKMIAKSEQEIGKATAKYFFYSNIMNFFKTEITLANGEIRKRPLIETNGETGEIVWDKGRDFATVRKVLSMPQVNIVKKTEVQTGGFSKESILPKRNSDKLIARKKDWDPKKYGGFDSPTVAYSVLVVAKVEKGKSKKLKSVKELLGITIMERSSFEKNPIDFLEAKGYKEVKKDLIIKLPKYSLFELENGRKRMLASAGELQKGNELALPSKYVNFLYLASHYEKLKGSPEDNEQKQLFVEQHKHYLDEIIEQISEFSKRVILADANLDKVLSAYNKHRDKPIREQAENIIHLFTLTNLGAPAAFKYFDTTIDRKRYTSTKEVLDATLIHQSITGLYETRIDLSQLGGDGGGSSPAPGGTLNIEDEYRLHETSKGPDVPLGSTWLSDFPQAWAETGGMGLAVRQAPLIIPLKATSTPVSIKQYPMSQEARLGIKPHIQRLLDQGILVPCQSPWNTPLLPVKKPGTNDYRPVQDLREVNKRVEDIHPTVPNPYNLLSGLPPSHQWYTVLDLKDAFFCLRLHPTSQSLFAFEWRDPEMGISGQLTWTRLPQGFKNSPTLFNEALHRDLADFRIQHPDLILLQYVDDLLLAATSELDCQQGTRALLQTLGDLGYRASAKKAQICQKQVKYLGYLLKEGQRWLTEARKETVMGQPTPKTPRQLREFLGKAGFCRLFIPGFAEMAAPLYPLTKPGTLFEWGPDQQKAYQEIKQALLTAPALGLPDLTKPFELFVDEKQGYAKGVLTQKLGPWRRPVAYLSKKLDPVAAGWPPCLRMVAAIAVLTKDAGKLTMGQPLVILAPHAVEALVKQPPDRWLSNARMTHYQALLLDTDRVQFGPIVALNPATLLPLPEEGLQHDCLDILAEAHGTRPDLTDQPLPDADHTWYTDGSSFLQEGQRKAGAAVTTETEVVWAKALPAGTSAQRAELIALTQALKMAEGKKLNVYTDSRYAFATAHIHGEIYRRRGWLTSEGKEIKNKDEILALLKALFLPKRLSIIHCPGHQKGNRAEARGNRMADQAAREVATRETPETSTLLAGKRTADGSEFEKRTADGSEFESPKKKAKVE

SEQ ID NO: 2573 - protein, 2094 aa, synthetic construct
MPAAKRVKLDGGDKKYSIGLDIGTNSVGWAVITDEYKVPSKKFKVLGNTDRHSIKKNLIGALLFDSGETAEATRLKRTARRRYTRRKNRICYLQEIFSNEMAKVDDSFFHRLEESFLVEEDKKHERHPIFGNIVDEVAYHEKYPTIYHLRKKLVDSTDKADLRLIYLALAHMIKFRGHFLIEGDLNPDNSDVDKLFIQLVQTYNQLFEENPINASGVDAKAILSARLSKSRRLENLIAQLPGEKKNGLFGNLIALSLGLTPNFKSNFDLAEDAKLQLSKDTYDDDLDNLLAQIGDQYADLFLAAKNLSDAILLSDILRVNTEITKAPLSASMIKRYDEHHQDLTLLKALVRQQLPEKYKEIFFDQSKNGYAGYIDGGASQEEFYKFIKPILEKMDGTEELLVKLNREDLLRKQRTFDNGSIPHQIHLGELHAILRRQEDFYPFLKDNREKIEKILTFRIPYYVGPLARGNSRFAWMTRKSEETITPWNFEEVVDKGASAQSFIERMTNFDKNLPNEKVLPKHSLLYEYFTVYNELTKVKYVTEGMRKPAFLSGEQKKAIVDLLFKTNRKVTVKQLKEDYFKKIECFDSVEISGVEDRFNASLGTYHDLLKIIKDKDFLDNEENEDILEDIVLTLTLFEDREMIEERLKTYAHLFDDKVMKQLKRRRYTGWGRLSRKLINGIRDKQSGKTILDFLKSDGFANRNFMQLIHDDSLTFKEDIQKAQVSGQGDSLHEHIANLAGSPAIKKGILQTVKVVDELVKVMGRHKPENIVIEMARENQTTQKGQKNSRERMKRIEEGIKELGSQILKEHPVENTQLQNEKLYLYYLQNGRDMYVDQELDINRLSDYDVDHIVPQSFLKDDSIDNKVLTRSDKARGKSDNVPSEEVVKKMKNYWRQLLNAKLITQRKFDNLTKAERGGLSELDKAGFIKRQLVETRQITKHVAQILDSRMNTKYDENDKLIREVKVITLKSKLVSDFRKDFQFYKVREINNYHHAHDAYLNAVVGTALIKKYPKLESEFVYGDYKVYDVRKMIAKSEQEIGKATAKYFFYSNIMNFFKTEITLANGEIRKRPLIETNGETGEIVWDKGRDFATVRKVLSMPQVNIVKKTEVQTGGFSKESILPKRNSDKLIARKKDWDPKKYGGFDSPTVAYSVLVVAKVEKGKSKKLKSVKELLGITIMERSSFEKNPIDFLEAKGYKEVKKDLIIKLPKYSLFELENGRKRMLASAGELQKGNELALPSKYVNFLYLASHYEKLKGSPEDNEQKQLFVEQHKHYLDEIIEQISEFSKRVILADANLDKVLSAYNKHRDKPIREQAENIIHLFTLTNLGAPAAFKYFDTTIDRKRYTSTKEVLDATLIHQSITGLYETRIDLSQLGGDGGGGSPAPGGGGGTLNIEDEYRLHETSKGPDVPLGSTWLSDFPQAWAETGGMGLAVRQAPLIIPLKATSTPVSIKQYPMSQEARLGIKPHIQRLLDQGILVPCQSPWNTPLLPVKKPGTNDYRPVQDLREVNKRVEDIHPTVPNPYNLLSGLPPSHQWYTVLDLKDAFFCLRLHPTSQSLFAFEWRDPEMGISGQLTWTRLPQGFKNSPTLFNEALHRDLADFRIQHPDLILLQYVDDLLLAATSELDCQQGTRALLQTLGDLGYRASAKKAQICQKQVKYLGYLLKEGQRWLTEARKETVMGQPTPKTPRQLREFLGKAGFCRLFIPGFAEMAAPLYPLTKPGTLFEWGPDQQKAYQEIKQALLTAPALGLPDLTKPFELFVDEKQGYAKGVLTQKLGPWRRPVAYLSKKLDPVAAGWPPCLRMVAAIAVLTKDAGKLTMGQPLVILAPHAVEALVKQPPDRWLSNARMTHYQALLLDTDRVQFGPIVALNPATLLPLPEEGLQHDCLDILAEAHGTRPDLTDQPLPDADHTWYTDGSSFLQEGQRKAGAAVTTETEVVWAKALPAGTSAQRAELIALTQALKMAEGKKLNVYTDSRYAFATAHIHGEIYRRRGWLTSEGKEIKNKDEILALLKALFLPKRLSIIHCPGHQKGNRAEARGNRMADQAAREVATRETPETSTLLAGKRTADGSEFEKRTADGSEFESPKKKAKVE

SEQ ID NO: 2574 - protein, 2094 aa, synthetic construct
MPAAKRVKLDGGDKKYSIGLDIGTNSVGWAVITDEYKVPSKKFKVLGNTDRHSIKKNLIGALLFDSGETAEATRLKRTARRRYTRRKNRICYLQEIFSNEMAKVDDSFFHRLEESFLVEEDKKHERHPIFGNIVDEVAYHEKYPTIYHLRKKLVDSTDKADLRLIYLALAHMIKFRGHFLIEGDLNPDNSDVDKLFIQLVQTYNQLFEENPINASGVDAKAILSARLSKSRRLENLIAQLPGEKKNGLFGNLIALSLGLTPNFKSNFDLAEDAKLQLSKDTYDDDLDNLLAQIGDQYADLFLAAKNLSDAILLSDILRVNTEITKAPLSASMIKRYDEHHQDLTLLKALVRQQLPEKYKEIFFDQSKNGYAGYIDGGASQEEFYKFIKPILEKMDGTEELLVKLNREDLLRKQRTFDNGSIPHQIHLGELHAILRRQEDFYPFLKDNREKIEKILTFRIPYYVGPLARGNSRFAWMTRKSEETITPWNFEEVVDKGASAQSFIERMTNFDKNLPNEKVLPKHSLLYEYFTVYNELTKVKYVTEGMRKPAFLSGEQKKAIVDLLFKTNRKVTVKQLKEDYFKKIECFDSVEISGVEDRFNASLGTYHDLLKIIKDKDFLDNEENEDILEDIVLTLTLFEDREMIEERLKTYAHLFDDKVMKQLKRRRYTGWGRLSRKLINGIRDKQSGKTILDFLKSDGFANRNFMQLIHDDSLTFKEDIQKAQVSGQGDSLHEHIANLAGSPAIKKGILQTVKVVDELVKVMGRHKPENIVIEMARENQTTQKGQKNSRERMKRIEEGIKELGSQILKEHPVENTQLQNEKLYLYYLQNGRDMYVDQELDINRLSDYDVDHIVPQSFLKDDSIDNKVLTRSDKARGKSDNVPSEEVVKKMKNYWRQLLNAKLITQRKFDNLTKAERGGLSELDKAGFIKRQLVETRQITKHVAQILDSRMNTKYDENDKLIREVKVITLKSKLVSDFRKDFQFYKVREINNYHHAHDAYLNAVVGTALIKKYPKLESEFVYGDYKVYDVRKMIAKSEQEIGKATAKYFFYSNIMNFFKTEITLANGEIRKRPLIETNGETGEIVWDKGRDFATVRKVLSMPQVNIVKKTEVQTGGFSKESILPKRNSDKLIARKKDWDPKKYGGFDSPTVAYSVLVVAKVEKGKSKKLKSVKELLGITIMERSSFEKNPIDFLEAKGYKEVKKDLIIKLPKYSLFELENGRKRMLASAGELQKGNELALPSKYVNFLYLASHYEKLKGSPEDNEQKQLFVEQHKHYLDEIIEQISEFSKRVILADANLDKVLSAYNKHRDKPIREQAENIIHLFTLTNLGAPAAFKYFDTTIDRKRYTSTKEVLDATLIHQSITGLYETRIDLSQLGGDGGPAPGGSGGGGGTLNIEDEYRLHETSKGPDVPLGSTWLSDFPQAWAETGGMGLAVRQAPLIIPLKATSTPVSIKQYPMSQEARLGIKPHIQRLLDQGILVPCQSPWNTPLLPVKKPGTNDYRPVQDLREVNKRVEDIHPTVPNPYNLLSGLPPSHQWYTVLDLKDAFFCLRLHPTSQSLFAFEWRDPEMGISGQLTWTRLPQGFKNSPTLFNEALHRDLADFRIQHPDLILLQYVDDLLLAATSELDCQQGTRALLQTLGDLGYRASAKKAQICQKQVKYLGYLLKEGQRWLTEARKETVMGQPTPKTPRQLREFLGKAGFCRLFIPGFAEMAAPLYPLTKPGTLFEWGPDQQKAYQEIKQALLTAPALGLPDLTKPFELFVDEKQGYAKGVLTQKLGPWRRPVAYLSKKLDPVAAGWPPCLRMVAAIAVLTKDAGKLTMGQPLVILAPHAVEALVKQPPDRWLSNARMTHYQALLLDTDRVQFGPIVALNPATLLPLPEEGLQHDCLDILAEAHGTRPDLTDQPLPDADHTWYTDGSSFLQEGQRKAGAAVTTETEVVWAKALPAGTSAQRAELIALTQALKMAEGKKLNVYTDSRYAFATAHIHGEIYRRRGWLTSEGKEIKNKDEILALLKALFLPKRLSIIHCPGHQKGNRAEARGNRMADQAAREVATRETPETSTLLAGKRTADGSEFEKRTADGSEFESPKKKAKVE

SEQ ID NO: 2575 - protein, 2096 aa, synthetic construct
MPAAKRVKLDGGDKKYSIGLDIGTNSVGWAVITDEYKVPSKKFKVLGNTDRHSIKKNLIGALLFDSGETAEATRLKRTARRRYTRRKNRICYLQEIFSNEMAKVDDSFFHRLEESFLVEEDKKHERHPIFGNIVDEVAYHEKYPTIYHLRKKLVDSTDKADLRLIYLALAHMIKFRGHFLIEGDLNPDNSDVDKLFIQLVQTYNQLFEENPINASGVDAKAILSARLSKSRRLENLIAQLPGEKKNGLFGNLIALSLGLTPNFKSNFDLAEDAKLQLSKDTYDDDLDNLLAQIGDQYADLFLAAKNLSDAILLSDILRVNTEITKAPLSASMIKRYDEHHQDLTLLKALVRQQLPEKYKEIFFDQSKNGYAGYIDGGASQEEFYKFIKPILEKMDGTEELLVKLNREDLLRKQRTFDNGSIPHQIHLGELHAILRRQEDFYPFLKDNREKIEKILTFRIPYYVGPLARGNSRFAWMTRKSEETITPWNFEEVVDKGASAQSFIERMTNFDKNLPNEKVLPKHSLLYEYFTVYNELTKVKYVTEGMRKPAFLSGEQKKAIVDLLFKTNRKVTVKQLKEDYFKKIECFDSVEISGVEDRFNASLGTYHDLLKIIKDKDFLDNEENEDILEDIVLTLTLFEDREMIEERLKTYAHLFDDKVMKQLKRRRYTGWGRLSRKLINGIRDKQSGKTILDFLKSDGFANRNFMQLIHDDSLTFKEDIQKAQVSGQGDSLHEHIANLAGSPAIKKGILQTVKVVDELVKVMGRHKPENIVIEMARENQTTQKGQKNSRERMKRIEEGIKELGSQILKEHPVENTQLQNEKLYLYYLQNGRDMYVDQELDINRLSDYDVDHIVPQSFLKDDSIDNKVLTRSDKARGKSDNVPSEEVVKKMKNYWRQLLNAKLITQRKFDNLTKAERGGLSELDKAGFIKRQLVETRQITKHVAQILDSRMNTKYDENDKLIREVKVITLKSKLVSDFRKDFQFYKVREINNYHHAHDAYLNAVVGTALIKKYPKLESEFVYGDYKVYDVRKMIAKSEQEIGKATAKYFFYSNIMNFFKTEITLANGEIRKRPLIETNGETGEIVWDKGRDFATVRKVLSMPQVNIVKKTEVQTGGFSKESILPKRNSDKLIARKKDWDPKKYGGFDSPTVAYSVLVVAKVEKGKSKKLKSVKELLGITIMERSSFEKNPIDFLEAKGYKEVKKDLIIKLPKYSLFELENGRKRMLASAGELQKGNELALPSKYVNFLYLASHYEKLKGSPEDNEQKQLFVEQHKHYLDEIIEQISEFSKRVILADANLDKVLSAYNKHRDKPIREQAENIIHLFTLTNLGAPAAFKYFDTTIDRKRYTSTKEVLDATLIHQSITGLYETRIDLSQLGGDGGGGGGSSEAAAKGGTLNIEDEYRLHETSKGPDVPLGSTWLSDFPQAWAETGGMGLAVRQAPLIIPLKATSTPVSIKQYPMSQEARLGIKPHIQRLLDQGILVPCQSPWNTPLLPVKKPGTNDYRPVQDLREVNKRVEDIHPTVPNPYNLLSGLPPSHQWYTVLDLKDAFFCLRLHPTSQSLFAFEWRDPEMGISGQLTWTRLPQGFKNSPTLFNEALHRDLADFRIQHPDLILLQYVDDLLLAATSELDCQQGTRALLQTLGDLGYRASAKKAQICQKQVKYLGYLLKEGQRWLTEARKETVMGQPTPKTPRQLREFLGKAGFCRLFIPGFAEMAAPLYPLTKPGTLFEWGPDQQKAYQEIKQALLTAPALGLPDLTKPFELFVDEKQGYAKGVLTQKLGPWRRPVAYLSKKLDPVAAGWPPCLRMVAAIAVLTKDAGKLTMGQPLVILAPHAVEALVKQPPDRWLSNARMTHYQALLLDTDRVQFGPIVALNPATLLPLPEEGLQHDCLDILAEAHGTRPDLTDQPLPDADHTWYTDGSSFLQEGQRKAGAAVTTETEVVWAKALPAGTSAQRAELIALTQALKMAEGKKLNVYTDSRYAFATAHIHGEIYRRRGWLTSEGKEIKNKDEILALLKALFLPKRLSIIHCPGHQKGNRAEARGNRMADQAAREVATRETPETSTLLAGKRTADGSEFEKRTADGSEFESPKKKAKVE

SEQ ID NO: 2576 - protein, 2096 aa, synthetic construct
MPAAKRVKLDGGDKKYSIGLDIGTNSVGWAVITDEYKVPSKKFKVLGNTDRHSIKKNLIGALLFDSGETAEATRLKRTARRRYTRRKNRICYLQEIFSNEMAKVDDSFFHRLEESFLVEEDKKHERHPIFGNIVDEVAYHEKYPTIYHLRKKLVDSTDKADLRLIYLALAHMIKFRGHFLIEGDLNPDNSDVDKLFIQLVQTYNQLFEENPINASGVDAKAILSARLSKSRRLENLIAQLPGEKKNGLFGNLIALSLGLTPNFKSNFDLAEDAKLQLSKDTYDDDLDNLLAQIGDQYADLFLAAKNLSDAILLSDILRVNTEITKAPLSASMIKRYDEHHQDLTLLKALVRQQLPEKYKEIFFDQSKNGYAGYIDGGASQEEFYKFIKPILEKMDGTEELLVKLNREDLLRKQRTFDNGSIPHQIHLGELHAILRRQEDFYPFLKDNREKIEKILTFRIPYYVGPLARGNSRFAWMTRKSEETITPWNFEEVVDKGASAQSFIERMTNFDKNLPNEKVLPKHSLLYEYFTVYNELTKVKYVTEGMRKPAFLSGEQKKAIVDLLFKTNRKVTVKQLKEDYFKKIECFDSVEISGVEDRFNASLGTYHDLLKIIKDKDFLDNEENEDILEDIVLTLTLFEDREMIEERLKTYAHLFDDKVMKQLKRRRYTGWGRLSRKLINGIRDKQSGKTILDFLKSDGFANRNFMQLIHDDSLTFKEDIQKAQVSGQGDSLHEHIANLAGSPAIKKGILQTVKVVDELVKVMGRHKPENIVIEMARENQTTQKGQKNSRERMKRIEEGIKELGSQILKEHPVENTQLQNEKLYLYYLQNGRDMYVDQELDINRLSDYDVDHIVPQSFLKDDSIDNKVLTRSDKARGKSDNVPSEEVVKKMKNYWRQLLNAKLITQRKFDNLTKAERGGLSELDKAGFIKRQLVETRQITKHVAQILDSRMNTKYDENDKLIREVKVITLKSKLVSDFRKDFQFYKVREINNYHHAHDAYLNAVVGTALIKKYPKLESEFVYGDYKVYDVRKMIAKSEQEIGKATAKYFFYSNIMNFFKTEITLANGEIRKRPLIETNGETGEIVWDKGRDFATVRKVLSMPQVNIVKKTEVQTGGFSKESILPKRNSDKLIARKKDWDPKKYGGFDSPTVAYSVLVVAKVEKGKSKKLKSVKELLGITIMERSSFEKNPIDFLEAKGYKEVKKDLIIKLPKYSLFELENGRKRMLASAGELQKGNELALPSKYVNFLYLASHYEKLKGSPEDNEQKQLFVEQHKHYLDEIIEQISEFSKRVILADANLDKVLSAYNKHRDKPIREQAENIIHLFTLTNLGAPAAFKYFDTTIDRKRYTSTKEVLDATLIHQSITGLYETRIDLSQLGGDGGGGGEAAAKGSSGGTLNIEDEYRLHETSKGPDVPLGSTWLSDFPQAWAETGGMGLAVRQAPLIIPLKATSTPVSIKQYPMSQEARLGIKPHIQRLLDQGILVPCQSPWNTPLLPVKKPGTNDYRPVQDLREVNKRVEDIHPTVPNPYNLLSGLPPSHQWYTVLDLKDAFFCLRLHPTSQSLFAFEWRDPEMGISGQLTWTRLPQGFKNSPTLFNEALHRDLADFRIQHPDLILLQYVDDLLLAATSELDCQQGTRALLQTLGDLGYRASAKKAQICQKQVKYLGYLLKEGQRWLTEARKETVMGQPTPKTPRQLREFLGKAGFCRLFIPGFAEMAAPLYPLTKPGTLFEWGPDQQKAYQEIKQALLTAPALGLPDLTKPFELFVDEKQGYAKGVLTQKLGPWRRPVAYLSKKLDPVAAGWPPCLRMVAAIAVLTKDAGKLTMGQPLVILAPHAVEALVKQPPDRWLSNARMTHYQALLLDTDRVQFGPIVALNPATLLPLPEEGLQHDCLDILAEAHGTRPDLTDQPLPDADHTWYTDGSSFLQEGQRKAGAAVTTETEVVWAKALPAGTSAQRAELIALTQALKMAEGKKLNVYTDSRYAFATAHIHGEIYRRRGWLTSEGKEIKNKDEILALLKALFLPKRLSIIHCPGHQKGNRAEARGNRMADQAAREVATRETPETSTLLAGKRTADGSEFEKRTADGSEFESPKKKAKVE

SEQ ID NO: 2577 - protein, 2096 aa, synthetic construct
MPAAKRVKLDGGDKKYSIGLDIGTNSVGWAVITDEYKVPSKKFKVLGNTDRHSIKKNLIGALLFDSGETAEATRLKRTARRRYTRRKNRICYLQEIFSNEMAKVDDSFFHRLEESFLVEEDKKHERHPIFGNIVDEVAYHEKYPTIYHLRKKLVDSTDKADLRLIYLALAHMIKFRGHFLIEGDLNPDNSDVDKLFIQLVQTYNQLFEENPINASGVDAKAILSARLSKSRRLENLIAQLPGEKKNGLFGNLIALSLGLTPNFKSNFDLAEDAKLQLSKDTYDDDLDNLLAQIGDQYADLFLAAKNLSDAILLSDILRVNTEITKAPLSASMIKRYDEHHQDLTLLKALVRQQLPEKYKEIFFDQSKNGYAGYIDGGASQEEFYKFIKPILEKMDGTEELLVKLNREDLLRKQRTFDNGSIPHQIHLGELHAILRRQEDFYPFLKDNREKIEKILTFRIPYYVGPLARGNSRFAWMTRKSEETITPWNFEEVVDKGASAQSFIERMTNFDKNLPNEKVLPKHSLLYEYFTVYNELTKVKYVTEGMRKPAFLSGEQKKAIVDLLFKTNRKVTVKQLKEDYFKKIECFDSVEISGVEDRFNASLGTYHDLLKIIKDKDFLDNEENEDILEDIVLTLTLFEDREMIEERLKTYAHLFDDKVMKQLKRRRYTGWGRLSRKLINGIRDKQSGKTILDFLKSDGFANRNFMQLIHDDSLTFKEDIQKAQVSGQGDSLHEHIANLAGSPAIKKGILQTVKVVDELVKVMGRHKPENIVIEMARENQTTQKGQKNSRERMKRIEEGIKELGSQILKEHPVENTQLQNEKLYLYYLQNGRDMYVDQELDINRLSDYDVDHIVPQSFLKDDSIDNKVLTRSDKARGKSDNVPSEEVVKKMKNYWRQLLNAKLITQRKFDNLTKAERGGLSELDKAGFIKRQLVETRQITKHVAQILDSRMNTKYDENDKLIREVKVITLKSKLVSDFRKDFQFYKVREINNYHHAHDAYLNAVVGTALIKKYPKLESEFVYGDYKVYDVRKMIAKSEQEIGKATAKYFFYSNIMNFFKTEITLANGEIRKRPLIETNGETGEIVWDKGRDFATVRKVLSMPQVNIVKKTEVQTGGFSKESILPKRNSDKLIARKKDWDPKKYGGFDSPTVAYSVLVVAKVEKGKSKKLKSVKELLGITIMERSSFEKNPIDFLEAKGYKEVKKDLIIKLPKYSLFELENGRKRMLASAGELQKGNELALPSKYVNFLYLASHYEKLKGSPEDNEQKQLFVEQHKHYLDEIIEQISEFSKRVILADANLDKVLSAYNKHRDKPIREQAENIIHLFTLTNLGAPAAFKYFDTTIDRKRYTSTKEVLDATLIHQSITGLYETRIDLSQLGGDGGPAPEAAAKGGSGGTLNIEDEYRLHETSKGPDVPLGSTWLSDFPQAWAETGGMGLAVRQAPLIIPLKATSTPVSIKQYPMSQEARLGIKPHIQRLLDQGILVPCQSPWNTPLLPVKKPGTNDYRPVQDLREVNKRVEDIHPTVPNPYNLLSGLPPSHQWYTVLDLKDAFFCLRLHPTSQSLFAFEWRDPEMGISGQLTWTRLPQGFKNSPTLFNEALHRDLADFRIQHPDLILLQYVDDLLLAATSELDCQQGTRALLQTLGDLGYRASAKKAQICQKQVKYLGYLLKEGQRWLTEARKETVMGQPTPKTPRQLREFLGKAGFCRLFIPGFAEMAAPLYPLTKPGTLFEWGPDQQKAYQEIKQALLTAPALGLPDLTKPFELFVDEKQGYAKGVLTQKLGPWRRPVAYLSKKLDPVAAGWPPCLRMVAAIAVLTKDAGKLTMGQPLVILAPHAVEALVKQPPDRWLSNARMTHYQALLLDTDRVQFGPIVALNPATLLPLPEEGLQHDCLDILAEAHGTRPDLTDQPLPDADHTWYTDGSSFLQEGQRKAGAAVTTETEVVWAKALPAGTSAQRAELIALTQALKMAEGKKLNVYTDSRYAFATAHIHGEIYRRRGWLTSEGKEIKNKDEILALLKALFLPKRLSIIHCPGHQKGNRAEARGNRMADQAAREVATRETPETSTLLAGKRTADGSEFEKRTADGSEFESPKKKAKVE

SEQ ID NO: 2578 - protein, 2096 aa, synthetic construct
MPAAKRVKLDGGDKKYSIGLDIGTNSVGWAVITDEYKVPSKKFKVLGNTDRHSIKKNLIGALLFDSGETAEATRLKRTARRRYTRRKNRICYLQEIFSNEMAKVDDSFFHRLEESFLVEEDKKHERHPIFGNIVDEVAYHEKYPTIYHLRKKLVDSTDKADLRLIYLALAHMIKFRGHFLIEGDLNPDNSDVDKLFIQLVQTYNQLFEENPINASGVDAKAILSARLSKSRRLENLIAQLPGEKKNGLFGNLIALSLGLTPNFKSNFDLAEDAKLQLSKDTYDDDLDNLLAQIGDQYADLFLAAKNLSDAILLSDILRVNTEITKAPLSASMIKRYDEHHQDLTLLKALVRQQLPEKYKEIFFDQSKNGYAGYIDGGASQEEFYKFIKPILEKMDGTEELLVKLNREDLLRKQRTFDNGSIPHQIHLGELHAILRRQEDFYPFLKDNREKIEKILTFRIPYYVGPLARGNSRFAWMTRKSEETITPWNFEEVVDKGASAQSFIERMTNFDKNLPNEKVLPKHSLLYEYFTVYNELTKVKYVTEGMRKPAFLSGEQKKAIVDLLFKTNRKVTVKQLKEDYFKKIECFDSVEISGVEDRFNASLGTYHDLLKIIKDKDFLDNEENEDILEDIVLTLTLFEDREMIEERLKTYAHLFDDKVMKQLKRRRYTGWGRLSRKLINGIRDKQSGKTILDFLKSDGFANRNFMQLIHDDSLTFKEDIQKAQVSGQGDSLHEHIANLAGSPAIKKGILQTVKVVDELVKVMGRHKPENIVIEMARENQTTQKGQKNSRERMKRIEEGIKELGSQILKEHPVENTQLQNEKLYLYYLQNGRDMYVDQELDINRLSDYDVDHIVPQSFLKDDSIDNKVLTRSDKARGKSDNVPSEEVVKKMKNYWRQLLNAKLITQRKFDNLTKAERGGLSELDKAGFIKRQLVETRQITKHVAQILDSRMNTKYDENDKLIREVKVITLKSKLVSDFRKDFQFYKVREINNYHHAHDAYLNAVVGTALIKKYPKLESEFVYGDYKVYDVRKMIAKSEQEIGKATAKYFFYSNIMNFFKTEITLANGEIRKRPLIETNGETGEIVWDKGRDFATVRKVLSMPQVNIVKKTEVQTGGFSKESILPKRNSDKLIARKKDWDPKKYGGFDSPTVAYSVLVVAKVEKGKSKKLKSVKELLGITIMERSSFEKNPIDFLEAKGYKEVKKDLIIKLPKYSLFELENGRKRMLASAGELQKGNELALPSKYVNFLYLASHYEKLKGSPEDNEQKQLFVEQHKHYLDEIIEQISEFSKRVILADANLDKVLSAYNKHRDKPIREQAENIIHLFTLTNLGAPAAFKYFDTTIDRKRYTSTKEVLDATLIHQSITGLYETRIDLSQLGGDGGGGSEAAAKGGGGGTLNIEDEYRLHETSKGPDVPLGSTWLSDFPQAWAETGGMGLAVRQAPLIIPLKATSTPVSIKQYPMSQEARLGIKPHIQRLLDQGILVPCQSPWNTPLLPVKKPGTNDYRPVQDLREVNKRVEDIHPTVPNPYNLLSGLPPSHQWYTVLDLKDAFFCLRLHPTSQSLFAFEWRDPEMGISGQLTWTRLPQGFKNSPTLFNEALHRDLADFRIQHPDLILLQYVDDLLLAATSELDCQQGTRALLQTLGDLGYRASAKKAQICQKQVKYLGYLLKEGQRWLTEARKETVMGQPTPKTPRQLREFLGKAGFCRLFIPGFAEMAAPLYPLTKPGTLFEWGPDQQKAYQEIKQALLTAPALGLPDLTKPFELFVDEKQGYAKGVLTQKLGPWRRPVAYLSKKLDPVAAGWPPCLRMVAAIAVLTKDAGKLTMGQPLVILAPHAVEALVKQPPDRWLSNARMTHYQALLLDTDRVQFGPIVALNPATLLPLPEEGLQHDCLDILAEAHGTRPDLTDQPLPDADHTWYTDGSSFLQEGQRKAGAAVTTETEVVWAKALPAGTSAQRAELIALTQALKMAEGKKLNVYTDSRYAFATAHIHGEIYRRRGWLTSEGKEIKNKDEILALLKALFLPKRLSIIHCPGHQKGNRAEARGNRMADQAAREVATRETPETSTLLAGKRTADGSEFEKRTADGSEFESPKKKAKVE

SEQ ID NO: 2579 - protein, 2090 aa, synthetic construct
MPAAKRVKLDGGDKKYSIGLDIGTNSVGWAVITDEYKVPSKKFKVLGNTDRHSIKKNLIGALLFDSGETAEATRLKRTARRRYTRRKNRICYLQEIFSNEMAKVDDSFFHRLEESFLVEEDKKHERHPIFGNIVDEVAYHEKYPTIYHLRKKLVDSTDKADLRLIYLALAHMIKFRGHFLIEGDLNPDNSDVDKLFIQLVQTYNQLFEENPINASGVDAKAILSARLSKSRRLENLIAQLPGEKKNGLFGNLIALSLGLTPNFKSNFDLAEDAKLQLSKDTYDDDLDNLLAQIGDQYADLFLAAKNLSDAILLSDILRVNTEITKAPLSASMIKRYDEHHQDLTLLKALVRQQLPEKYKEIFFDQSKNGYAGYIDGGASQEEFYKFIKPILEKMDGTEELLVKLNREDLLRKQRTFDNGSIPHQIHLGELHAILRRQEDFYPFLKDNREKIEKILTFRIPYYVGPLARGNSRFAWMTRKSEETITPWNFEEVVDKGASAQSFIERMTNFDKNLPNEKVLPKHSLLYEYFTVYNELTKVKYVTEGMRKPAFLSGEQKKAIVDLLFKTNRKVTVKQLKEDYFKKIECFDSVEISGVEDRFNASLGTYHDLLKIIKDKDFLDNEENEDILEDIVLTLTLFEDREMIEERLKTYAHLFDDKVMKQLKRRRYTGWGRLSRKLINGIRDKQSGKTILDFLKSDGFANRNFMQLIHDDSLTFKEDIQKAQVSGQGDSLHEHIANLAGSPAIKKGILQTVKVVDELVKVMGRHKPENIVIEMARENQTTQKGQKNSRERMKRIEEGIKELGSQILKEHPVENTQLQNEKLYLYYLQNGRDMYVDQELDINRLSDYDVDHIVPQSFLKDDSIDNKVLTRSDKARGKSDNVPSEEVVKKMKNYWRQLLNAKLITQRKFDNLTKAERGGLSELDKAGFIKRQLVETRQITKHVAQILDSRMNTKYDENDKLIREVKVITLKSKLVSDFRKDFQFYKVREINNYHHAHDAYLNAVVGTALIKKYPKLESEFVYGDYKVYDVRKMIAKSEQEIGKATAKYFFYSNIMNFFKTEITLANGEIRKRPLIETNGETGEIVWDKGRDFATVRKVLSMPQVNIVKKTEVQTGGFSKESILPKRNSDKLIARKKDWDPKKYGGFDSPTVAYSVLVVAKVEKGKSKKLKSVKELLGITIMERSSFEKNPIDFLEAKGYKEVKKDLIIKLPKYSLFELENGRKRMLASAGELQKGNELALPSKYVNFLYLASHYEKLKGSPEDNEQKQLFVEQHKHYLDEIIEQISEFSKRVILADANLDKVLSAYNKHRDKPIREQAENIIHLFTLTNLGAPAAFKYFDTTIDRKRYTSTKEVLDATLIHQSITGLYETRIDLSQLGGDGGGGGGGGGTLNIEDEYRLHETSKGPDVPLGSTWLSDFPQAWAETGGMGLAVRQAPLIIPLKATSTPVSIKQYPMSQEARLGIKPHIQRLLDQGILVPCQSPWNTPLLPVKKPGTNDYRPVQDLREVNKRVEDIHPTVPNPYNLLSGLPPSHQWYTVLDLKDAFFCLRLHPTSQSLFAFEWRDPEMGISGQLTWTRLPQGFKNSPTLFNEALHRDLADFRIQHPDLILLQYVDDLLLAATSELDCQQGTRALLQTLGDLGYRASAKKAQICQKQVKYLGYLLKEGQRWLTEARKETVMGQPTPKTPRQLREFLGKAGFCRLFIPGFAEMAAPLYPLTKPGTLFEWGPDQQKAYQEIKQALLTAPALGLPDLTKPFELFVDEKQGYAKGVLTQKLGPWRRPVAYLSKKLDPVAAGWPPCLRMVAAIAVLTKDAGKLTMGQPLVILAPHAVEALVKQPPDRWLSNARMTHYQALLLDTDRVQFGPIVALNPATLLPLPEEGLQHDCLDILAEAHGTRPDLTDQPLPDADHTWYTDGSSFLQEGQRKAGAAVTTETEVVWAKALPAGTSAQRAELIALTQALKMAEGKKLNVYTDSRYAFATAHIHGEIYRRRGWLTSEGKEIKNKDEILALLKALFLPKRLSIIHCPGHQKGNRAEARGNRMADQAAREVATRETPETSTLLAGKRTADGSEFEKRTADGSEFESPKKKAKVE

SEQ ID NO: 2580 - protein, 2094 aa, synthetic construct
MPAAKRVKLDGGDKKYSIGLDIGTNSVGWAVITDEYKVPSKKFKVLGNTDRHSIKKNLIGALLFDSGETAEATRLKRTARRRYTRRKNRICYLQEIFSNEMAKVDDSFFHRLEESFLVEEDKKHERHPIFGNIVDEVAYHEKYPTIYHLRKKLVDSTDKADLRLIYLALAHMIKFRGHFLIEGDLNPDNSDVDKLFIQLVQTYNQLFEENPINASGVDAKAILSARLSKSRRLENLIAQLPGEKKNGLFGNLIALSLGLTPNFKSNFDLAEDAKLQLSKDTYDDDLDNLLAQIGDQYADLFLAAKNLSDAILLSDILRVNTEITKAPLSASMIKRYDEHHQDLTLLKALVRQQLPEKYKEIFFDQSKNGYAGYIDGGASQEEFYKFIKPILEKMDGTEELLVKLNREDLLRKQRTFDNGSIPHQIHLGELHAILRRQEDFYPFLKDNREKIEKILTFRIPYYVGPLARGNSRFAWMTRKSEETITPWNFEEVVDKGASAQSFIERMTNFDKNLPNEKVLPKHSLLYEYFTVYNELTKVKYVTEGMRKPAFLSGEQKKAIVDLLFKTNRKVTVKQLKEDYFKKIECFDSVEISGVEDRFNASLGTYHDLLKIIKDKDFLDNEENEDILEDIVLTLTLFEDREMIEERLKTYAHLFDDKVMKQLKRRRYTGWGRLSRKLINGIRDKQSGKTILDFLKSDGFANRNFMQLIHDDSLTFKEDIQKAQVSGQGDSLHEHIANLAGSPAIKKGILQTVKVVDELVKVMGRHKPENIVIEMARENQTTQKGQKNSRERMKRIEEGIKELGSQILKEHPVENTQLQNEKLYLYYLQNGRDMYVDQELDINRLSDYDVDHIVPQSFLKDDSIDNKVLTRSDKARGKSDNVPSEEVVKKMKNYWRQLLNAKLITQRKFDNLTKAERGGLSELDKAGFIKRQLVETRQITKHVAQILDSRMNTKYDENDKLIREVKVITLKSKLVSDFRKDFQFYKVREINNYHHAHDAYLNAVVGTALIKKYPKLESEFVYGDYKVYDVRKMIAKSEQEIGKATAKYFFYSNIMNFFKTEITLANGEIRKRPLIETNGETGEIVWDKGRDFATVRKVLSMPQVNIVKKTEVQTGGFSKESILPKRNSDKLIARKKDWDPKKYGGFDSPTVAYSVLVVAKVEKGKSKKLKSVKELLGITIMERSSFEKNPIDFLEAKGYKEVKKDLIIKLPKYSLFELENGRKRMLASAGELQKGNELALPSKYVNFLYLASHYEKLKGSPEDNEQKQLFVEQHKHYLDEIIEQISEFSKRVILADANLDKVLSAYNKHRDKPIREQAENIIHLFTLTNLGAPAAFKYFDTTIDRKRYTSTKEVLDATLIHQSITGLYETRIDLSQLGGDGGGSSPAPGGGGGTLNIEDEYRLHETSKGPDVPLGSTWLSDFPQAWAETGGMGLAVRQAPLIIPLKATSTPVSIKQYPMSQEARLGIKPHIQRLLDQGILVPCQSPWNTPLLPVKKPGTNDYRPVQDLREVNKRVEDIHPTVPNPYNLLSGLPPSHQWYTVLDLKDAFFCLRLHPTSQSLFAFEWRDPEMGISGQLTWTRLPQGFKNSPTLFNEALHRDLADFRIQHPDLILLQYVDDLLLAATSELDCQQGTRALLQTLGDLGYRASAKKAQICQKQVKYLGYLLKEGQRWLTEARKETVMGQPTPKTPRQLREFLGKAGFCRLFIPGFAEMAAPLYPLTKPGTLFEWGPDQQKAYQEIKQALLTAPALGLPDLTKPFELFVDEKQGYAKGVLTQKLGPWRRPVAYLSKKLDPVAAGWPPCLRMVAAIAVLTKDAGKLTMGQPLVILAPHAVEALVKQPPDRWLSNARMTHYQALLLDTDRVQFGPIVALNPATLLPLPEEGLQHDCLDILAEAHGTRPDLTDQPLPDADHTWYTDGSSFLQEGQRKAGAAVTTETEVVWAKALPAGTSAQRAELIALTQALKMAEGKKLNVYTDSRYAFATAHIHGEIYRRRGWLTSEGKEIKNKDEILALLKALFLPKRLSIIHCPGHQKGNRAEARGNRMADQAAREVATRETPETSTLLAGKRTADGSEFEKRTADGSEFESPKKKAKVE

SEQ ID NO: 2581 - protein, 2094 aa, synthetic construct
MPAAKRVKLDGGDKKYSIGLDIGTNSVGWAVITDEYKVPSKKFKVLGNTDRHSIKKNLIGALLFDSGETAEATRLKRTARRRYTRRKNRICYLQEIFSNEMAKVDDSFFHRLEESFLVEEDKKHERHPIFGNIVDEVAYHEKYPTIYHLRKKLVDSTDKADLRLIYLALAHMIKFRGHFLIEGDLNPDNSDVDKLFIQLVQTYNQLFEENPINASGVDAKAILSARLSKSRRLENLIAQLPGEKKNGLFGNLIALSLGLTPNFKSNFDLAEDAKLQLSKDTYDDDLDNLLAQIGDQYADLFLAAKNLSDAILLSDILRVNTEITKAPLSASMIKRYDEHHQDLTLLKALVRQQLPEKYKEIFFDQSKNGYAGYIDGGASQEEFYKFIKPILEKMDGTEELLVKLNREDLLRKQRTFDNGSIPHQIHLGELHAILRRQEDFYPFLKDNREKIEKILTFRIPYYVGPLARGNSRFAWMTRKSEETITPWNFEEVVDKGASAQSFIERMTNFDKNLPNEKVLPKHSLLYEYFTVYNELTKVKYVTEGMRKPAFLSGEQKKAIVDLLFKTNRKVTVKQLKEDYFKKIECFDSVEISGVEDRFNASLGTYHDLLKIIKDKDFLDNEENEDILEDIVLTLTLFEDREMIEERLKTYAHLFDDKVMKQLKRRRYTGWGRLSRKLINGIRDKQSGKTILDFLKSDGFANRNFMQLIHDDSLTFKEDIQKAQVSGQGDSLHEHIANLAGSPAIKKGILQTVKVVDELVKVMGRHKPENIVIEMARENQTTQKGQKNSRERMKRIEEGIKELGSQILKEHPVENTQLQNEKLYLYYLQNGRDMYVDQELDINRLSDYDVDHIVPQSFLKDDSIDNKVLTRSDKARGKSDNVPSEEVVKKMKNYWRQLLNAKLITQRKFDNLTKAERGGLSELDKAGFIKRQLVETRQITKHVAQILDSRMNTKYDENDKLIREVKVITLKSKLVSDFRKDFQFYKVREINNYHHAHDAYLNAVVGTALIKKYPKLESEFVYGDYKVYDVRKMIAKSEQEIGKATAKYFFYSNIMNFFKTEITLANGEIRKRPLIETNGETGEIVWDKGRDFATVRKVLSMPQVNIVKKTEVQTGGFSKESILPKRNSDKLIARKKDWDPKKYGGFDSPTVAYSVLVVAKVEKGKSKKLKSVKELLGITIMERSSFEKNPIDFLEAKGYKEVKKDLIIKLPKYSLFELENGRKRMLASAGELQKGNELALPSKYVNFLYLASHYEKLKGSPEDNEQKQLFVEQHKHYLDEIIEQISEFSKRVILADANLDKVLSAYNKHRDKPIREQAENIIHLFTLTNLGAPAAFKYFDTTIDRKRYTSTKEVLDATLIHQSITGLYETRIDLSQLGGDGGPAPGSSGGSGGTLNIEDEYRLHETSKGPDVPLGSTWLSDFPQAWAETGGMGLAVRQAPLIIPLKATSTPVSIKQYPMSQEARLGIKPHIQRLLDQGILVPCQSPWNTPLLPVKKPGTNDYRPVQDLREVNKRVEDIHPTVPNPYNLLSGLPPSHQWYTVLDLKDAFFCLRLHPTSQSLFAFEWRDPEMGISGQLTWTRLPQGFKNSPTLFNEALHRDLADFRIQHPDLILLQYVDDLLLAATSELDCQQGTRALLQTLGDLGYRASAKKAQICQKQVKYLGYLLKEGQRWLTEARKETVMGQPTPKTPRQLREFLGKAGFCRLFIPGFAEMAAPLYPLTKPGTLFEWGPDQQKAYQEIKQALLTAPALGLPDLTKPFELFVDEKQGYAKGVLTQKLGPWRRPVAYLSKKLDPVAAGWPPCLRMVAAIAVLTKDAGKLTMGQPLVILAPHAVEALVKQPPDRWLSNARMTHYQALLLDTDRVQFGPIVALNPATLLPLPEEGLQHDCLDILAEAHGTRPDLTDQPLPDADHTWYTDGSSFLQEGQRKAGAAVTTETEVVWAKALPAGTSAQRAELIALTQALKMAEGKKLNVYTDSRYAFATAHIHGEIYRRRGWLTSEGKEIKNKDEILALLKALFLPKRLSIIHCPGHQKGNRAEARGNRMADQAAREVATRETPETSTLLAGKRTADGSEFEKRTADGSEFESPKKKAKVE

SEQ ID NO: 2582 - protein, 2096 aa, synthetic construct
MPAAKRVKLDGGDKKYSIGLDIGTNSVGWAVITDEYKVPSKKFKVLGNTDRHSIKKNLIGALLFDSGETAEATRLKRTARRRYTRRKNRICYLQEIFSNEMAKVDDSFFHRLEESFLVEEDKKHERHPIFGNIVDEVAYHEKYPTIYHLRKKLVDSTDKADLRLIYLALAHMIKFRGHFLIEGDLNPDNSDVDKLFIQLVQTYNQLFEENPINASGVDAKAILSARLSKSRRLENLIAQLPGEKKNGLFGNLIALSLGLTPNFKSNFDLAEDAKLQLSKDTYDDDLDNLLAQIGDQYADLFLAAKNLSDAILLSDILRVNTEITKAPLSASMIKRYDEHHQDLTLLKALVRQQLPEKYKEIFFDQSKNGYAGYIDGGASQEEFYKFIKPILEKMDGTEELLVKLNREDLLRKQRTFDNGSIPHQIHLGELHAILRRQEDFYPFLKDNREKIEKILTFRIPYYVGPLARGNSRFAWMTRKSEETITPWNFEEVVDKGASAQSFIERMTNFDKNLPNEKVLPKHSLLYEYFTVYNELTKVKYVTEGMRKPAFLSGEQKKAIVDLLFKTNRKVTVKQLKEDYFKKIECFDSVEISGVEDRFNASLGTYHDLLKIIKDKDFLDNEENEDILEDIVLTLTLFEDREMIEERLKTYAHLFDDKVMKQLKRRRYTGWGRLSRKLINGIRDKQSGKTILDFLKSDGFANRNFMQLIHDDSLTFKEDIQKAQVSGQGDSLHEHIANLAGSPAIKKGILQTVKVVDELVKVMGRHKPENIVIEMARENQTTQKGQKNSRERMKRIEEGIKELGSQILKEHPVENTQLQNEKLYLYYLQNGRDMYVDQELDINRLSDYDVDHIVPQSFLKDDSIDNKVLTRSDKARGKSDNVPSEEVVKKMKNYWRQLLNAKLITQRKFDNLTKAERGGLSELDKAGFIKRQLVETRQITKHVAQILDSRMNTKYDENDKLIREVKVITLKSKLVSDFRKDFQFYKVREINNYHHAHDAYLNAVVGTALIKKYPKLESEFVYGDYKVYDVRKMIAKSEQEIGKATAKYFFYSNIMNFFKTEITLANGEIRKRPLIETNGETGEIVWDKGRDFATVRKVLSMPQVNIVKKTEVQTGGFSKESILPKRNSDKLIARKKDWDPKKYGGFDSPTVAYSVLVVAKVEKGKSKKLKSVKELLGITIMERSSFEKNPIDFLEAKGYKEVKKDLIIKLPKYSLFELENGRKRMLASAGELQKGNELALPSKYVNFLYLASHYEKLKGSPEDNEQKQLFVEQHKHYLDEIIEQISEFSKRVILADANLDKVLSAYNKHRDKPIREQAENIIHLFTLTNLGAPAAFKYFDTTIDRKRYTSTKEVLDATLIHQSITGLYETRIDLSQLGGDGGEAAAKGGGGGSGGTLNIEDEYRLHETSKGPDVPLGSTWLSDFPQAWAETGGMGLAVRQAPLIIPLKATSTPVSIKQYPMSQEARLGIKPHIQRLLDQGILVPCQSPWNTPLLPVKKPGTNDYRPVQDLREVNKRVEDIHPTVPNPYNLLSGLPPSHQWYTVLDLKDAFFCLRLHPTSQSLFAFEWRDPEMGISGQLTWTRLPQGFKNSPTLFNEALHRDLADFRIQHPDLILLQYVDDLLLAATSELDCQQGTRALLQTLGDLGYRASAKKAQICQKQVKYLGYLLKEGQRWLTEARKETVMGQPTPKTPRQLREFLGKAGFCRLFIPGFAEMAAPLYPLTKPGTLFEWGPDQQKAYQEIKQALLTAPALGLPDLTKPFELFVDEKQGYAKGVLTQKLGPWRRPVAYLSKKLDPVAAGWPPCLRMVAAIAVLTKDAGKLTMGQPLVILAPHAVEALVKQPPDRWLSNARMTHYQALLLDTDRVQFGPIVALNPATLLPLPEEGLQHDCLDILAEAHGTRPDLTDQPLPDADHTWYTDGSSFLQEGQRKAGAAVTTETEVVWAKALPAGTSAQRAELIALTQALKMAEGKKLNVYTDSRYAFATAHIHGEIYRRRGWLTSEGKEIKNKDEILALLKALFLPKRLSIIHCPGHQKGNRAEARGNRMADQAAREVATRETPETSTLLAGKRTADGSEFEKRTADGSEFESPKKKAKVE

SEQ ID NO: 2583 - protein, 2097 aa, synthetic construct
MPAAKRVKLDGGDKKYSIGLDIGTNSVGWAVITDEYKVPSKKFKVLGNTDRHSIKKNLIGALLFDSGETAEATRLKRTARRRYTRRKNRICYLQEIFSNEMAKVDDSFFHRLEESFLVEEDKKHERHPIFGNIVDEVAYHEKYPTIYHLRKKLVDSTDKADLRLIYLALAHMIKFRGHFLIEGDLNPDNSDVDKLFIQLVQTYNQLFEENPINASGVDAKAILSARLSKSRRLENLIAQLPGEKKNGLFGNLIALSLGLTPNFKSNFDLAEDAKLQLSKDTYDDDLDNLLAQIGDQYADLFLAAKNLSDAILLSDILRVNTEITKAPLSASMIKRYDEHHQDLTLLKALVRQQLPEKYKEIFFDQSKNGYAGYIDGGASQEEFYKFIKPILEKMDGTEELLVKLNREDLLRKQRTFDNGSIPHQIHLGELHAILRRQEDFYPFLKDNREKIEKILTFRIPYYVGPLARGNSRFAWMTRKSEETITPWNFEEVVDKGASAQSFIERMTNFDKNLPNEKVLPKHSLLYEYFTVYNELTKVKYVTEGMRKPAFLSGEQKKAIVDLLFKTNRKVTVKQLKEDYFKKIECFDSVEISGVEDRFNASLGTYHDLLKIIKDKDFLDNEENEDILEDIVLTLTLFEDREMIEERLKTYAHLFDDKVMKQLKRRRYTGWGRLSRKLINGIRDKQSGKTILDFLKSDGFANRNFMQLIHDDSLTFKEDIQKAQVSGQGDSLHEHIANLAGSPAIKKGILQTVKVVDELVKVMGRHKPENIVIEMARENQTTQKGQKNSRERMKRIEEGIKELGSQILKEHPVENTQLQNEKLYLYYLQNGRDMYVDQELDINRLSDYDVDHIVPQSFLKDDSIDNKVLTRSDKARGKSDNVPSEEVVKKMKNYWRQLLNAKLITQRKFDNLTKAERGGLSELDKAGFIKRQLVETRQITKHVAQILDSRMNTKYDENDKLIREVKVITLKSKLVSDFRKDFQFYKVREINNYHHAHDAYLNAVVGTALIKKYPKLESEFVYGDYKVYDVRKMIAKSEQEIGKATAKYFFYSNIMNFFKTEITLANGEIRKRPLIETNGETGEIVWDKGRDFATVRKVLSMPQVNIVKKTEVQTGGFSKESILPKRNSDKLIARKKDWDPKKYGGFDSPTVAYSVLVVAKVEKGKSKKLKSVKELLGITIMERSSFEKNPIDFLEAKGYKEVKKDLIIKLPKYSLFELENGRKRMLASAGELQKGNELALPSKYVNFLYLASHYEKLKGSPEDNEQKQLFVEQHKHYLDEIIEQISEFSKRVILADANLDKVLSAYNKHRDKPIREQAENIIHLFTLTNLGAPAAFKYFDTTIDRKRYTSTKEVLDATLIHQSITGLYETRIDLSQLGGDGGGSAGSAAGSGEFGGTLNIEDEYRLHETSKGPDVPLGSTWLSDFPQAWAETGGMGLAVRQAPLIIPLKATSTPVSIKQYPMSQEARLGIKPHIQRLLDQGILVPCQSPWNTPLLPVKKPGTNDYRPVQDLREVNKRVEDIHPTVPNPYNLLSGLPPSHQWYTVLDLKDAFFCLRLHPTSQSLFAFEWRDPEMGISGQLTWTRLPQGFKNSPTLFNEALHRDLADFRIQHPDLILLQYVDDLLLAATSELDCQQGTRALLQTLGDLGYRASAKKAQICQKQVKYLGYLLKEGQRWLTEARKETVMGQPTPKTPRQLREFLGKAGFCRLFIPGFAEMAAPLYPLTKPGTLFEWGPDQQKAYQEIKQALLTAPALGLPDLTKPFELFVDEKQGYAKGVLTQKLGPWRRPVAYLSKKLDPVAAGWPPCLRMVAAIAVLTKDAGKLTMGQPLVILAPHAVEALVKQPPDRWLSNARMTHYQALLLDTDRVQFGPIVALNPATLLPLPEEGLQHDCLDILAEAHGTRPDLTDQPLPDADHTWYTDGSSFLQEGQRKAGAAVTTETEVVWAKALPAGTSAQRAELIALTQALKMAEGKKLNVYTDSRYAFATAHIHGEIYRRRGWLTSEGKEIKNKDEILALLKALFLPKRLSIIHCPGHQKGNRAEARGNRMADQAAREVATRETPETSTLLAGKRTADGSEFEKRTADGSEFESPKKKAKVE

SEQ ID NO: 2584 - protein, 2093 aa, synthetic construct
MPAAKRVKLDGGDKKYSIGLDIGTNSVGWAVITDEYKVPSKKFKVLGNTDRHSIKKNLIGALLFDSGETAEATRLKRTARRRYTRRKNRICYLQEIFSNEMAKVDDSFFHRLEESFLVEEDKKHERHPIFGNIVDEVAYHEKYPTIYHLRKKLVDSTDKADLRLIYLALAHMIKFRGHFLIEGDLNPDNSDVDKLFIQLVQTYNQLFEENPINASGVDAKAILSARLSKSRRLENLIAQLPGEKKNGLFGNLIALSLGLTPNFKSNFDLAEDAKLQLSKDTYDDDLDNLLAQIGDQYADLFLAAKNLSDAILLSDILRVNTEITKAPLSASMIKRYDEHHQDLTLLKALVRQQLPEKYKEIFFDQSKNGYAGYIDGGASQEEFYKFIKPILEKMDGTEELLVKLNREDLLRKQRTFDNGSIPHQIHLGELHAILRRQEDFYPFLKDNREKIEKILTFRIPYYVGPLARGNSRFAWMTRKSEETITPWNFEEVVDKGASAQSFIERMTNFDKNLPNEKVLPKHSLLYEYFTVYNELTKVKYVTEGMRKPAFLSGEQKKAIVDLLFKTNRKVTVKQLKEDYFKKIECFDSVEISGVEDRFNASLGTYHDLLKIIKDKDFLDNEENEDILEDIVLTLTLFEDREMIEERLKTYAHLFDDKVMKQLKRRRYTGWGRLSRKLINGIRDKQSGKTILDFLKSDGFANRNFMQLIHDDSLTFKEDIQKAQVSGQGDSLHEHIANLAGSPAIKKGILQTVKVVDELVKVMGRHKPENIVIEMARENQTTQKGQKNSRERMKRIEEGIKELGSQILKEHPVENTQLQNEKLYLYYLQNGRDMYVDQELDINRLSDYDVDHIVPQSFLKDDSIDNKVLTRSDKARGKSDNVPSEEVVKKMKNYWRQLLNAKLITQRKFDNLTKAERGGLSELDKAGFIKRQLVETRQITKHVAQILDSRMNTKYDENDKLIREVKVITLKSKLVSDFRKDFQFYKVREINNYHHAHDAYLNAVVGTALIKKYPKLESEFVYGDYKVYDVRKMIAKSEQEIGKATAKYFFYSNIMNFFKTEITLANGEIRKRPLIETNGETGEIVWDKGRDFATVRKVLSMPQVNIVKKTEVQTGGFSKESILPKRNSDKLIARKKDWDPKKYGGFDSPTVAYSVLVVAKVEKGKSKKLKSVKELLGITIMERSSFEKNPIDFLEAKGYKEVKKDLIIKLPKYSLFELENGRKRMLASAGELQKGNELALPSKYVNFLYLASHYEKLKGSPEDNEQKQLFVEQHKHYLDEIIEQISEFSKRVILADANLDKVLSAYNKHRDKPIREQAENIIHLFTLTNLGAPAAFKYFDTTIDRKRYTSTKEVLDATLIHQSITGLYETRIDLSQLGGDGGEAAAKGGSGGTLNIEDEYRLHETSKGPDVPLGSTWLSDFPQAWAETGGMGLAVRQAPLIIPLKATSTPVSIKQYPMSQEARLGIKPHIQRLLDQGILVPCQSPWNTPLLPVKKPGTNDYRPVQDLREVNKRVEDIHPTVPNPYNLLSGLPPSHQWYTVLDLKDAFFCLRLHPTSQSLFAFEWRDPEMGISGQLTWTRLPQGFKNSPTLFNEALHRDLADFRIQHPDLILLQYVDDLLLAATSELDCQQGTRALLQTLGDLGYRASAKKAQICQKQVKYLGYLLKEGQRWLTEARKETVMGQPTPKTPRQLREFLGKAGFCRLFIPGFAEMAAPLYPLTKPGTLFEWGPDQQKAYQEIKQALLTAPALGLPDLTKPFELFVDEKQGYAKGVLTQKLGPWRRPVAYLSKKLDPVAAGWPPCLRMVAAIAVLTKDAGKLTMGQPLVILAPHAVEALVKQPPDRWLSNARMTHYQALLLDTDRVQFGPIVALNPATLLPLPEEGLQHDCLDILAEAHGTRPDLTDQPLPDADHTWYTDGSSFLQEGQRKAGAAVTTETEVVWAKALPAGTSAQRAELIALTQALKMAEGKKLNVYTDSRYAFATAHIHGEIYRRRGWLTSEGKEIKNKDEILALLKALFLPKRLSIIHCPGHQKGNRAEARGNRMADQAAREVATRETPETSTLLAGKRTADGSEFEKRTADGSEFESPKKKAKVE

SEQ ID NO: 2585 - protein, 2093 aa, synthetic construct
MPAAKRVKLDGGDKKYSIGLDIGTNSVGWAVITDEYKVPSKKFKVLGNTDRHSIKKNLIGALLFDSGETAEATRLKRTARRRYTRRKNRICYLQEIFSNEMAKVDDSFFHRLEESFLVEEDKKHERHPIFGNIVDEVAYHEKYPTIYHLRKKLVDSTDKADLRLIYLALAHMIKFRGHFLIEGDLNPDNSDVDKLFIQLVQTYNQLFEENPINASGVDAKAILSARLSKSRRLENLIAQLPGEKKNGLFGNLIALSLGLTPNFKSNFDLAEDAKLQLSKDTYDDDLDNLLAQIGDQYADLFLAAKNLSDAILLSDILRVNTEITKAPLSASMIKRYDEHHQDLTLLKALVRQQLPEKYKEIFFDQSKNGYAGYIDGGASQEEFYKFIKPILEKMDGTEELLVKLNREDLLRKQRTFDNGSIPHQIHLGELHAILRRQEDFYPFLKDNREKIEKILTFRIPYYVGPLARGNSRFAWMTRKSEETITPWNFEEVVDKGASAQSFIERMTNFDKNLPNEKVLPKHSLLYEYFTVYNELTKVKYVTEGMRKPAFLSGEQKKAIVDLLFKTNRKVTVKQLKEDYFKKIECFDSVEISGVEDRFNASLGTYHDLLKIIKDKDFLDNEENEDILEDIVLTLTLFEDREMIEERLKTYAHLFDDKVMKQLKRRRYTGWGRLSRKLINGIRDKQSGKTILDFLKSDGFANRNFMQLIHDDSLTFKEDIQKAQVSGQGDSLHEHIANLAGSPAIKKGILQTVKVVDELVKVMGRHKPENIVIEMARENQTTQKGQKNSRERMKRIEEGIKELGSQILKEHPVENTQLQNEKLYLYYLQNGRDMYVDQELDINRLSDYDVDHIVPQSFLKDDSIDNKVLTRSDKARGKSDNVPSEEVVKKMKNYWRQLLNAKLITQRKFDNLTKAERGGLSELDKAGFIKRQLVETRQITKHVAQILDSRMNTKYDENDKLIREVKVITLKSKLVSDFRKDFQFYKVREINNYHHAHDAYLNAVVGTALIKKYPKLESEFVYGDYKVYDVRKMIAKSEQEIGKATAKYFFYSNIMNFFKTEITLANGEIRKRPLIETNGETGEIVWDKGRDFATVRKVLSMPQVNIVKKTEVQTGGFSKESILPKRNSDKLIARKKDWDPKKYGGFDSPTVAYSVLVVAKVEKGKSKKLKSVKELLGITIMERSSFEKNPIDFLEAKGYKEVKKDLIIKLPKYSLFELENGRKRMLASAGELQKGNELALPSKYVNFLYLASHYEKLKGSPEDNEQKQLFVEQHKHYLDEIIEQISEFSKRVILADANLDKVLSAYNKHRDKPIREQAENIIHLFTLTNLGAPAAFKYFDTTIDRKRYTSTKEVLDATLIHQSITGLYETRIDLSQLGGDGGEAAAKGSSGGTLNIEDEYRLHETSKGPDVPLGSTWLSDFPQAWAETGGMGLAVRQAPLIIPLKATSTPVSIKQYPMSQEARLGIKPHIQRLLDQGILVPCQSPWNTPLLPVKKPGTNDYRPVQDLREVNKRVEDIHPTVPNPYNLLSGLPPSHQWYTVLDLKDAFFCLRLHPTSQSLFAFEWRDPEMGISGQLTWTRLPQGFKNSPTLFNEALHRDLADFRIQHPDLILLQYVDDLLLAATSELDCQQGTRALLQTLGDLGYRASAKKAQICQKQVKYLGYLLKEGQRWLTEARKETVMGQPTPKTPRQLREFLGKAGFCRLFIPGFAEMAAPLYPLTKPGTLFEWGPDQQKAYQEIKQALLTAPALGLPDLTKPFELFVDEKQGYAKGVLTQKLGPWRRPVAYLSKKLDPVAAGWPPCLRMVAAIAVLTKDAGKLTMGQPLVILAPHAVEALVKQPPDRWLSNARMTHYQALLLDTDRVQFGPIVALNPATLLPLPEEGLQHDCLDILAEAHGTRPDLTDQPLPDADHTWYTDGSSFLQEGQRKAGAAVTTETEVVWAKALPAGTSAQRAELIALTQALKMAEGKKLNVYTDSRYAFATAHIHGEIYRRRGWLTSEGKEIKNKDEILALLKALFLPKRLSIIHCPGHQKGNRAEARGNRMADQAAREVATRETPETSTLLAGKRTADGSEFEKRTADGSEFESPKKKAKVE

SEQ ID NO: 2586 - protein, 2091 aa, synthetic construct
MPAAKRVKLDGGDKKYSIGLDIGTNSVGWAVITDEYKVPSKKFKVLGNTDRHSIKKNLIGALLFDSGETAEATRLKRTARRRYTRRKNRICYLQEIFSNEMAKVDDSFFHRLEESFLVEEDKKHERHPIFGNIVDEVAYHEKYPTIYHLRKKLVDSTDKADLRLIYLALAHMIKFRGHFLIEGDLNPDNSDVDKLFIQLVQTYNQLFEENPINASGVDAKAILSARLSKSRRLENLIAQLPGEKKNGLFGNLIALSLGLTPNFKSNFDLAEDAKLQLSKDTYDDDLDNLLAQIGDQYADLFLAAKNLSDAILLSDILRVNTEITKAPLSASMIKRYDEHHQDLTLLKALVRQQLPEKYKEIFFDQSKNGYAGYIDGGASQEEFYKFIKPILEKMDGTEELLVKLNREDLLRKQRTFDNGSIPHQIHLGELHAILRRQEDFYPFLKDNREKIEKILTFRIPYYVGPLARGNSRFAWMTRKSEETITPWNFEEVVDKGASAQSFIERMTNFDKNLPNEKVLPKHSLLYEYFTVYNELTKVKYVTEGMRKPAFLSGEQKKAIVDLLFKTNRKVTVKQLKEDYFKKIECFDSVEISGVEDRFNASLGTYHDLLKIIKDKDFLDNEENEDILEDIVLTLTLFEDREMIEERLKTYAHLFDDKVMKQLKRRRYTGWGRLSRKLINGIRDKQSGKTILDFLKSDGFANRNFMQLIHDDSLTFKEDIQKAQVSGQGDSLHEHIANLAGSPAIKKGILQTVKVVDELVKVMGRHKPENIVIEMARENQTTQKGQKNSRERMKRIEEGIKELGSQILKEHPVENTQLQNEKLYLYYLQNGRDMYVDQELDINRLSDYDVDHIVPQSFLKDDSIDNKVLTRSDKARGKSDNVPSEEVVKKMKNYWRQLLNAKLITQRKFDNLTKAERGGLSELDKAGFIKRQLVETRQITKHVAQILDSRMNTKYDENDKLIREVKVITLKSKLVSDFRKDFQFYKVREINNYHHAHDAYLNAVVGTALIKKYPKLESEFVYGDYKVYDVRKMIAKSEQEIGKATAKYFFYSNIMNFFKTEITLANGEIRKRPLIETNGETGEIVWDKGRDFATVRKVLSMPQVNIVKKTEVQTGGFSKESILPKRNSDKLIARKKDWDPKKYGGFDSPTVAYSVLVVAKVEKGKSKKLKSVKELLGITIMERSSFEKNPIDFLEAKGYKEVKKDLIIKLPKYSLFELENGRKRMLASAGELQKGNELALPSKYVNFLYLASHYEKLKGSPEDNEQKQLFVEQHKHYLDEIIEQISEFSKRVILADANLDKVLSAYNKHRDKPIREQAENIIHLFTLTNLGAPAAFKYFDTTIDRKRYTSTKEVLDATLIHQSITGLYETRIDLSQLGGDGGGGGGSSGGTLNIEDEYRLHETSKGPDVPLGSTWLSDFPQAWAETGGMGLAVRQAPLIIPLKATSTPVSIKQYPMSQEARLGIKPHIQRLLDQGILVPCQSPWNTPLLPVKKPGTNDYRPVQDLREVNKRVEDIHPTVPNPYNLLSGLPPSHQWYTVLDLKDAFFCLRLHPTSQSLFAFEWRDPEMGISGQLTWTRLPQGFKNSPTLFNEALHRDLADFRIQHPDLILLQYVDDLLLAATSELDCQQGTRALLQTLGDLGYRASAKKAQICQKQVKYLGYLLKEGQRWLTEARKETVMGQPTPKTPRQLREFLGKAGFCRLFIPGFAEMAAPLYPLTKPGTLFEWGPDQQKAYQEIKQALLTAPALGLPDLTKPFELFVDEKQGYAKGVLTQKLGPWRRPVAYLSKKLDPVAAGWPPCLRMVAAIAVLTKDAGKLTMGQPLVILAPHAVEALVKQPPDRWLSNARMTHYQALLLDTDRVQFGPIVALNPATLLPLPEEGLQHDCLDILAEAHGTRPDLTDQPLPDADHTWYTDGSSFLQEGQRKAGAAVTTETEVVWAKALPAGTSAQRAELIALTQALKMAEGKKLNVYTDSRYAFATAHIHGEIYRRRGWLTSEGKEIKNKDEILALLKALFLPKRLSIIHCPGHQKGNRAEARGNRMADQAAREVATRETPETSTLLAGKRTADGSEFEKRTADGSEFESPKKKAKVE

SEQ ID NO: 2587 - protein, 2093 aa, synthetic construct
MPAAKRVKLDGGDKKYSIGLDIGTNSVGWAVITDEYKVPSKKFKVLGNTDRHSIKKNLIGALLFDSGETAEATRLKRTARRRYTRRKNRICYLQEIFSNEMAKVDDSFFHRLEESFLVEEDKKHERHPIFGNIVDEVAYHEKYPTIYHLRKKLVDSTDKADLRLIYLALAHMIKFRGHFLIEGDLNPDNSDVDKLFIQLVQTYNQLFEENPINASGVDAKAILSARLSKSRRLENLIAQLPGEKKNGLFGNLIALSLGLTPNFKSNFDLAEDAKLQLSKDTYDDDLDNLLAQIGDQYADLFLAAKNLSDAILLSDILRVNTEITKAPLSASMIKRYDEHHQDLTLLKALVRQQLPEKYKEIFFDQSKNGYAGYIDGGASQEEFYKFIKPILEKMDGTEELLVKLNREDLLRKQRTFDNGSIPHQIHLGELHAILRRQEDFYPFLKDNREKIEKILTFRIPYYVGPLARGNSRFAWMTRKSEETITPWNFEEVVDKGASAQSFIERMTNFDKNLPNEKVLPKHSLLYEYFTVYNELTKVKYVTEGMRKPAFLSGEQKKAIVDLLFKTNRKVTVKQLKEDYFKKIECFDSVEISGVEDRFNASLGTYHDLLKIIKDKDFLDNEENEDILEDIVLTLTLFEDREMIEERLKTYAHLFDDKVMKQLKRRRYTGWGRLSRKLINGIRDKQSGKTILDFLKSDGFANRNFMQLIHDDSLTFKEDIQKAQVSGQGDSLHEHIANLAGSPAIKKGILQTVKVVDELVKVMGRHKPENIVIEMARENQTTQKGQKNSRERMKRIEEGIKELGSQILKEHPVENTQLQNEKLYLYYLQNGRDMYVDQELDINRLSDYDVDHIVPQSFLKDDSIDNKVLTRSDKARGKSDNVPSEEVVKKMKNYWRQLLNAKLITQRKFDNLTKAERGGLSELDKAGFIKRQLVETRQITKHVAQILDSRMNTKYDENDKLIREVKVITLKSKLVSDFRKDFQFYKVREINNYHHAHDAYLNAVVGTALIKKYPKLESEFVYGDYKVYDVRKMIAKSEQEIGKATAKYFFYSNIMNFFKTEITLANGEIRKRPLIETNGETGEIVWDKGRDFATVRKVLSMPQVNIVKKTEVQTGGFSKESILPKRNSDKLIARKKDWDPKKYGGFDSPTVAYSVLVVAKVEKGKSKKLKSVKELLGITIMERSSFEKNPIDFLEAKGYKEVKKDLIIKLPKYSLFELENGRKRMLASAGELQKGNELALPSKYVNFLYLASHYEKLKGSPEDNEQKQLFVEQHKHYLDEIIEQISEFSKRVILADANLDKVLSAYNKHRDKPIREQAENIIHLFTLTNLGAPAAFKYFDTTIDRKRYTSTKEVLDATLIHQSITGLYETRIDLSQLGGDGGEAAAKPAPGGTLNIEDEYRLHETSKGPDVPLGSTWLSDFPQAWAETGGMGLAVRQAPLIIPLKATSTPVSIKQYPMSQEARLGIKPHIQRLLDQGILVPCQSPWNTPLLPVKKPGTNDYRPVQDLREVNKRVEDIHPTVPNPYNLLSGLPPSHQWYTVLDLKDAFFCLRLHPTSQSLFAFEWRDPEMGISGQLTWTRLPQGFKNSPTLFNEALHRDLADFRIQHPDLILLQYVDDLLLAATSELDCQQGTRALLQTLGDLGYRASAKKAQICQKQVKYLGYLLKEGQRWLTEARKETVMGQPTPKTPRQLREFLGKAGFCRLFIPGFAEMAAPLYPLTKPGTLFEWGPDQQKAYQEIKQALLTAPALGLPDLTKPFELFVDEKQGYAKGVLTQKLGPWRRPVAYLSKKLDPVAAGWPPCLRMVAAIAVLTKDAGKLTMGQPLVILAPHAVEALVKQPPDRWLSNARMTHYQALLLDTDRVQFGPIVALNPATLLPLPEEGLQHDCLDILAEAHGTRPDLTDQPLPDADHTWYTDGSSFLQEGQRKAGAAVTTETEVVWAKALPAGTSAQRAELIALTQALKMAEGKKLNVYTDSRYAFATAHIHGEIYRRRGWLTSEGKEIKNKDEILALLKALFLPKRLSIIHCPGHQKGNRAEARGNRMADQAAREVATRETPETSTLLAGKRTADGSEFEKRTADGSEFESPKKKAKVE

SEQ ID NO: 2588 - protein, 2094 aa, synthetic construct
MPAAKRVKLDGGDKKYSIGLDIGTNSVGWAVITDEYKVPSKKFKVLGNTDRHSIKKNLIGALLFDSGETAEATRLKRTARRRYTRRKNRICYLQEIFSNEMAKVDDSFFHRLEESFLVEEDKKHERHPIFGNIVDEVAYHEKYPTIYHLRKKLVDSTDKADLRLIYLALAHMIKFRGHFLIEGDLNPDNSDVDKLFIQLVQTYNQLFEENPINASGVDAKAILSARLSKSRRLENLIAQLPGEKKNGLFGNLIALSLGLTPNFKSNFDLAEDAKLQLSKDTYDDDLDNLLAQIGDQYADLFLAAKNLSDAILLSDILRVNTEITKAPLSASMIKRYDEHHQDLTLLKALVRQQLPEKYKEIFFDQSKNGYAGYIDGGASQEEFYKFIKPILEKMDGTEELLVKLNREDLLRKQRTFDNGSIPHQIHLGELHAILRRQEDFYPFLKDNREKIEKILTFRIPYYVGPLARGNSRFAWMTRKSEETITPWNFEEVVDKGASAQSFIERMTNFDKNLPNEKVLPKHSLLYEYFTVYNELTKVKYVTEGMRKPAFLSGEQKKAIVDLLFKTNRKVTVKQLKEDYFKKIECFDSVEISGVEDRFNASLGTYHDLLKIIKDKDFLDNEENEDILEDIVLTLTLFEDREMIEERLKTYAHLFDDKVMKQLKRRRYTGWGRLSRKLINGIRDKQSGKTILDFLKSDGFANRNFMQLIHDDSLTFKEDIQKAQVSGQGDSLHEHIANLAGSPAIKKGILQTVKVVDELVKVMGRHKPENIVIEMARENQTTQKGQKNSRERMKRIEEGIKELGSQILKEHPVENTQLQNEKLYLYYLQNGRDMYVDQELDINRLSDYDVDHIVPQSFLKDDSIDNKVLTRSDKARGKSDNVPSEEVVKKMKNYWRQLLNAKLITQRKFDNLTKAERGGLSELDKAGFIKRQLVETRQITKHVAQILDSRMNTKYDENDKLIREVKVITLKSKLVSDFRKDFQFYKVREINNYHHAHDAYLNAVVGTALIKKYPKLESEFVYGDYKVYDVRKMIAKSEQEIGKATAKYFFYSNIMNFFKTEITLANGEIRKRPLIETNGETGEIVWDKGRDFATVRKVLSMPQVNIVKKTEVQTGGFSKESILPKRNSDKLIARKKDWDPKKYGGFDSPTVAYSVLVVAKVEKGKSKKLKSVKELLGITIMERSSFEKNPIDFLEAKGYKEVKKDLIIKLPKYSLFELENGRKRMLASAGELQKGNELALPSKYVNFLYLASHYEKLKGSPEDNEQKQLFVEQHKHYLDEIIEQISEFSKRVILADANLDKVLSAYNKHRDKPIREQAENIIHLFTLTNLGAPAAFKYFDTTIDRKRYTSTKEVLDATLIHQSITGLYETRIDLSQLGGDGGGGGGGSPAPGGTLNIEDEYRLHETSKGPDVPLGSTWLSDFPQAWAETGGMGLAVRQAPLIIPLKATSTPVSIKQYPMSQEARLGIKPHIQRLLDQGILVPCQSPWNTPLLPVKKPGTNDYRPVQDLREVNKRVEDIHPTVPNPYNLLSGLPPSHQWYTVLDLKDAFFCLRLHPTSQSLFAFEWRDPEMGISGQLTWTRLPQGFKNSPTLFNEALHRDLADFRIQHPDLILLQYVDDLLLAATSELDCQQGTRALLQTLGDLGYRASAKKAQICQKQVKYLGYLLKEGQRWLTEARKETVMGQPTPKTPRQLREFLGKAGFCRLFIPGFAEMAAPLYPLTKPGTLFEWGPDQQKAYQEIKQALLTAPALGLPDLTKPFELFVDEKQGYAKGVLTQKLGPWRRPVAYLSKKLDPVAAGWPPCLRMVAAIAVLTKDAGKLTMGQPLVILAPHAVEALVKQPPDRWLSNARMTHYQALLLDTDRVQFGPIVALNPATLLPLPEEGLQHDCLDILAEAHGTRPDLTDQPLPDADHTWYTDGSSFLQEGQRKAGAAVTTETEVVWAKALPAGTSAQRAELIALTQALKMAEGKKLNVYTDSRYAFATAHIHGEIYRRRGWLTSEGKEIKNKDEILALLKALFLPKRLSIIHCPGHQKGNRAEARGNRMADQAAREVATRETPETSTLLAGKRTADGSEFEKRTADGSEFESPKKKAKVE

SEQ ID NO: 2589 - protein, 2094 aa, synthetic construct
MPAAKRVKLDGGDKKYSIGLDIGTNSVGWAVITDEYKVPSKKFKVLGNTDRHSIKKNLIGALLFDSGETAEATRLKRTARRRYTRRKNRICYLQEIFSNEMAKVDDSFFHRLEESFLVEEDKKHERHPIFGNIVDEVAYHEKYPTIYHLRKKLVDSTDKADLRLIYLALAHMIKFRGHFLIEGDLNPDNSDVDKLFIQLVQTYNQLFEENPINASGVDAKAILSARLSKSRRLENLIAQLPGEKKNGLFGNLIALSLGLTPNFKSNFDLAEDAKLQLSKDTYDDDLDNLLAQIGDQYADLFLAAKNLSDAILLSDILRVNTEITKAPLSASMIKRYDEHHQDLTLLKALVRQQLPEKYKEIFFDQSKNGYAGYIDGGASQEEFYKFIKPILEKMDGTEELLVKLNREDLLRKQRTFDNGSIPHQIHLGELHAILRRQEDFYPFLKDNREKIEKILTFRIPYYVGPLARGNSRFAWMTRKSEETITPWNFEEVVDKGASAQSFIERMTNFDKNLPNEKVLPKHSLLYEYFTVYNELTKVKYVTEGMRKPAFLSGEQKKAIVDLLFKTNRKVTVKQLKEDYFKKIECFDSVEISGVEDRFNASLGTYHDLLKIIKDKDFLDNEENEDILEDIVLTLTLFEDREMIEERLKTYAHLFDDKVMKQLKRRRYTGWGRLSRKLINGIRDKQSGKTILDFLKSDGFANRNFMQLIHDDSLTFKEDIQKAQVSGQGDSLHEHIANLAGSPAIKKGILQTVKVVDELVKVMGRHKPENIVIEMARENQTTQKGQKNSRERMKRIEEGIKELGSQILKEHPVENTQLQNEKLYLYYLQNGRDMYVDQELDINRLSDYDVDHIVPQSFLKDDSIDNKVLTRSDKARGKSDNVPSEEVVKKMKNYWRQLLNAKLITQRKFDNLTKAERGGLSELDKAGFIKRQLVETRQITKHVAQILDSRMNTKYDENDKLIREVKVITLKSKLVSDFRKDFQFYKVREINNYHHAHDAYLNAVVGTALIKKYPKLESEFVYGDYKVYDVRKMIAKSEQEIGKATAKYFFYSNIMNFFKTEITLANGEIRKRPLIETNGETGEIVWDKGRDFATVRKVLSMPQVNIVKKTEVQTGGFSKESILPKRNSDKLIARKKDWDPKKYGGFDSPTVAYSVLVVAKVEKGKSKKLKSVKELLGITIMERSSFEKNPIDFLEAKGYKEVKKDLIIKLPKYSLFELENGRKRMLASAGELQKGNELALPSKYVNFLYLASHYEKLKGSPEDNEQKQLFVEQHKHYLDEIIEQISEFSKRVILADANLDKVLSAYNKHRDKPIREQAENIIHLFTLTNLGAPAAFKYFDTTIDRKRYTSTKEVLDATLIHQSITGLYETRIDLSQLGGDGGGGGGSSPAPGGTLNIEDEYRLHETSKGPDVPLGSTWLSDFPQAWAETGGMGLAVRQAPLIIPLKATSTPVSIKQYPMSQEARLGIKPHIQRLLDQGILVPCQSPWNTPLLPVKKPGTNDYRPVQDLREVNKRVEDIHPTVPNPYNLLSGLPPSHQWYTVLDLKDAFFCLRLHPTSQSLFAFEWRDPEMGISGQLTWTRLPQGFKNSPTLFNEALHRDLADFRIQHPDLILLQYVDDLLLAATSELDCQQGTRALLQTLGDLGYRASAKKAQICQKQVKYLGYLLKEGQRWLTEARKETVMGQPTPKTPRQLREFLGKAGFCRLFIPGFAEMAAPLYPLTKPGTLFEWGPDQQKAYQEIKQALLTAPALGLPDLTKPFELFVDEKQGYAKGVLTQKLGPWRRPVAYLSKKLDPVAAGWPPCLRMVAAIAVLTKDAGKLTMGQPLVILAPHAVEALVKQPPDRWLSNARMTHYQALLLDTDRVQFGPIVALNPATLLPLPEEGLQHDCLDILAEAHGTRPDLTDQPLPDADHTWYTDGSSFLQEGQRKAGAAVTTETEVVWAKALPAGTSAQRAELIALTQALKMAEGKKLNVYTDSRYAFATAHIHGEIYRRRGWLTSEGKEIKNKDEILALLKALFLPKRLSIIHCPGHQKGNRAEARGNRMADQAAREVATRETPETSTLLAGKRTADGSEFEKRTADGSEFESPKKKAKVE

SEQ ID NO: 2590 - protein, 2091 aa, synthetic construct
MPAAKRVKLDGGDKKYSIGLDIGTNSVGWAVITDEYKVPSKKFKVLGNTDRHSIKKNLIGALLFDSGETAEATRLKRTARRRYTRRKNRICYLQEIFSNEMAKVDDSFFHRLEESFLVEEDKKHERHPIFGNIVDEVAYHEKYPTIYHLRKKLVDSTDKADLRLIYLALAHMIKFRGHFLIEGDLNPDNSDVDKLFIQLVQTYNQLFEENPINASGVDAKAILSARLSKSRRLENLIAQLPGEKKNGLFGNLIALSLGLTPNFKSNFDLAEDAKLQLSKDTYDDDLDNLLAQIGDQYADLFLAAKNLSDAILLSDILRVNTEITKAPLSASMIKRYDEHHQDLTLLKALVRQQLPEKYKEIFFDQSKNGYAGYIDGGASQEEFYKFIKPILEKMDGTEELLVKLNREDLLRKQRTFDNGSIPHQIHLGELHAILRRQEDFYPFLKDNREKIEKILTFRIPYYVGPLARGNSRFAWMTRKSEETITPWNFEEVVDKGASAQSFIERMTNFDKNLPNEKVLPKHSLLYEYFTVYNELTKVKYVTEGMRKPAFLSGEQKKAIVDLLFKTNRKVTVKQLKEDYFKKIECFDSVEISGVEDRFNASLGTYHDLLKIIKDKDFLDNEENEDILEDIVLTLTLFEDREMIEERLKTYAHLFDDKVMKQLKRRRYTGWGRLSRKLINGIRDKQSGKTILDFLKSDGFANRNFMQLIHDDSLTFKEDIQKAQVSGQGDSLHEHIANLAGSPAIKKGILQTVKVVDELVKVMGRHKPENIVIEMARENQTTQKGQKNSRERMKRIEEGIKELGSQILKEHPVENTQLQNEKLYLYYLQNGRDMYVDQELDINRLSDYDVDHIVPQSFLKDDSIDNKVLTRSDKARGKSDNVPSEEVVKKMKNYWRQLLNAKLITQRKFDNLTKAERGGLSELDKAGFIKRQLVETRQITKHVAQILDSRMNTKYDENDKLIREVKVITLKSKLVSDFRKDFQFYKVREINNYHHAHDAYLNAVVGTALIKKYPKLESEFVYGDYKVYDVRKMIAKSEQEIGKATAKYFFYSNIMNFFKTEITLANGEIRKRPLIETNGETGEIVWDKGRDFATVRKVLSMPQVNIVKKTEVQTGGFSKESILPKRNSDKLIARKKDWDPKKYGGFDSPTVAYSVLVVAKVEKGKSKKLKSVKELLGITIMERSSFEKNPIDFLEAKGYKEVKKDLIIKLPKYSLFELENGRKRMLASAGELQKGNELALPSKYVNFLYLASHYEKLKGSPEDNEQKQLFVEQHKHYLDEIIEQISEFSKRVILADANLDKVLSAYNKHRDKPIREQAENIIHLFTLTNLGAPAAFKYFDTTIDRKRYTSTKEVLDATLIHQSITGLYETRIDLSQLGGDGGGSSGGSGGTLNIEDEYRLHETSKGPDVPLGSTWLSDFPQAWAETGGMGLAVRQAPLIIPLKATSTPVSIKQYPMSQEARLGIKPHIQRLLDQGILVPCQSPWNTPLLPVKKPGTNDYRPVQDLREVNKRVEDIHPTVPNPYNLLSGLPPSHQWYTVLDLKDAFFCLRLHPTSQSLFAFEWRDPEMGISGQLTWTRLPQGFKNSPTLFNEALHRDLADFRIQHPDLILLQYVDDLLLAATSELDCQQGTRALLQTLGDLGYRASAKKAQICQKQVKYLGYLLKEGQRWLTEARKETVMGQPTPKTPRQLREFLGKAGFCRLFIPGFAEMAAPLYPLTKPGTLFEWGPDQQKAYQEIKQALLTAPALGLPDLTKPFELFVDEKQGYAKGVLTQKLGPWRRPVAYLSKKLDPVAAGWPPCLRMVAAIAVLTKDAGKLTMGQPLVILAPHAVEALVKQPPDRWLSNARMTHYQALLLDTDRVQFGPIVALNPATLLPLPEEGLQHDCLDILAEAHGTRPDLTDQPLPDADHTWYTDGSSFLQEGQRKAGAAVTTETEVVWAKALPAGTSAQRAELIALTQALKMAEGKKLNVYTDSRYAFATAHIHGEIYRRRGWLTSEGKEIKNKDEILALLKALFLPKRLSIIHCPGHQKGNRAEARGNRMADQAAREVATRETPETSTLLAGKRTADGSEFEKRTADGSEFESPKKKAKVE

SEQ ID NO: 2591 - protein, 2094 aa, synthetic construct
MPAAKRVKLDGGDKKYSIGLDIGTNSVGWAVITDEYKVPSKKFKVLGNTDRHSIKKNLIGALLFDSGETAEATRLKRTARRRYTRRKNRICYLQEIFSNEMAKVDDSFFHRLEESFLVEEDKKHERHPIFGNIVDEVAYHEKYPTIYHLRKKLVDSTDKADLRLIYLALAHMIKFRGHFLIEGDLNPDNSDVDKLFIQLVQTYNQLFEENPINASGVDAKAILSARLSKSRRLENLIAQLPGEKKNGLFGNLIALSLGLTPNFKSNFDLAEDAKLQLSKDTYDDDLDNLLAQIGDQYADLFLAAKNLSDAILLSDILRVNTEITKAPLSASMIKRYDEHHQDLTLLKALVRQQLPEKYKEIFFDQSKNGYAGYIDGGASQEEFYKFIKPILEKMDGTEELLVKLNREDLLRKQRTFDNGSIPHQIHLGELHAILRRQEDFYPFLKDNREKIEKILTFRIPYYVGPLARGNSRFAWMTRKSEETITPWNFEEVVDKGASAQSFIERMTNFDKNLPNEKVLPKHSLLYEYFTVYNELTKVKYVTEGMRKPAFLSGEQKKAIVDLLFKTNRKVTVKQLKEDYFKKIECFDSVEISGVEDRFNASLGTYHDLLKIIKDKDFLDNEENEDILEDIVLTLTLFEDREMIEERLKTYAHLFDDKVMKQLKRRRYTGWGRLSRKLINGIRDKQSGKTILDFLKSDGFANRNFMQLIHDDSLTFKEDIQKAQVSGQGDSLHEHIANLAGSPAIKKGILQTVKVVDELVKVMGRHKPENIVIEMARENQTTQKGQKNSRERMKRIEEGIKELGSQILKEHPVENTQLQNEKLYLYYLQNGRDMYVDQELDINRLSDYDVDHIVPQSFLKDDSIDNKVLTRSDKARGKSDNVPSEEVVKKMKNYWRQLLNAKLITQRKFDNLTKAERGGLSELDKAGFIKRQLVETRQITKHVAQILDSRMNTKYDENDKLIREVKVITLKSKLVSDFRKDFQFYKVREINNYHHAHDAYLNAVVGTALIKKYPKLESEFVYGDYKVYDVRKMIAKSEQEIGKATAKYFFYSNIMNFFKTEITLANGEIRKRPLIETNGETGEIVWDKGRDFATVRKVLSMPQVNIVKKTEVQTGGFSKESILPKRNSDKLIARKKDWDPKKYGGFDSPTVAYSVLVVAKVEKGKSKKLKSVKELLGITIMERSSFEKNPIDFLEAKGYKEVKKDLIIKLPKYSLFELENGRKRMLASAGELQKGNELALPSKYVNFLYLASHYEKLKGSPEDNEQKQLFVEQHKHYLDEIIEQISEFSKRVILADANLDKVLSAYNKHRDKPIREQAENIIHLFTLTNLGAPAAFKYFDTTIDRKRYTSTKEVLDATLIHQSITGLYETRIDLSQLGGDGGGSSGGSPAPGGTLNIEDEYRLHETSKGPDVPLGSTWLSDFPQAWAETGGMGLAVRQAPLIIPLKATSTPVSIKQYPMSQEARLGIKPHIQRLLDQGILVPCQSPWNTPLLPVKKPGTNDYRPVQDLREVNKRVEDIHPTVPNPYNLLSGLPPSHQWYTVLDLKDAFFCLRLHPTSQSLFAFEWRDPEMGISGQLTWTRLPQGFKNSPTLFNEALHRDLADFRIQHPDLILLQYVDDLLLAATSELDCQQGTRALLQTLGDLGYRASAKKAQICQKQVKYLGYLLKEGQRWLTEARKETVMGQPTPKTPRQLREFLGKAGFCRLFIPGFAEMAAPLYPLTKPGTLFEWGPDQQKAYQEIKQALLTAPALGLPDLTKPFELFVDEKQGYAKGVLTQKLGPWRRPVAYLSKKLDPVAAGWPPCLRMVAAIAVLTKDAGKLTMGQPLVILAPHAVEALVKQPPDRWLSNARMTHYQALLLDTDRVQFGPIVALNPATLLPLPEEGLQHDCLDILAEAHGTRPDLTDQPLPDADHTWYTDGSSFLQEGQRKAGAAVTTETEVVWAKALPAGTSAQRAELIALTQALKMAEGKKLNVYTDSRYAFATAHIHGEIYRRRGWLTSEGKEIKNKDEILALLKALFLPKRLSIIHCPGHQKGNRAEARGNRMADQAAREVATRETPETSTLLAGKRTADGSEFEKRTADGSEFESPKKKAKVE

SEQ ID NO: 2592 - protein, 2096 aa, synthetic construct
MPAAKRVKLDGGDKKYSIGLDIGTNSVGWAVITDEYKVPSKKFKVLGNTDRHSIKKNLIGALLFDSGETAEATRLKRTARRRYTRRKNRICYLQEIFSNEMAKVDDSFFHRLEESFLVEEDKKHERHPIFGNIVDEVAYHEKYPTIYHLRKKLVDSTDKADLRLIYLALAHMIKFRGHFLIEGDLNPDNSDVDKLFIQLVQTYNQLFEENPINASGVDAKAILSARLSKSRRLENLIAQLPGEKKNGLFGNLIALSLGLTPNFKSNFDLAEDAKLQLSKDTYDDDLDNLLAQIGDQYADLFLAAKNLSDAILLSDILRVNTEITKAPLSASMIKRYDEHHQDLTLLKALVRQQLPEKYKEIFFDQSKNGYAGYIDGGASQEEFYKFIKPILEKMDGTEELLVKLNREDLLRKQRTFDNGSIPHQIHLGELHAILRRQEDFYPFLKDNREKIEKILTFRIPYYVGPLARGNSRFAWMTRKSEETITPWNFEEVVDKGASAQSFIERMTNFDKNLPNEKVLPKHSLLYEYFTVYNELTKVKYVTEGMRKPAFLSGEQKKAIVDLLFKTNRKVTVKQLKEDYFKKIECFDSVEISGVEDRFNASLGTYHDLLKIIKDKDFLDNEENEDILEDIVLTLTLFEDREMIEERLKTYAHLFDDKVMKQLKRRRYTGWGRLSRKLINGIRDKQSGKTILDFLKSDGFANRNFMQLIHDDSLTFKEDIQKAQVSGQGDSLHEHIANLAGSPAIKKGILQTVKVVDELVKVMGRHKPENIVIEMARENQTTQKGQKNSRERMKRIEEGIKELGSQILKEHPVENTQLQNEKLYLYYLQNGRDMYVDQELDINRLSDYDVDHIVPQSFLKDDSIDNKVLTRSDKARGKSDNVPSEEVVKKMKNYWRQLLNAKLITQRKFDNLTKAERGGLSELDKAGFIKRQLVETRQITKHVAQILDSRMNTKYDENDKLIREVKVITLKSKLVSDFRKDFQFYKVREINNYHHAHDAYLNAVVGTALIKKYPKLESEFVYGDYKVYDVRKMIAKSEQEIGKATAKYFFYSNIMNFFKTEITLANGEIRKRPLIETNGETGEIVWDKGRDFATVRKVLSMPQVNIVKKTEVQTGGFSKESILPKRNSDKLIARKKDWDPKKYGGFDSPTVAYSVLVVAKVEKGKSKKLKSVKELLGITIMERSSFEKNPIDFLEAKGYKEVKKDLIIKLPKYSLFELENGRKRMLASAGELQKGNELALPSKYVNFLYLASHYEKLKGSPEDNEQKQLFVEQHKHYLDEIIEQISEFSKRVILADANLDKVLSAYNKHRDKPIREQAENIIHLFTLTNLGAPAAFKYFDTTIDRKRYTSTKEVLDATLIHQSITGLYETRIDLSQLGGDGGGGGPAPEAAAKGGTLNIEDEYRLHETSKGPDVPLGSTWLSDFPQAWAETGGMGLAVRQAPLIIPLKATSTPVSIKQYPMSQEARLGIKPHIQRLLDQGILVPCQSPWNTPLLPVKKPGTNDYRPVQDLREVNKRVEDIHPTVPNPYNLLSGLPPSHQWYTVLDLKDAFFCLRLHPTSQSLFAFEWRDPEMGISGQLTWTRLPQGFKNSPTLFNEALHRDLADFRIQHPDLILLQYVDDLLLAATSELDCQQGTRALLQTLGDLGYRASAKKAQICQKQVKYLGYLLKEGQRWLTEARKETVMGQPTPKTPRQLREFLGKAGFCRLFIPGFAEMAAPLYPLTKPGTLFEWGPDQQKAYQEIKQALLTAPALGLPDLTKPFELFVDEKQGYAKGVLTQKLGPWRRPVAYLSKKLDPVAAGWPPCLRMVAAIAVLTKDAGKLTMGQPLVILAPHAVEALVKQPPDRWLSNARMTHYQALLLDTDRVQFGPIVALNPATLLPLPEEGLQHDCLDILAEAHGTRPDLTDQPLPDADHTWYTDGSSFLQEGQRKAGAAVTTETEVVWAKALPAGTSAQRAELIALTQALKMAEGKKLNVYTDSRYAFATAHIHGEIYRRRGWLTSEGKEIKNKDEILALLKALFLPKRLSIIHCPGHQKGNRAEARGNRMADQAAREVATRETPETSTLLAGKRTADGSEFEKRTADGSEFESPKKKAKVE

SEQ ID NO: 2593 - protein, 2094 aa, synthetic construct
MPAAKRVKLDGGDKKYSIGLDIGTNSVGWAVITDEYKVPSKKFKVLGNTDRHSIKKNLIGALLFDSGETAEATRLKRTARRRYTRRKNRICYLQEIFSNEMAKVDDSFFHRLEESFLVEEDKKHERHPIFGNIVDEVAYHEKYPTIYHLRKKLVDSTDKADLRLIYLALAHMIKFRGHFLIEGDLNPDNSDVDKLFIQLVQTYNQLFEENPINASGVDAKAILSARLSKSRRLENLIAQLPGEKKNGLFGNLIALSLGLTPNFKSNFDLAEDAKLQLSKDTYDDDLDNLLAQIGDQYADLFLAAKNLSDAILLSDILRVNTEITKAPLSASMIKRYDEHHQDLTLLKALVRQQLPEKYKEIFFDQSKNGYAGYIDGGASQEEFYKFIKPILEKMDGTEELLVKLNREDLLRKQRTFDNGSIPHQIHLGELHAILRRQEDFYPFLKDNREKIEKILTFRIPYYVGPLARGNSRFAWMTRKSEETITPWNFEEVVDKGASAQSFIERMTNFDKNLPNEKVLPKHSLLYEYFTVYNELTKVKYVTEGMRKPAFLSGEQKKAIVDLLFKTNRKVTVKQLKEDYFKKIECFDSVEISGVEDRFNASLGTYHDLLKIIKDKDFLDNEENEDILEDIVLTLTLFEDREMIEERLKTYAHLFDDKVMKQLKRRRYTGWGRLSRKLINGIRDKQSGKTILDFLKSDGFANRNFMQLIHDDSLTFKEDIQKAQVSGQGDSLHEHIANLAGSPAIKKGILQTVKVVDELVKVMGRHKPENIVIEMARENQTTQKGQKNSRERMKRIEEGIKELGSQILKEHPVENTQLQNEKLYLYYLQNGRDMYVDQELDINRLSDYDVDHIVPQSFLKDDSIDNKVLTRSDKARGKSDNVPSEEVVKKMKNYWRQLLNAKLITQRKFDNLTKAERGGLSELDKAGFIKRQLVETRQITKHVAQILDSRMNTKYDENDKLIREVKVITLKSKLVSDFRKDFQFYKVREINNYHHAHDAYLNAVVGTALIKKYPKLESEFVYGDYKVYDVRKMIAKSEQEIGKATAKYFFYSNIMNFFKTEITLANGEIRKRPLIETNGETGEIVWDKGRDFATVRKVLSMPQVNIVKKTEVQTGGFSKESILPKRNSDKLIARKKDWDPKKYGGFDSPTVAYSVLVVAKVEKGKSKKLKSVKELLGITIMERSSFEKNPIDFLEAKGYKEVKKDLIIKLPKYSLFELENGRKRMLASAGELQKGNELALPSKYVNFLYLASHYEKLKGSPEDNEQKQLFVEQHKHYLDEIIEQISEFSKRVILADANLDKVLSAYNKHRDKPIREQAENIIHLFTLTNLGAPAAFKYFDTTIDRKRYTSTKEVLDATLIHQSITGLYETRIDLSQLGGDGGGGGPAPGSSGGTLNIEDEYRLHETSKGPDVPLGSTWLSDFPQAWAETGGMGLAVRQAPLIIPLKATSTPVSIKQYPMSQEARLGIKPHIQRLLDQGILVPCQSPWNTPLLPVKKPGTNDYRPVQDLREVNKRVEDIHPTVPNPYNLLSGLPPSHQWYTVLDLKDAFFCLRLHPTSQSLFAFEWRDPEMGISGQLTWTRLPQGFKNSPTLFNEALHRDLADFRIQHPDLILLQYVDDLLLAATSELDCQQGTRALLQTLGDLGYRASAKKAQICQKQVKYLGYLLKEGQRWLTEARKETVMGQPTPKTPRQLREFLGKAGFCRLFIPGFAEMAAPLYPLTKPGTLFEWGPDQQKAYQEIKQALLTAPALGLPDLTKPFELFVDEKQGYAKGVLTQKLGPWRRPVAYLSKKLDPVAAGWPPCLRMVAAIAVLTKDAGKLTMGQPLVILAPHAVEALVKQPPDRWLSNARMTHYQALLLDTDRVQFGPIVALNPATLLPLPEEGLQHDCLDILAEAHGTRPDLTDQPLPDADHTWYTDGSSFLQEGQRKAGAAVTTETEVVWAKALPAGTSAQRAELIALTQALKMAEGKKLNVYTDSRYAFATAHIHGEIYRRRGWLTSEGKEIKNKDEILALLKALFLPKRLSIIHCPGHQKGNRAEARGNRMADQAAREVATRETPETSTLLAGKRTADGSEFEKRTADGSEFESPKKKAKVE

SEQ ID NO: 2594 - protein, 2091 aa, synthetic construct
MPAAKRVKLDGGDKKYSIGLDIGTNSVGWAVITDEYKVPSKKFKVLGNTDRHSIKKNLIGALLFDSGETAEATRLKRTARRRYTRRKNRICYLQEIFSNEMAKVDDSFFHRLEESFLVEEDKKHERHPIFGNIVDEVAYHEKYPTIYHLRKKLVDSTDKADLRLIYLALAHMIKFRGHFLIEGDLNPDNSDVDKLFIQLVQTYNQLFEENPINASGVDAKAILSARLSKSRRLENLIAQLPGEKKNGLFGNLIALSLGLTPNFKSNFDLAEDAKLQLSKDTYDDDLDNLLAQIGDQYADLFLAAKNLSDAILLSDILRVNTEITKAPLSASMIKRYDEHHQDLTLLKALVRQQLPEKYKEIFFDQSKNGYAGYIDGGASQEEFYKFIKPILEKMDGTEELLVKLNREDLLRKQRTFDNGSIPHQIHLGELHAILRRQEDFYPFLKDNREKIEKILTFRIPYYVGPLARGNSRFAWMTRKSEETITPWNFEEVVDKGASAQSFIERMTNFDKNLPNEKVLPKHSLLYEYFTVYNELTKVKYVTEGMRKPAFLSGEQKKAIVDLLFKTNRKVTVKQLKEDYFKKIECFDSVEISGVEDRFNASLGTYHDLLKIIKDKDFLDNEENEDILEDIVLTLTLFEDREMIEERLKTYAHLFDDKVMKQLKRRRYTGWGRLSRKLINGIRDKQSGKTILDFLKSDGFANRNFMQLIHDDSLTFKEDIQKAQVSGQGDSLHEHIANLAGSPAIKKGILQTVKVVDELVKVMGRHKPENIVIEMARENQTTQKGQKNSRERMKRIEEGIKELGSQILKEHPVENTQLQNEKLYLYYLQNGRDMYVDQELDINRLSDYDVDHIVPQSFLKDDSIDNKVLTRSDKARGKSDNVPSEEVVKKMKNYWRQLLNAKLITQRKFDNLTKAERGGLSELDKAGFIKRQLVETRQITKHVAQILDSRMNTKYDENDKLIREVKVITLKSKLVSDFRKDFQFYKVREINNYHHAHDAYLNAVVGTALIKKYPKLESEFVYGDYKVYDVRKMIAKSEQEIGKATAKYFFYSNIMNFFKTEITLANGEIRKRPLIETNGETGEIVWDKGRDFATVRKVLSMPQVNIVKKTEVQTGGFSKESILPKRNSDKLIARKKDWDPKKYGGFDSPTVAYSVLVVAKVEKGKSKKLKSVKELLGITIMERSSFEKNPIDFLEAKGYKEVKKDLIIKLPKYSLFELENGRKRMLASAGELQKGNELALPSKYVNFLYLASHYEKLKGSPEDNEQKQLFVEQHKHYLDEIIEQISEFSKRVILADANLDKVLSAYNKHRDKPIREQAENIIHLFTLTNLGAPAAFKYFDTTIDRKRYTSTKEVLDATLIHQSITGLYETRIDLSQLGGDGGGSSGGGGGTLNIEDEYRLHETSKGPDVPLGSTWLSDFPQAWAETGGMGLAVRQAPLIIPLKATSTPVSIKQYPMSQEARLGIKPHIQRLLDQGILVPCQSPWNTPLLPVKKPGTNDYRPVQDLREVNKRVEDIHPTVPNPYNLLSGLPPSHQWYTVLDLKDAFFCLRLHPTSQSLFAFEWRDPEMGISGQLTWTRLPQGFKNSPTLFNEALHRDLADFRIQHPDLILLQYVDDLLLAATSELDCQQGTRALLQTLGDLGYRASAKKAQICQKQVKYLGYLLKEGQRWLTEARKETVMGQPTPKTPRQLREFLGKAGFCRLFIPGFAEMAAPLYPLTKPGTLFEWGPDQQKAYQEIKQALLTAPALGLPDLTKPFELFVDEKQGYAKGVLTQKLGPWRRPVAYLSKKLDPVAAGWPPCLRMVAAIAVLTKDAGKLTMGQPLVILAPHAVEALVKQPPDRWLSNARMTHYQALLLDTDRVQFGPIVALNPATLLPLPEEGLQHDCLDILAEAHGTRPDLTDQPLPDADHTWYTDGSSFLQEGQRKAGAAVTTETEVVWAKALPAGTSAQRAELIALTQALKMAEGKKLNVYTDSRYAFATAHIHGEIYRRRGWLTSEGKEIKNKDEILALLKALFLPKRLSIIHCPGHQKGNRAEARGNRMADQAAREVATRETPETSTLLAGKRTADGSEFEKRTADGSEFESPKKKAKVE

SEQ ID NO: 2595 - protein, 2103 aa, synthetic construct
MPAAKRVKLDGGDKKYSIGLDIGTNSVGWAVITDEYKVPSKKFKVLGNTDRHSIKKNLIGALLFDSGETAEATRLKRTARRRYTRRKNRICYLQEIFSNEMAKVDDSFFHRLEESFLVEEDKKHERHPIFGNIVDEVAYHEKYPTIYHLRKKLVDSTDKADLRLIYLALAHMIKFRGHFLIEGDLNPDNSDVDKLFIQLVQTYNQLFEENPINASGVDAKAILSARLSKSRRLENLIAQLPGEKKNGLFGNLIALSLGLTPNFKSNFDLAEDAKLQLSKDTYDDDLDNLLAQIGDQYADLFLAAKNLSDAILLSDILRVNTEITKAPLSASMIKRYDEHHQDLTLLKALVRQQLPEKYKEIFFDQSKNGYAGYIDGGASQEEFYKFIKPILEKMDGTEELLVKLNREDLLRKQRTFDNGSIPHQIHLGELHAILRRQEDFYPFLKDNREKIEKILTFRIPYYVGPLARGNSRFAWMTRKSEETITPWNFEEVVDKGASAQSFIERMTNFDKNLPNEKVLPKHSLLYEYFTVYNELTKVKYVTEGMRKPAFLSGEQKKAIVDLLFKTNRKVTVKQLKEDYFKKIECFDSVEISGVEDRFNASLGTYHDLLKIIKDKDFLDNEENEDILEDIVLTLTLFEDREMIEERLKTYAHLFDDKVMKQLKRRRYTGWGRLSRKLINGIRDKQSGKTILDFLKSDGFANRNFMQLIHDDSLTFKEDIQKAQVSGQGDSLHEHIANLAGSPAIKKGILQTVKVVDELVKVMGRHKPENIVIEMARENQTTQKGQKNSRERMKRIEEGIKELGSQILKEHPVENTQLQNEKLYLYYLQNGRDMYVDQELDINRLSDYDVDHIVPQSFLKDDSIDNKVLTRSDKARGKSDNVPSEEVVKKMKNYWRQLLNAKLITQRKFDNLTKAERGGLSELDKAGFIKRQLVETRQITKHVAQILDSRMNTKYDENDKLIREVKVITLKSKLVSDFRKDFQFYKVREINNYHHAHDAYLNAVVGTALIKKYPKLESEFVYGDYKVYDVRKMIAKSEQEIGKATAKYFFYSNIMNFFKTEITLANGEIRKRPLIETNGETGEIVWDKGRDFATVRKVLSMPQVNIVKKTEVQTGGFSKESILPKRNSDKLIARKKDWDPKKYGGFDSPTVAYSVLVVAKVEKGKSKKLKSVKELLGITIMERSSFEKNPIDFLEAKGYKEVKKDLIIKLPKYSLFELENGRKRMLASAGELQKGNELALPSKYVNFLYLASHYEKLKGSPEDNEQKQLFVEQHKHYLDEIIEQISEFSKRVILADANLDKVLSAYNKHRDKPIREQAENIIHLFTLTNLGAPAAFKYFDTTIDRKRYTSTKEVLDATLIHQSITGLYETRIDLSQLGGDGGGSSGSSGSSGSSGSSGSSGGTLNIEDEYRLHETSKGPDVPLGSTWLSDFPQAWAETGGMGLAVRQAPLIIPLKATSTPVSIKQYPMSQEARLGIKPHIQRLLDQGILVPCQSPWNTPLLPVKKPGTNDYRPVQDLREVNKRVEDIHPTVPNPYNLLSGLPPSHQWYTVLDLKDAFFCLRLHPTSQSLFAFEWRDPEMGISGQLTWTRLPQGFKNSPTLFNEALHRDLADFRIQHPDLILLQYVDDLLLAATSELDCQQGTRALLQTLGDLGYRASAKKAQICQKQVKYLGYLLKEGQRWLTEARKETVMGQPTPKTPRQLREFLGKAGFCRLFIPGFAEMAAPLYPLTKPGTLFEWGPDQQKAYQEIKQALLTAPALGLPDLTKPFELFVDEKQGYAKGVLTQKLGPWRRPVAYLSKKLDPVAAGWPPCLRMVAAIAVLTKDAGKLTMGQPLVILAPHAVEALVKQPPDRWLSNARMTHYQALLLDTDRVQFGPIVALNPATLLPLPEEGLQHDCLDILAEAHGTRPDLTDQPLPDADHTWYTDGSSFLQEGQRKAGAAVTTETEVVWAKALPAGTSAQRAELIALTQALKMAEGKKLNVYTDSRYAFATAHIHGEIYRRRGWLTSEGKEIKNKDEILALLKALFLPKRLSIIHCPGHQKGNRAEARGNRMADQAAREVATRETPETSTLLAGKRTADGSEFEKRTADGSEFESPKKKAKVE

SEQ ID NO: 2596 - protein, 2088 aa, synthetic construct
MPAAKRVKLDGGDKKYSIGLDIGTNSVGWAVITDEYKVPSKKFKVLGNTDRHSIKKNLIGALLFDSGETAEATRLKRTARRRYTRRKNRICYLQEIFSNEMAKVDDSFFHRLEESFLVEEDKKHERHPIFGNIVDEVAYHEKYPTIYHLRKKLVDSTDKADLRLIYLALAHMIKFRGHFLIEGDLNPDNSDVDKLFIQLVQTYNQLFEENPINASGVDAKAILSARLSKSRRLENLIAQLPGEKKNGLFGNLIALSLGLTPNFKSNFDLAEDAKLQLSKDTYDDDLDNLLAQIGDQYADLFLAAKNLSDAILLSDILRVNTEITKAPLSASMIKRYDEHHQDLTLLKALVRQQLPEKYKEIFFDQSKNGYAGYIDGGASQEEFYKFIKPILEKMDGTEELLVKLNREDLLRKQRTFDNGSIPHQIHLGELHAILRRQEDFYPFLKDNREKIEKILTFRIPYYVGPLARGNSRFAWMTRKSEETITPWNFEEVVDKGASAQSFIERMTNFDKNLPNEKVLPKHSLLYEYFTVYNELTKVKYVTEGMRKPAFLSGEQKKAIVDLLFKTNRKVTVKQLKEDYFKKIECFDSVEISGVEDRFNASLGTYHDLLKIIKDKDFLDNEENEDILEDIVLTLTLFEDREMIEERLKTYAHLFDDKVMKQLKRRRYTGWGRLSRKLINGIRDKQSGKTILDFLKSDGFANRNFMQLIHDDSLTFKEDIQKAQVSGQGDSLHEHIANLAGSPAIKKGILQTVKVVDELVKVMGRHKPENIVIEMARENQTTQKGQKNSRERMKRIEEGIKELGSQILKEHPVENTQLQNEKLYLYYLQNGRDMYVDQELDINRLSDYDVDHIVPQSFLKDDSIDNKVLTRSDKARGKSDNVPSEEVVKKMKNYWRQLLNAKLITQRKFDNLTKAERGGLSELDKAGFIKRQLVETRQITKHVAQILDSRMNTKYDENDKLIREVKVITLKSKLVSDFRKDFQFYKVREINNYHHAHDAYLNAVVGTALIKKYPKLESEFVYGDYKVYDVRKMIAKSEQEIGKATAKYFFYSNIMNFFKTEITLANGEIRKRPLIETNGETGEIVWDKGRDFATVRKVLSMPQVNIVKKTEVQTGGFSKESILPKRNSDKLIARKKDWDPKKYGGFDSPTVAYSVLVVAKVEKGKSKKLKSVKELLGITIMERSSFEKNPIDFLEAKGYKEVKKDLIIKLPKYSLFELENGRKRMLASAGELQKGNELALPSKYVNFLYLASHYEKLKGSPEDNEQKQLFVEQHKHYLDEIIEQISEFSKRVILADANLDKVLSAYNKHRDKPIREQAENIIHLFTLTNLGAPAAFKYFDTTIDRKRYTSTKEVLDATLIHQSITGLYETRIDLSQLGGDGGGGGGGTLNIEDEYRLHETSKGPDVPLGSTWLSDFPQAWAETGGMGLAVRQAPLIIPLKATSTPVSIKQYPMSQEARLGIKPHIQRLLDQGILVPCQSPWNTPLLPVKKPGTNDYRPVQDLREVNKRVEDIHPTVPNPYNLLSGLPPSHQWYTVLDLKDAFFCLRLHPTSQSLFAFEWRDPEMGISGQLTWTRLPQGFKNSPTLFNEALHRDLADFRIQHPDLILLQYVDDLLLAATSELDCQQGTRALLQTLGDLGYRASAKKAQICQKQVKYLGYLLKEGQRWLTEARKETVMGQPTPKTPRQLREFLGKAGFCRLFIPGFAEMAAPLYPLTKPGTLFEWGPDQQKAYQEIKQALLTAPALGLPDLTKPFELFVDEKQGYAKGVLTQKLGPWRRPVAYLSKKLDPVAAGWPPCLRMVAAIAVLTKDAGKLTMGQPLVILAPHAVEALVKQPPDRWLSNARMTHYQALLLDTDRVQFGPIVALNPATLLPLPEEGLQHDCLDILAEAHGTRPDLTDQPLPDADHTWYTDGSSFLQEGQRKAGAAVTTETEVVWAKALPAGTSAQRAELIALTQALKMAEGKKLNVYTDSRYAFATAHIHGEIYRRRGWLTSEGKEIKNKDEILALLKALFLPKRLSIIHCPGHQKGNRAEARGNRMADQAAREVATRETPETSTLLAGKRTADGSEFEKRTADGSEFESPKKKAKVE

SEQ ID NO: 2597 - protein, 2096 aa, synthetic construct
MPAAKRVKLDGGDKKYSIGLDIGTNSVGWAVITDEYKVPSKKFKVLGNTDRHSIKKNLIGALLFDSGETAEATRLKRTARRRYTRRKNRICYLQEIFSNEMAKVDDSFFHRLEESFLVEEDKKHERHPIFGNIVDEVAYHEKYPTIYHLRKKLVDSTDKADLRLIYLALAHMIKFRGHFLIEGDLNPDNSDVDKLFIQLVQTYNQLFEENPINASGVDAKAILSARLSKSRRLENLIAQLPGEKKNGLFGNLIALSLGLTPNFKSNFDLAEDAKLQLSKDTYDDDLDNLLAQIGDQYADLFLAAKNLSDAILLSDILRVNTEITKAPLSASMIKRYDEHHQDLTLLKALVRQQLPEKYKEIFFDQSKNGYAGYIDGGASQEEFYKFIKPILEKMDGTEELLVKLNREDLLRKQRTFDNGSIPHQIHLGELHAILRRQEDFYPFLKDNREKIEKILTFRIPYYVGPLARGNSRFAWMTRKSEETITPWNFEEVVDKGASAQSFIERMTNFDKNLPNEKVLPKHSLLYEYFTVYNELTKVKYVTEGMRKPAFLSGEQKKAIVDLLFKTNRKVTVKQLKEDYFKKIECFDSVEISGVEDRFNASLGTYHDLLKIIKDKDFLDNEENEDILEDIVLTLTLFEDREMIEERLKTYAHLFDDKVMKQLKRRRYTGWGRLSRKLINGIRDKQSGKTILDFLKSDGFANRNFMQLIHDDSLTFKEDIQKAQVSGQGDSLHEHIANLAGSPAIKKGILQTVKVVDELVKVMGRHKPENIVIEMARENQTTQKGQKNSRERMKRIEEGIKELGSQILKEHPVENTQLQNEKLYLYYLQNGRDMYVDQELDINRLSDYDVDHIVPQSFLKDDSIDNKVLTRSDKARGKSDNVPSEEVVKKMKNYWRQLLNAKLITQRKFDNLTKAERGGLSELDKAGFIKRQLVETRQITKHVAQILDSRMNTKYDENDKLIREVKVITLKSKLVSDFRKDFQFYKVREINNYHHAHDAYLNAVVGTALIKKYPKLESEFVYGDYKVYDVRKMIAKSEQEIGKATAKYFFYSNIMNFFKTEITLANGEIRKRPLIETNGETGEIVWDKGRDFATVRKVLSMPQVNIVKKTEVQTGGFSKESILPKRNSDKLIARKKDWDPKKYGGFDSPTVAYSVLVVAKVEKGKSKKLKSVKELLGITIMERSSFEKNPIDFLEAKGYKEVKKDLIIKLPKYSLFELENGRKRMLASAGELQKGNELALPSKYVNFLYLASHYEKLKGSPEDNEQKQLFVEQHKHYLDEIIEQISEFSKRVILADANLDKVLSAYNKHRDKPIREQAENIIHLFTLTNLGAPAAFKYFDTTIDRKRYTSTKEVLDATLIHQSITGLYETRIDLSQLGGDGGGGGGGSEAAAKGGTLNIEDEYRLHETSKGPDVPLGSTWLSDFPQAWAETGGMGLAVRQAPLIIPLKATSTPVSIKQYPMSQEARLGIKPHIQRLLDQGILVPCQSPWNTPLLPVKKPGTNDYRPVQDLREVNKRVEDIHPTVPNPYNLLSGLPPSHQWYTVLDLKDAFFCLRLHPTSQSLFAFEWRDPEMGISGQLTWTRLPQGFKNSPTLFNEALHRDLADFRIQHPDLILLQYVDDLLLAATSELDCQQGTRALLQTLGDLGYRASAKKAQICQKQVKYLGYLLKEGQRWLTEARKETVMGQPTPKTPRQLREFLGKAGFCRLFIPGFAEMAAPLYPLTKPGTLFEWGPDQQKAYQEIKQALLTAPALGLPDLTKPFELFVDEKQGYAKGVLTQKLGPWRRPVAYLSKKLDPVAAGWPPCLRMVAAIAVLTKDAGKLTMGQPLVILAPHAVEALVKQPPDRWLSNARMTHYQALLLDTDRVQFGPIVALNPATLLPLPEEGLQHDCLDILAEAHGTRPDLTDQPLPDADHTWYTDGSSFLQEGQRKAGAAVTTETEVVWAKALPAGTSAQRAELIALTQALKMAEGKKLNVYTDSRYAFATAHIHGEIYRRRGWLTSEGKEIKNKDEILALLKALFLPKRLSIIHCPGHQKGNRAEARGNRMADQAAREVATRETPETSTLLAGKRTADGSEFEKRTADGSEFESPKKKAKVE

SEQ ID NO: 2598 - protein, 2110 aa, synthetic construct
MPAAKRVKLDGGDKKYSIGLDIGTNSVGWAVITDEYKVPSKKFKVLGNTDRHSIKKNLIGALLFDSGETAEATRLKRTARRRYTRRKNRICYLQEIFSNEMAKVDDSFFHRLEESFLVEEDKKHERHPIFGNIVDEVAYHEKYPTIYHLRKKLVDSTDKADLRLIYLALAHMIKFRGHFLIEGDLNPDNSDVDKLFIQLVQTYNQLFEENPINASGVDAKAILSARLSKSRRLENLIAQLPGEKKNGLFGNLIALSLGLTPNFKSNFDLAEDAKLQLSKDTYDDDLDNLLAQIGDQYADLFLAAKNLSDAILLSDILRVNTEITKAPLSASMIKRYDEHHQDLTLLKALVRQQLPEKYKEIFFDQSKNGYAGYIDGGASQEEFYKFIKPILEKMDGTEELLVKLNREDLLRKQRTFDNGSIPHQIHLGELHAILRRQEDFYPFLKDNREKIEKILTFRIPYYVGPLARGNSRFAWMTRKSEETITPWNFEEVVDKGASAQSFIERMTNFDKNLPNEKVLPKHSLLYEYFTVYNELTKVKYVTEGMRKPAFLSGEQKKAIVDLLFKTNRKVTVKQLKEDYFKKIECFDSVEISGVEDRFNASLGTYHDLLKIIKDKDFLDNEENEDILEDIVLTLTLFEDREMIEERLKTYAHLFDDKVMKQLKRRRYTGWGRLSRKLINGIRDKQSGKTILDFLKSDGFANRNFMQLIHDDSLTFKEDIQKAQVSGQGDSLHEHIANLAGSPAIKKGILQTVKVVDELVKVMGRHKPENIVIEMARENQTTQKGQKNSRERMKRIEEGIKELGSQILKEHPVENTQLQNEKLYLYYLQNGRDMYVDQELDINRLSDYDVDHIVPQSFLKDDSIDNKVLTRSDKARGKSDNVPSEEVVKKMKNYWRQLLNAKLITQRKFDNLTKAERGGLSELDKAGFIKRQLVETRQITKHVAQILDSRMNTKYDENDKLIREVKVITLKSKLVSDFRKDFQFYKVREINNYHHAHDAYLNAVVGTALIKKYPKLESEFVYGDYKVYDVRKMIAKSEQEIGKATAKYFFYSNIMNFFKTEITLANGEIRKRPLIETNGETGEIVWDKGRDFATVRKVLSMPQVNIVKKTEVQTGGFSKESILPKRNSDKLIARKKDWDPKKYGGFDSPTVAYSVLVVAKVEKGKSKKLKSVKELLGITIMERSSFEKNPIDFLEAKGYKEVKKDLIIKLPKYSLFELENGRKRMLASAGELQKGNELALPSKYVNFLYLASHYEKLKGSPEDNEQKQLFVEQHKHYLDEIIEQISEFSKRVILADANLDKVLSAYNKHRDKPIREQAENIIHLFTLTNLGAPAAFKYFDTTIDRKRYTSTKEVLDATLIHQSITGLYETRIDLSQLGGDGGGGGGSGGGGSGGGGSGGGGSGGGGSGGTLNIEDEYRLHETSKGPDVPLGSTWLSDFPQAWAETGGMGLAVRQAPLIIPLKATSTPVSIKQYPMSQEARLGIKPHIQRLLDQGILVPCQSPWNTPLLPVKKPGTNDYRPVQDLREVNKRVEDIHPTVPNPYNLLSGLPPSHQWYTVLDLKDAFFCLRLHPTSQSLFAFEWRDPEMGISGQLTWTRLPQGFKNSPTLFNEALHRDLADFRIQHPDLILLQYVDDLLLAATSELDCQQGTRALLQTLGDLGYRASAKKAQICQKQVKYLGYLLKEGQRWLTEARKETVMGQPTPKTPRQLREFLGKAGFCRLFIPGFAEMAAPLYPLTKPGTLFEWGPDQQKAYQEIKQALLTAPALGLPDLTKPFELFVDEKQGYAKGVLTQKLGPWRRPVAYLSKKLDPVAAGWPPCLRMVAAIAVLTKDAGKLTMGQPLVILAPHAVEALVKQPPDRWLSNARMTHYQALLLDTDRVQFGPIVALNPATLLPLPEEGLQHDCLDILAEAHGTRPDLTDQPLPDADHTWYTDGSSFLQEGQRKAGAAVTTETEVVWAKALPAGTSAQRAELIALTQALKMAEGKKLNVYTDSRYAFATAHIHGEIYRRRGWLTSEGKEIKNKDEILALLKALFLPKRLSIIHCPGHQKGNRAEARGNRMADQAAREVATRETPETSTLLAGKRTADGSEFEKRTADGSEFESPKKKAKVE

SEQ ID NO: 2599 - protein, 2096 aa, synthetic construct
MPAAKRVKLDGGDKKYSIGLDIGTNSVGWAVITDEYKVPSKKFKVLGNTDRHSIKKNLIGALLFDSGETAEATRLKRTARRRYTRRKNRICYLQEIFSNEMAKVDDSFFHRLEESFLVEEDKKHERHPIFGNIVDEVAYHEKYPTIYHLRKKLVDSTDKADLRLIYLALAHMIKFRGHFLIEGDLNPDNSDVDKLFIQLVQTYNQLFEENPINASGVDAKAILSARLSKSRRLENLIAQLPGEKKNGLFGNLIALSLGLTPNFKSNFDLAEDAKLQLSKDTYDDDLDNLLAQIGDQYADLFLAAKNLSDAILLSDILRVNTEITKAPLSASMIKRYDEHHQDLTLLKALVRQQLPEKYKEIFFDQSKNGYAGYIDGGASQEEFYKFIKPILEKMDGTEELLVKLNREDLLRKQRTFDNGSIPHQIHLGELHAILRRQEDFYPFLKDNREKIEKILTFRIPYYVGPLARGNSRFAWMTRKSEETITPWNFEEVVDKGASAQSFIERMTNFDKNLPNEKVLPKHSLLYEYFTVYNELTKVKYVTEGMRKPAFLSGEQKKAIVDLLFKTNRKVTVKQLKEDYFKKIECFDSVEISGVEDRFNASLGTYHDLLKIIKDKDFLDNEENEDILEDIVLTLTLFEDREMIEERLKTYAHLFDDKVMKQLKRRRYTGWGRLSRKLINGIRDKQSGKTILDFLKSDGFANRNFMQLIHDDSLTFKEDIQKAQVSGQGDSLHEHIANLAGSPAIKKGILQTVKVVDELVKVMGRHKPENIVIEMARENQTTQKGQKNSRERMKRIEEGIKELGSQILKEHPVENTQLQNEKLYLYYLQNGRDMYVDQELDINRLSDYDVDHIVPQSFLKDDSIDNKVLTRSDKARGKSDNVPSEEVVKKMKNYWRQLLNAKLITQRKFDNLTKAERGGLSELDKAGFIKRQLVETRQITKHVAQILDSRMNTKYDENDKLIREVKVITLKSKLVSDFRKDFQFYKVREINNYHHAHDAYLNAVVGTALIKKYPKLESEFVYGDYKVYDVRKMIAKSEQEIGKATAKYFFYSNIMNFFKTEITLANGEIRKRPLIETNGETGEIVWDKGRDFATVRKVLSMPQVNIVKKTEVQTGGFSKESILPKRNSDKLIARKKDWDPKKYGGFDSPTVAYSVLVVAKVEKGKSKKLKSVKELLGITIMERSSFEKNPIDFLEAKGYKEVKKDLIIKLPKYSLFELENGRKRMLASAGELQKGNELALPSKYVNFLYLASHYEKLKGSPEDNEQKQLFVEQHKHYLDEIIEQISEFSKRVILADANLDKVLSAYNKHRDKPIREQAENIIHLFTLTNLGAPAAFKYFDTTIDRKRYTSTKEVLDATLIHQSITGLYETRIDLSQLGGDGGGSSPAPEAAAKGGTLNIEDEYRLHETSKGPDVPLGSTWLSDFPQAWAETGGMGLAVRQAPLIIPLKATSTPVSIKQYPMSQEARLGIKPHIQRLLDQGILVPCQSPWNTPLLPVKKPGTNDYRPVQDLREVNKRVEDIHPTVPNPYNLLSGLPPSHQWYTVLDLKDAFFCLRLHPTSQSLFAFEWRDPEMGISGQLTWTRLPQGFKNSPTLFNEALHRDLADFRIQHPDLILLQYVDDLLLAATSELDCQQGTRALLQTLGDLGYRASAKKAQICQKQVKYLGYLLKEGQRWLTEARKETVMGQPTPKTPRQLREFLGKAGFCRLFIPGFAEMAAPLYPLTKPGTLFEWGPDQQKAYQEIKQALLTAPALGLPDLTKPFELFVDEKQGYAKGVLTQKLGPWRRPVAYLSKKLDPVAAGWPPCLRMVAAIAVLTKDAGKLTMGQPLVILAPHAVEALVKQPPDRWLSNARMTHYQALLLDTDRVQFGPIVALNPATLLPLPEEGLQHDCLDILAEAHGTRPDLTDQPLPDADHTWYTDGSSFLQEGQRKAGAAVTTETEVVWAKALPAGTSAQRAELIALTQALKMAEGKKLNVYTDSRYAFATAHIHGEIYRRRGWLTSEGKEIKNKDEILALLKALFLPKRLSIIHCPGHQKGNRAEARGNRMADQAAREVATRETPETSTLLAGKRTADGSEFEKRTADGSEFESPKKKAKVE

SEQ ID NO: 2600 - protein, 2093 aa, synthetic construct
MPAAKRVKLDGGDKKYSIGLDIGTNSVGWAVITDEYKVPSKKFKVLGNTDRHSIKKNLIGALLFDSGETAEATRLKRTARRRYTRRKNRICYLQEIFSNEMAKVDDSFFHRLEESFLVEEDKKHERHPIFGNIVDEVAYHEKYPTIYHLRKKLVDSTDKADLRLIYLALAHMIKFRGHFLIEGDLNPDNSDVDKLFIQLVQTYNQLFEENPINASGVDAKAILSARLSKSRRLENLIAQLPGEKKNGLFGNLIALSLGLTPNFKSNFDLAEDAKLQLSKDTYDDDLDNLLAQIGDQYADLFLAAKNLSDAILLSDILRVNTEITKAPLSASMIKRYDEHHQDLTLLKALVRQQLPEKYKEIFFDQSKNGYAGYIDGGASQEEFYKFIKPILEKMDGTEELLVKLNREDLLRKQRTFDNGSIPHQIHLGELHAILRRQEDFYPFLKDNREKIEKILTFRIPYYVGPLARGNSRFAWMTRKSEETITPWNFEEVVDKGASAQSFIERMTNFDKNLPNEKVLPKHSLLYEYFTVYNELTKVKYVTEGMRKPAFLSGEQKKAIVDLLFKTNRKVTVKQLKEDYFKKIECFDSVEISGVEDRFNASLGTYHDLLKIIKDKDFLDNEENEDILEDIVLTLTLFEDREMIEERLKTYAHLFDDKVMKQLKRRRYTGWGRLSRKLINGIRDKQSGKTILDFLKSDGFANRNFMQLIHDDSLTFKEDIQKAQVSGQGDSLHEHIANLAGSPAIKKGILQTVKVVDELVKVMGRHKPENIVIEMARENQTTQKGQKNSRERMKRIEEGIKELGSQILKEHPVENTQLQNEKLYLYYLQNGRDMYVDQELDINRLSDYDVDHIVPQSFLKDDSIDNKVLTRSDKARGKSDNVPSEEVVKKMKNYWRQLLNAKLITQRKFDNLTKAERGGLSELDKAGFIKRQLVETRQITKHVAQILDSRMNTKYDENDKLIREVKVITLKSKLVSDFRKDFQFYKVREINNYHHAHDAYLNAVVGTALIKKYPKLESEFVYGDYKVYDVRKMIAKSEQEIGKATAKYFFYSNIMNFFKTEITLANGEIRKRPLIETNGETGEIVWDKGRDFATVRKVLSMPQVNIVKKTEVQTGGFSKESILPKRNSDKLIARKKDWDPKKYGGFDSPTVAYSVLVVAKVEKGKSKKLKSVKELLGITIMERSSFEKNPIDFLEAKGYKEVKKDLIIKLPKYSLFELENGRKRMLASAGELQKGNELALPSKYVNFLYLASHYEKLKGSPEDNEQKQLFVEQHKHYLDEIIEQISEFSKRVILADANLDKVLSAYNKHRDKPIREQAENIIHLFTLTNLGAPAAFKYFDTTIDRKRYTSTKEVLDATLIHQSITGLYETRIDLSQLGGDGGGGSEAAAKGGTLNIEDEYRLHETSKGPDVPLGSTWLSDFPQAWAETGGMGLAVRQAPLIIPLKATSTPVSIKQYPMSQEARLGIKPHIQRLLDQGILVPCQSPWNTPLLPVKKPGTNDYRPVQDLREVNKRVEDIHPTVPNPYNLLSGLPPSHQWYTVLDLKDAFFCLRLHPTSQSLFAFEWRDPEMGISGQLTWTRLPQGFKNSPTLFNEALHRDLADFRIQHPDLILLQYVDDLLLAATSELDCQQGTRALLQTLGDLGYRASAKKAQICQKQVKYLGYLLKEGQRWLTEARKETVMGQPTPKTPRQLREFLGKAGFCRLFIPGFAEMAAPLYPLTKPGTLFEWGPDQQKAYQEIKQALLTAPALGLPDLTKPFELFVDEKQGYAKGVLTQKLGPWRRPVAYLSKKLDPVAAGWPPCLRMVAAIAVLTKDAGKLTMGQPLVILAPHAVEALVKQPPDRWLSNARMTHYQALLLDTDRVQFGPIVALNPATLLPLPEEGLQHDCLDILAEAHGTRPDLTDQPLPDADHTWYTDGSSFLQEGQRKAGAAVTTETEVVWAKALPAGTSAQRAELIALTQALKMAEGKKLNVYTDSRYAFATAHIHGEIYRRRGWLTSEGKEIKNKDEILALLKALFLPKRLSIIHCPGHQKGNRAEARGNRMADQAAREVATRETPETSTLLAGKRTADGSEFEKRTADGSEFESPKKKAKVE

SEQ ID NO: 2601 - protein, 2094 aa, synthetic construct
MPAAKRVKLDGGDKKYSIGLDIGTNSVGWAVITDEYKVPSKKFKVLGNTDRHSIKKNLIGALLFDSGETAEATRLKRTARRRYTRRKNRICYLQEIFSNEMAKVDDSFFHRLEESFLVEEDKKHERHPIFGNIVDEVAYHEKYPTIYHLRKKLVDSTDKADLRLIYLALAHMIKFRGHFLIEGDLNPDNSDVDKLFIQLVQTYNQLFEENPINASGVDAKAILSARLSKSRRLENLIAQLPGEKKNGLFGNLIALSLGLTPNFKSNFDLAEDAKLQLSKDTYDDDLDNLLAQIGDQYADLFLAAKNLSDAILLSDILRVNTEITKAPLSASMIKRYDEHHQDLTLLKALVRQQLPEKYKEIFFDQSKNGYAGYIDGGASQEEFYKFIKPILEKMDGTEELLVKLNREDLLRKQRTFDNGSIPHQIHLGELHAILRRQEDFYPFLKDNREKIEKILTFRIPYYVGPLARGNSRFAWMTRKSEETITPWNFEEVVDKGASAQSFIERMTNFDKNLPNEKVLPKHSLLYEYFTVYNELTKVKYVTEGMRKPAFLSGEQKKAIVDLLFKTNRKVTVKQLKEDYFKKIECFDSVEISGVEDRFNASLGTYHDLLKIIKDKDFLDNEENEDILEDIVLTLTLFEDREMIEERLKTYAHLFDDKVMKQLKRRRYTGWGRLSRKLINGIRDKQSGKTILDFLKSDGFANRNFMQLIHDDSLTFKEDIQKAQVSGQGDSLHEHIANLAGSPAIKKGILQTVKVVDELVKVMGRHKPENIVIEMARENQTTQKGQKNSRERMKRIEEGIKELGSQILKEHPVENTQLQNEKLYLYYLQNGRDMYVDQELDINRLSDYDVDHIVPQSFLKDDSIDNKVLTRSDKARGKSDNVPSEEVVKKMKNYWRQLLNAKLITQRKFDNLTKAERGGLSELDKAGFIKRQLVETRQITKHVAQILDSRMNTKYDENDKLIREVKVITLKSKLVSDFRKDFQFYKVREINNYHHAHDAYLNAVVGTALIKKYPKLESEFVYGDYKVYDVRKMIAKSEQEIGKATAKYFFYSNIMNFFKTEITLANGEIRKRPLIETNGETGEIVWDKGRDFATVRKVLSMPQVNIVKKTEVQTGGFSKESILPKRNSDKLIARKKDWDPKKYGGFDSPTVAYSVLVVAKVEKGKSKKLKSVKELLGITIMERSSFEKNPIDFLEAKGYKEVKKDLIIKLPKYSLFELENGRKRMLASAGELQKGNELALPSKYVNFLYLASHYEKLKGSPEDNEQKQLFVEQHKHYLDEIIEQISEFSKRVILADANLDKVLSAYNKHRDKPIREQAENIIHLFTLTNLGAPAAFKYFDTTIDRKRYTSTKEVLDATLIHQSITGLYETRIDLSQLGGDGGGGSGGGGSSGGTLNIEDEYRLHETSKGPDVPLGSTWLSDFPQAWAETGGMGLAVRQAPLIIPLKATSTPVSIKQYPMSQEARLGIKPHIQRLLDQGILVPCQSPWNTPLLPVKKPGTNDYRPVQDLREVNKRVEDIHPTVPNPYNLLSGLPPSHQWYTVLDLKDAFFCLRLHPTSQSLFAFEWRDPEMGISGQLTWTRLPQGFKNSPTLFNEALHRDLADFRIQHPDLILLQYVDDLLLAATSELDCQQGTRALLQTLGDLGYRASAKKAQICQKQVKYLGYLLKEGQRWLTEARKETVMGQPTPKTPRQLREFLGKAGFCRLFIPGFAEMAAPLYPLTKPGTLFEWGPDQQKAYQEIKQALLTAPALGLPDLTKPFELFVDEKQGYAKGVLTQKLGPWRRPVAYLSKKLDPVAAGWPPCLRMVAAIAVLTKDAGKLTMGQPLVILAPHAVEALVKQPPDRWLSNARMTHYQALLLDTDRVQFGPIVALNPATLLPLPEEGLQHDCLDILAEAHGTRPDLTDQPLPDADHTWYTDGSSFLQEGQRKAGAAVTTETEVVWAKALPAGTSAQRAELIALTQALKMAEGKKLNVYTDSRYAFATAHIHGEIYRRRGWLTSEGKEIKNKDEILALLKALFLPKRLSIIHCPGHQKGNRAEARGNRMADQAAREVATRETPETSTLLAGKRTADGSEFEKRTADGSEFESPKKKAKVE

SEQ ID NO: 2602 - protein, 2089 aa, synthetic construct
MPAAKRVKLDGGDKKYSIGLDIGTNSVGWAVITDEYKVPSKKFKVLGNTDRHSIKKNLIGALLFDSGETAEATRLKRTARRRYTRRKNRICYLQEIFSNEMAKVDDSFFHRLEESFLVEEDKKHERHPIFGNIVDEVAYHEKYPTIYHLRKKLVDSTDKADLRLIYLALAHMIKFRGHFLIEGDLNPDNSDVDKLFIQLVQTYNQLFEENPINASGVDAKAILSARLSKSRRLENLIAQLPGEKKNGLFGNLIALSLGLTPNFKSNFDLAEDAKLQLSKDTYDDDLDNLLAQIGDQYADLFLAAKNLSDAILLSDILRVNTEITKAPLSASMIKRYDEHHQDLTLLKALVRQQLPEKYKEIFFDQSKNGYAGYIDGGASQEEFYKFIKPILEKMDGTEELLVKLNREDLLRKQRTFDNGSIPHQIHLGELHAILRRQEDFYPFLKDNREKIEKILTFRIPYYVGPLARGNSRFAWMTRKSEETITPWNFEEVVDKGASAQSFIERMTNFDKNLPNEKVLPKHSLLYEYFTVYNELTKVKYVTEGMRKPAFLSGEQKKAIVDLLFKTNRKVTVKQLKEDYFKKIECFDSVEISGVEDRFNASLGTYHDLLKIIKDKDFLDNEENEDILEDIVLTLTLFEDREMIEERLKTYAHLFDDKVMKQLKRRRYTGWGRLSRKLINGIRDKQSGKTILDFLKSDGFANRNFMQLIHDDSLTFKEDIQKAQVSGQGDSLHEHIANLAGSPAIKKGILQTVKVVDELVKVMGRHKPENIVIEMARENQTTQKGQKNSRERMKRIEEGIKELGSQILKEHPVENTQLQNEKLYLYYLQNGRDMYVDQELDINRLSDYDVDHIVPQSFLKDDSIDNKVLTRSDKARGKSDNVPSEEVVKKMKNYWRQLLNAKLITQRKFDNLTKAERGGLSELDKAGFIKRQLVETRQITKHVAQILDSRMNTKYDENDKLIREVKVITLKSKLVSDFRKDFQFYKVREINNYHHAHDAYLNAVVGTALIKKYPKLESEFVYGDYKVYDVRKMIAKSEQEIGKATAKYFFYSNIMNFFKTEITLANGEIRKRPLIETNGETGEIVWDKGRDFATVRKVLSMPQVNIVKKTEVQTGGFSKESILPKRNSDKLIARKKDWDPKKYGGFDSPTVAYSVLVVAKVEKGKSKKLKSVKELLGITIMERSSFEKNPIDFLEAKGYKEVKKDLIIKLPKYSLFELENGRKRMLASAGELQKGNELALPSKYVNFLYLASHYEKLKGSPEDNEQKQLFVEQHKHYLDEIIEQISEFSKRVILADANLDKVLSAYNKHRDKPIREQAENIIHLFTLTNLGAPAAFKYFDTTIDRKRYTSTKEVLDATLIHQSITGLYETRIDLSQLGGDGGGGGGGGTLNIEDEYRLHETSKGPDVPLGSTWLSDFPQAWAETGGMGLAVRQAPLIIPLKATSTPVSIKQYPMSQEARLGIKPHIQRLLDQGILVPCQSPWNTPLLPVKKPGTNDYRPVQDLREVNKRVEDIHPTVPNPYNLLSGLPPSHQWYTVLDLKDAFFCLRLHPTSQSLFAFEWRDPEMGISGQLTWTRLPQGFKNSPTLFNEALHRDLADFRIQHPDLILLQYVDDLLLAATSELDCQQGTRALLQTLGDLGYRASAKKAQICQKQVKYLGYLLKEGQRWLTEARKETVMGQPTPKTPRQLREFLGKAGFCRLFIPGFAEMAAPLYPLTKPGTLFEWGPDQQKAYQEIKQALLTAPALGLPDLTKPFELFVDEKQGYAKGVLTQKLGPWRRPVAYLSKKLDPVAAGWPPCLRMVAAIAVLTKDAGKLTMGQPLVILAPHAVEALVKQPPDRWLSNARMTHYQALLLDTDRVQFGPIVALNPATLLPLPEEGLQHDCLDILAEAHGTRPDLTDQPLPDADHTWYTDGSSFLQEGQRKAGAAVTTETEVVWAKALPAGTSAQRAELIALTQALKMAEGKKLNVYTDSRYAFATAHIHGEIYRRRGWLTSEGKEIKNKDEILALLKALFLPKRLSIIHCPGHQKGNRAEARGNRMADQAAREVATRETPETSTLLAGKRTADGSEFEKRTADGSEFESPKKKAKVE

SEQ ID NO: 2603 - protein, 2096 aa, synthetic construct
MPAAKRVKLDGGDKKYSIGLDIGTNSVGWAVITDEYKVPSKKFKVLGNTDRHSIKKNLIGALLFDSGETAEATRLKRTARRRYTRRKNRICYLQEIFSNEMAKVDDSFFHRLEESFLVEEDKKHERHPIFGNIVDEVAYHEKYPTIYHLRKKLVDSTDKADLRLIYLALAHMIKFRGHFLIEGDLNPDNSDVDKLFIQLVQTYNQLFEENPINASGVDAKAILSARLSKSRRLENLIAQLPGEKKNGLFGNLIALSLGLTPNFKSNFDLAEDAKLQLSKDTYDDDLDNLLAQIGDQYADLFLAAKNLSDAILLSDILRVNTEITKAPLSASMIKRYDEHHQDLTLLKALVRQQLPEKYKEIFFDQSKNGYAGYIDGGASQEEFYKFIKPILEKMDGTEELLVKLNREDLLRKQRTFDNGSIPHQIHLGELHAILRRQEDFYPFLKDNREKIEKILTFRIPYYVGPLARGNSRFAWMTRKSEETITPWNFEEVVDKGASAQSFIERMTNFDKNLPNEKVLPKHSLLYEYFTVYNELTKVKYVTEGMRKPAFLSGEQKKAIVDLLFKTNRKVTVKQLKEDYFKKIECFDSVEISGVEDRFNASLGTYHDLLKIIKDKDFLDNEENEDILEDIVLTLTLFEDREMIEERLKTYAHLFDDKVMKQLKRRRYTGWGRLSRKLINGIRDKQSGKTILDFLKSDGFANRNFMQLIHDDSLTFKEDIQKAQVSGQGDSLHEHIANLAGSPAIKKGILQTVKVVDELVKVMGRHKPENIVIEMARENQTTQKGQKNSRERMKRIEEGIKELGSQILKEHPVENTQLQNEKLYLYYLQNGRDMYVDQELDINRLSDYDVDHIVPQSFLKDDSIDNKVLTRSDKARGKSDNVPSEEVVKKMKNYWRQLLNAKLITQRKFDNLTKAERGGLSELDKAGFIKRQLVETRQITKHVAQILDSRMNTKYDENDKLIREVKVITLKSKLVSDFRKDFQFYKVREINNYHHAHDAYLNAVVGTALIKKYPKLESEFVYGDYKVYDVRKMIAKSEQEIGKATAKYFFYSNIMNFFKTEITLANGEIRKRPLIETNGETGEIVWDKGRDFATVRKVLSMPQVNIVKKTEVQTGGFSKESILPKRNSDKLIARKKDWDPKKYGGFDSPTVAYSVLVVAKVEKGKSKKLKSVKELLGITIMERSSFEKNPIDFLEAKGYKEVKKDLIIKLPKYSLFELENGRKRMLASAGELQKGNELALPSKYVNFLYLASHYEKLKGSPEDNEQKQLFVEQHKHYLDEIIEQISEFSKRVILADANLDKVLSAYNKHRDKPIREQAENIIHLFTLTNLGAPAAFKYFDTTIDRKRYTSTKEVLDATLIHQSITGLYETRIDLSQLGGDGGGGSGGGEAAAKGGTLNIEDEYRLHETSKGPDVPLGSTWLSDFPQAWAETGGMGLAVRQAPLIIPLKATSTPVSIKQYPMSQEARLGIKPHIQRLLDQGILVPCQSPWNTPLLPVKKPGTNDYRPVQDLREVNKRVEDIHPTVPNPYNLLSGLPPSHQWYTVLDLKDAFFCLRLHPTSQSLFAFEWRDPEMGISGQLTWTRLPQGFKNSPTLFNEALHRDLADFRIQHPDLILLQYVDDLLLAATSELDCQQGTRALLQTLGDLGYRASAKKAQICQKQVKYLGYLLKEGQRWLTEARKETVMGQPTPKTPRQLREFLGKAGFCRLFIPGFAEMAAPLYPLTKPGTLFEWGPDQQKAYQEIKQALLTAPALGLPDLTKPFELFVDEKQGYAKGVLTQKLGPWRRPVAYLSKKLDPVAAGWPPCLRMVAAIAVLTKDAGKLTMGQPLVILAPHAVEALVKQPPDRWLSNARMTHYQALLLDTDRVQFGPIVALNPATLLPLPEEGLQHDCLDILAEAHGTRPDLTDQPLPDADHTWYTDGSSFLQEGQRKAGAAVTTETEVVWAKALPAGTSAQRAELIALTQALKMAEGKKLNVYTDSRYAFATAHIHGEIYRRRGWLTSEGKEIKNKDEILALLKALFLPKRLSIIHCPGHQKGNRAEARGNRMADQAAREVATRETPETSTLLAGKRTADGSEFEKRTADGSEFESPKKKAKVE

SEQ ID NO: 2604 - protein, 2091 aa, synthetic construct
MPAAKRVKLDGGDKKYSIGLDIGTNSVGWAVITDEYKVPSKKFKVLGNTDRHSIKKNLIGALLFDSGETAEATRLKRTARRRYTRRKNRICYLQEIFSNEMAKVDDSFFHRLEESFLVEEDKKHERHPIFGNIVDEVAYHEKYPTIYHLRKKLVDSTDKADLRLIYLALAHMIKFRGHFLIEGDLNPDNSDVDKLFIQLVQTYNQLFEENPINASGVDAKAILSARLSKSRRLENLIAQLPGEKKNGLFGNLIALSLGLTPNFKSNFDLAEDAKLQLSKDTYDDDLDNLLAQIGDQYADLFLAAKNLSDAILLSDILRVNTEITKAPLSASMIKRYDEHHQDLTLLKALVRQQLPEKYKEIFFDQSKNGYAGYIDGGASQEEFYKFIKPILEKMDGTEELLVKLNREDLLRKQRTFDNGSIPHQIHLGELHAILRRQEDFYPFLKDNREKIEKILTFRIPYYVGPLARGNSRFAWMTRKSEETITPWNFEEVVDKGASAQSFIERMTNFDKNLPNEKVLPKHSLLYEYFTVYNELTKVKYVTEGMRKPAFLSGEQKKAIVDLLFKTNRKVTVKQLKEDYFKKIECFDSVEISGVEDRFNASLGTYHDLLKIIKDKDFLDNEENEDILEDIVLTLTLFEDREMIEERLKTYAHLFDDKVMKQLKRRRYTGWGRLSRKLINGIRDKQSGKTILDFLKSDGFANRNFMQLIHDDSLTFKEDIQKAQVSGQGDSLHEHIANLAGSPAIKKGILQTVKVVDELVKVMGRHKPENIVIEMARENQTTQKGQKNSRERMKRIEEGIKELGSQILKEHPVENTQLQNEKLYLYYLQNGRDMYVDQELDINRLSDYDVDHIVPQSFLKDDSIDNKVLTRSDKARGKSDNVPSEEVVKKMKNYWRQLLNAKLITQRKFDNLTKAERGGLSELDKAGFIKRQLVETRQITKHVAQILDSRMNTKYDENDKLIREVKVITLKSKLVSDFRKDFQFYKVREINNYHHAHDAYLNAVVGTALIKKYPKLESEFVYGDYKVYDVRKMIAKSEQEIGKATAKYFFYSNIMNFFKTEITLANGEIRKRPLIETNGETGEIVWDKGRDFATVRKVLSMPQVNIVKKTEVQTGGFSKESILPKRNSDKLIARKKDWDPKKYGGFDSPTVAYSVLVVAKVEKGKSKKLKSVKELLGITIMERSSFEKNPIDFLEAKGYKEVKKDLIIKLPKYSLFELENGRKRMLASAGELQKGNELALPSKYVNFLYLASHYEKLKGSPEDNEQKQLFVEQHKHYLDEIIEQISEFSKRVILADANLDKVLSAYNKHRDKPIREQAENIIHLFTLTNLGAPAAFKYFDTTIDRKRYTSTKEVLDATLIHQSITGLYETRIDLSQLGGDGGGGSGGSGGTLNIEDEYRLHETSKGPDVPLGSTWLSDFPQAWAETGGMGLAVRQAPLIIPLKATSTPVSIKQYPMSQEARLGIKPHIQRLLDQGILVPCQSPWNTPLLPVKKPGTNDYRPVQDLREVNKRVEDIHPTVPNPYNLLSGLPPSHQWYTVLDLKDAFFCLRLHPTSQSLFAFEWRDPEMGISGQLTWTRLPQGFKNSPTLFNEALHRDLADFRIQHPDLILLQYVDDLLLAATSELDCQQGTRALLQTLGDLGYRASAKKAQICQKQVKYLGYLLKEGQRWLTEARKETVMGQPTPKTPRQLREFLGKAGFCRLFIPGFAEMAAPLYPLTKPGTLFEWGPDQQKAYQEIKQALLTAPALGLPDLTKPFELFVDEKQGYAKGVLTQKLGPWRRPVAYLSKKLDPVAAGWPPCLRMVAAIAVLTKDAGKLTMGQPLVILAPHAVEALVKQPPDRWLSNARMTHYQALLLDTDRVQFGPIVALNPATLLPLPEEGLQHDCLDILAEAHGTRPDLTDQPLPDADHTWYTDGSSFLQEGQRKAGAAVTTETEVVWAKALPAGTSAQRAELIALTQALKMAEGKKLNVYTDSRYAFATAHIHGEIYRRRGWLTSEGKEIKNKDEILALLKALFLPKRLSIIHCPGHQKGNRAEARGNRMADQAAREVATRETPETSTLLAGKRTADGSEFEKRTADGSEFESPKKKAKVE

SEQ ID NO: 2605 - protein, 2094 aa, synthetic construct
MPAAKRVKLDGGDKKYSIGLDIGTNSVGWAVITDEYKVPSKKFKVLGNTDRHSIKKNLIGALLFDSGETAEATRLKRTARRRYTRRKNRICYLQEIFSNEMAKVDDSFFHRLEESFLVEEDKKHERHPIFGNIVDEVAYHEKYPTIYHLRKKLVDSTDKADLRLIYLALAHMIKFRGHFLIEGDLNPDNSDVDKLFIQLVQTYNQLFEENPINASGVDAKAILSARLSKSRRLENLIAQLPGEKKNGLFGNLIALSLGLTPNFKSNFDLAEDAKLQLSKDTYDDDLDNLLAQIGDQYADLFLAAKNLSDAILLSDILRVNTEITKAPLSASMIKRYDEHHQDLTLLKALVRQQLPEKYKEIFFDQSKNGYAGYIDGGASQEEFYKFIKPILEKMDGTEELLVKLNREDLLRKQRTFDNGSIPHQIHLGELHAILRRQEDFYPFLKDNREKIEKILTFRIPYYVGPLARGNSRFAWMTRKSEETITPWNFEEVVDKGASAQSFIERMTNFDKNLPNEKVLPKHSLLYEYFTVYNELTKVKYVTEGMRKPAFLSGEQKKAIVDLLFKTNRKVTVKQLKEDYFKKIECFDSVEISGVEDRFNASLGTYHDLLKIIKDKDFLDNEENEDILEDIVLTLTLFEDREMIEERLKTYAHLFDDKVMKQLKRRRYTGWGRLSRKLINGIRDKQSGKTILDFLKSDGFANRNFMQLIHDDSLTFKEDIQKAQVSGQGDSLHEHIANLAGSPAIKKGILQTVKVVDELVKVMGRHKPENIVIEMARENQTTQKGQKNSRERMKRIEEGIKELGSQILKEHPVENTQLQNEKLYLYYLQNGRDMYVDQELDINRLSDYDVDHIVPQSFLKDDSIDNKVLTRSDKARGKSDNVPSEEVVKKMKNYWRQLLNAKLITQRKFDNLTKAERGGLSELDKAGFIKRQLVETRQITKHVAQILDSRMNTKYDENDKLIREVKVITLKSKLVSDFRKDFQFYKVREINNYHHAHDAYLNAVVGTALIKKYPKLESEFVYGDYKVYDVRKMIAKSEQEIGKATAKYFFYSNIMNFFKTEITLANGEIRKRPLIETNGETGEIVWDKGRDFATVRKVLSMPQVNIVKKTEVQTGGFSKESILPKRNSDKLIARKKDWDPKKYGGFDSPTVAYSVLVVAKVEKGKSKKLKSVKELLGITIMERSSFEKNPIDFLEAKGYKEVKKDLIIKLPKYSLFELENGRKRMLASAGELQKGNELALPSKYVNFLYLASHYEKLKGSPEDNEQKQLFVEQHKHYLDEIIEQISEFSKRVILADANLDKVLSAYNKHRDKPIREQAENIIHLFTLTNLGAPAAFKYFDTTIDRKRYTSTKEVLDATLIHQSITGLYETRIDLSQLGGDGGGGGGGSGSSGGTLNIEDEYRLHETSKGPDVPLGSTWLSDFPQAWAETGGMGLAVRQAPLIIPLKATSTPVSIKQYPMSQEARLGIKPHIQRLLDQGILVPCQSPWNTPLLPVKKPGTNDYRPVQDLREVNKRVEDIHPTVPNPYNLLSGLPPSHQWYTVLDLKDAFFCLRLHPTSQSLFAFEWRDPEMGISGQLTWTRLPQGFKNSPTLFNEALHRDLADFRIQHPDLILLQYVDDLLLAATSELDCQQGTRALLQTLGDLGYRASAKKAQICQKQVKYLGYLLKEGQRWLTEARKETVMGQPTPKTPRQLREFLGKAGFCRLFIPGFAEMAAPLYPLTKPGTLFEWGPDQQKAYQEIKQALLTAPALGLPDLTKPFELFVDEKQGYAKGVLTQKLGPWRRPVAYLSKKLDPVAAGWPPCLRMVAAIAVLTKDAGKLTMGQPLVILAPHAVEALVKQPPDRWLSNARMTHYQALLLDTDRVQFGPIVALNPATLLPLPEEGLQHDCLDILAEAHGTRPDLTDQPLPDADHTWYTDGSSFLQEGQRKAGAAVTTETEVVWAKALPAGTSAQRAELIALTQALKMAEGKKLNVYTDSRYAFATAHIHGEIYRRRGWLTSEGKEIKNKDEILALLKALFLPKRLSIIHCPGHQKGNRAEARGNRMADQAAREVATRETPETSTLLAGKRTADGSEFEKRTADGSEFESPKKKAKVE

SEQ ID NO: 2606 - protein, 2091 aa, synthetic construct
MPAAKRVKLDGGDKKYSIGLDIGTNSVGWAVITDEYKVPSKKFKVLGNTDRHSIKKNLIGALLFDSGETAEATRLKRTARRRYTRRKNRICYLQEIFSNEMAKVDDSFFHRLEESFLVEEDKKHERHPIFGNIVDEVAYHEKYPTIYHLRKKLVDSTDKADLRLIYLALAHMIKFRGHFLIEGDLNPDNSDVDKLFIQLVQTYNQLFEENPINASGVDAKAILSARLSKSRRLENLIAQLPGEKKNGLFGNLIALSLGLTPNFKSNFDLAEDAKLQLSKDTYDDDLDNLLAQIGDQYADLFLAAKNLSDAILLSDILRVNTEITKAPLSASMIKRYDEHHQDLTLLKALVRQQLPEKYKEIFFDQSKNGYAGYIDGGASQEEFYKFIKPILEKMDGTEELLVKLNREDLLRKQRTFDNGSIPHQIHLGELHAILRRQEDFYPFLKDNREKIEKILTFRIPYYVGPLARGNSRFAWMTRKSEETITPWNFEEVVDKGASAQSFIERMTNFDKNLPNEKVLPKHSLLYEYFTVYNELTKVKYVTEGMRKPAFLSGEQKKAIVDLLFKTNRKVTVKQLKEDYFKKIECFDSVEISGVEDRFNASLGTYHDLLKIIKDKDFLDNEENEDILEDIVLTLTLFEDREMIEERLKTYAHLFDDKVMKQLKRRRYTGWGRLSRKLINGIRDKQSGKTILDFLKSDGFANRNFMQLIHDDSLTFKEDIQKAQVSGQGDSLHEHIANLAGSPAIKKGILQTVKVVDELVKVMGRHKPENIVIEMARENQTTQKGQKNSRERMKRIEEGIKELGSQILKEHPVENTQLQNEKLYLYYLQNGRDMYVDQELDINRLSDYDVDHIVPQSFLKDDSIDNKVLTRSDKARGKSDNVPSEEVVKKMKNYWRQLLNAKLITQRKFDNLTKAERGGLSELDKAGFIKRQLVETRQITKHVAQILDSRMNTKYDENDKLIREVKVITLKSKLVSDFRKDFQFYKVREINNYHHAHDAYLNAVVGTALIKKYPKLESEFVYGDYKVYDVRKMIAKSEQEIGKATAKYFFYSNIMNFFKTEITLANGEIRKRPLIETNGETGEIVWDKGRDFATVRKVLSMPQVNIVKKTEVQTGGFSKESILPKRNSDKLIARKKDWDPKKYGGFDSPTVAYSVLVVAKVEKGKSKKLKSVKELLGITIMERSSFEKNPIDFLEAKGYKEVKKDLIIKLPKYSLFELENGRKRMLASAGELQKGNELALPSKYVNFLYLASHYEKLKGSPEDNEQKQLFVEQHKHYLDEIIEQISEFSKRVILADANLDKVLSAYNKHRDKPIREQAENIIHLFTLTNLGAPAAFKYFDTTIDRKRYTSTKEVLDATLIHQSITGLYETRIDLSQLGGDGGPAPGSSGGTLNIEDEYRLHETSKGPDVPLGSTWLSDFPQAWAETGGMGLAVRQAPLIIPLKATSTPVSIKQYPMSQEARLGIKPHIQRLLDQGILVPCQSPWNTPLLPVKKPGTNDYRPVQDLREVNKRVEDIHPTVPNPYNLLSGLPPSHQWYTVLDLKDAFFCLRLHPTSQSLFAFEWRDPEMGISGQLTWTRLPQGFKNSPTLFNEALHRDLADFRIQHPDLILLQYVDDLLLAATSELDCQQGTRALLQTLGDLGYRASAKKAQICQKQVKYLGYLLKEGQRWLTEARKETVMGQPTPKTPRQLREFLGKAGFCRLFIPGFAEMAAPLYPLTKPGTLFEWGPDQQKAYQEIKQALLTAPALGLPDLTKPFELFVDEKQGYAKGVLTQKLGPWRRPVAYLSKKLDPVAAGWPPCLRMVAAIAVLTKDAGKLTMGQPLVILAPHAVEALVKQPPDRWLSNARMTHYQALLLDTDRVQFGPIVALNPATLLPLPEEGLQHDCLDILAEAHGTRPDLTDQPLPDADHTWYTDGSSFLQEGQRKAGAAVTTETEVVWAKALPAGTSAQRAELIALTQALKMAEGKKLNVYTDSRYAFATAHIHGEIYRRRGWLTSEGKEIKNKDEILALLKALFLPKRLSIIHCPGHQKGNRAEARGNRMADQAAREVATRETPETSTLLAGKRTADGSEFEKRTADGSEFESPKKKAKVE

SEQ ID NO: 2607 - protein, 2093 aa, synthetic construct
MPAAKRVKLDGGDKKYSIGLDIGTNSVGWAVITDEYKVPSKKFKVLGNTDRHSIKKNLIGALLFDSGETAEATRLKRTARRRYTRRKNRICYLQEIFSNEMAKVDDSFFHRLEESFLVEEDKKHERHPIFGNIVDEVAYHEKYPTIYHLRKKLVDSTDKADLRLIYLALAHMIKFRGHFLIEGDLNPDNSDVDKLFIQLVQTYNQLFEENPINASGVDAKAILSARLSKSRRLENLIAQLPGEKKNGLFGNLIALSLGLTPNFKSNFDLAEDAKLQLSKDTYDDDLDNLLAQIGDQYADLFLAAKNLSDAILLSDILRVNTEITKAPLSASMIKRYDEHHQDLTLLKALVRQQLPEKYKEIFFDQSKNGYAGYIDGGASQEEFYKFIKPILEKMDGTEELLVKLNREDLLRKQRTFDNGSIPHQIHLGELHAILRRQEDFYPFLKDNREKIEKILTFRIPYYVGPLARGNSRFAWMTRKSEETITPWNFEEVVDKGASAQSFIERMTNFDKNLPNEKVLPKHSLLYEYFTVYNELTKVKYVTEGMRKPAFLSGEQKKAIVDLLFKTNRKVTVKQLKEDYFKKIECFDSVEISGVEDRFNASLGTYHDLLKIIKDKDFLDNEENEDILEDIVLTLTLFEDREMIEERLKTYAHLFDDKVMKQLKRRRYTGWGRLSRKLINGIRDKQSGKTILDFLKSDGFANRNFMQLIHDDSLTFKEDIQKAQVSGQGDSLHEHIANLAGSPAIKKGILQTVKVVDELVKVMGRHKPENIVIEMARENQTTQKGQKNSRERMKRIEEGIKELGSQILKEHPVENTQLQNEKLYLYYLQNGRDMYVDQELDINRLSDYDVDHIVPQSFLKDDSIDNKVLTRSDKARGKSDNVPSEEVVKKMKNYWRQLLNAKLITQRKFDNLTKAERGGLSELDKAGFIKRQLVETRQITKHVAQILDSRMNTKYDENDKLIREVKVITLKSKLVSDFRKDFQFYKVREINNYHHAHDAYLNAVVGTALIKKYPKLESEFVYGDYKVYDVRKMIAKSEQEIGKATAKYFFYSNIMNFFKTEITLANGEIRKRPLIETNGETGEIVWDKGRDFATVRKVLSMPQVNIVKKTEVQTGGFSKESILPKRNSDKLIARKKDWDPKKYGGFDSPTVAYSVLVVAKVEKGKSKKLKSVKELLGITIMERSSFEKNPIDFLEAKGYKEVKKDLIIKLPKYSLFELENGRKRMLASAGELQKGNELALPSKYVNFLYLASHYEKLKGSPEDNEQKQLFVEQHKHYLDEIIEQISEFSKRVILADANLDKVLSAYNKHRDKPIREQAENIIHLFTLTNLGAPAAFKYFDTTIDRKRYTSTKEVLDATLIHQSITGLYETRIDLSQLGGDGGGGGEAAAKGGTLNIEDEYRLHETSKGPDVPLGSTWLSDFPQAWAETGGMGLAVRQAPLIIPLKATSTPVSIKQYPMSQEARLGIKPHIQRLLDQGILVPCQSPWNTPLLPVKKPGTNDYRPVQDLREVNKRVEDIHPTVPNPYNLLSGLPPSHQWYTVLDLKDAFFCLRLHPTSQSLFAFEWRDPEMGISGQLTWTRLPQGFKNSPTLFNEALHRDLADFRIQHPDLILLQYVDDLLLAATSELDCQQGTRALLQTLGDLGYRASAKKAQICQKQVKYLGYLLKEGQRWLTEARKETVMGQPTPKTPRQLREFLGKAGFCRLFIPGFAEMAAPLYPLTKPGTLFEWGPDQQKAYQEIKQALLTAPALGLPDLTKPFELFVDEKQGYAKGVLTQKLGPWRRPVAYLSKKLDPVAAGWPPCLRMVAAIAVLTKDAGKLTMGQPLVILAPHAVEALVKQPPDRWLSNARMTHYQALLLDTDRVQFGPIVALNPATLLPLPEEGLQHDCLDILAEAHGTRPDLTDQPLPDADHTWYTDGSSFLQEGQRKAGAAVTTETEVVWAKALPAGTSAQRAELIALTQALKMAEGKKLNVYTDSRYAFATAHIHGEIYRRRGWLTSEGKEIKNKDEILALLKALFLPKRLSIIHCPGHQKGNRAEARGNRMADQAAREVATRETPETSTLLAGKRTADGSEFEKRTADGSEFESPKKKAKVE

SEQ ID NO: 2608 - protein, 2096 aa, synthetic construct
MPAAKRVKLDGGDKKYSIGLDIGTNSVGWAVITDEYKVPSKKFKVLGNTDRHSIKKNLIGALLFDSGETAEATRLKRTARRRYTRRKNRICYLQEIFSNEMAKVDDSFFHRLEESFLVEEDKKHERHPIFGNIVDEVAYHEKYPTIYHLRKKLVDSTDKADLRLIYLALAHMIKFRGHFLIEGDLNPDNSDVDKLFIQLVQTYNQLFEENPINASGVDAKAILSARLSKSRRLENLIAQLPGEKKNGLFGNLIALSLGLTPNFKSNFDLAEDAKLQLSKDTYDDDLDNLLAQIGDQYADLFLAAKNLSDAILLSDILRVNTEITKAPLSASMIKRYDEHHQDLTLLKALVRQQLPEKYKEIFFDQSKNGYAGYIDGGASQEEFYKFIKPILEKMDGTEELLVKLNREDLLRKQRTFDNGSIPHQIHLGELHAILRRQEDFYPFLKDNREKIEKILTFRIPYYVGPLARGNSRFAWMTRKSEETITPWNFEEVVDKGASAQSFIERMTNFDKNLPNEKVLPKHSLLYEYFTVYNELTKVKYVTEGMRKPAFLSGEQKKAIVDLLFKTNRKVTVKQLKEDYFKKIECFDSVEISGVEDRFNASLGTYHDLLKIIKDKDFLDNEENEDILEDIVLTLTLFEDREMIEERLKTYAHLFDDKVMKQLKRRRYTGWGRLSRKLINGIRDKQSGKTILDFLKSDGFANRNFMQLIHDDSLTFKEDIQKAQVSGQGDSLHEHIANLAGSPAIKKGILQTVKVVDELVKVMGRHKPENIVIEMARENQTTQKGQKNSRERMKRIEEGIKELGSQILKEHPVENTQLQNEKLYLYYLQNGRDMYVDQELDINRLSDYDVDHIVPQSFLKDDSIDNKVLTRSDKARGKSDNVPSEEVVKKMKNYWRQLLNAKLITQRKFDNLTKAERGGLSELDKAGFIKRQLVETRQITKHVAQILDSRMNTKYDENDKLIREVKVITLKSKLVSDFRKDFQFYKVREINNYHHAHDAYLNAVVGTALIKKYPKLESEFVYGDYKVYDVRKMIAKSEQEIGKATAKYFFYSNIMNFFKTEITLANGEIRKRPLIETNGETGEIVWDKGRDFATVRKVLSMPQVNIVKKTEVQTGGFSKESILPKRNSDKLIARKKDWDPKKYGGFDSPTVAYSVLVVAKVEKGKSKKLKSVKELLGITIMERSSFEKNPIDFLEAKGYKEVKKDLIIKLPKYSLFELENGRKRMLASAGELQKGNELALPSKYVNFLYLASHYEKLKGSPEDNEQKQLFVEQHKHYLDEIIEQISEFSKRVILADANLDKVLSAYNKHRDKPIREQAENIIHLFTLTNLGAPAAFKYFDTTIDRKRYTSTKEVLDATLIHQSITGLYETRIDLSQLGGDGGGGSEAAAKGSSGGTLNIEDEYRLHETSKGPDVPLGSTWLSDFPQAWAETGGMGLAVRQAPLIIPLKATSTPVSIKQYPMSQEARLGIKPHIQRLLDQGILVPCQSPWNTPLLPVKKPGTNDYRPVQDLREVNKRVEDIHPTVPNPYNLLSGLPPSHQWYTVLDLKDAFFCLRLHPTSQSLFAFEWRDPEMGISGQLTWTRLPQGFKNSPTLFNEALHRDLADFRIQHPDLILLQYVDDLLLAATSELDCQQGTRALLQTLGDLGYRASAKKAQICQKQVKYLGYLLKEGQRWLTEARKETVMGQPTPKTPRQLREFLGKAGFCRLFIPGFAEMAAPLYPLTKPGTLFEWGPDQQKAYQEIKQALLTAPALGLPDLTKPFELFVDEKQGYAKGVLTQKLGPWRRPVAYLSKKLDPVAAGWPPCLRMVAAIAVLTKDAGKLTMGQPLVILAPHAVEALVKQPPDRWLSNARMTHYQALLLDTDRVQFGPIVALNPATLLPLPEEGLQHDCLDILAEAHGTRPDLTDQPLPDADHTWYTDGSSFLQEGQRKAGAAVTTETEVVWAKALPAGTSAQRAELIALTQALKMAEGKKLNVYTDSRYAFATAHIHGEIYRRRGWLTSEGKEIKNKDEILALLKALFLPKRLSIIHCPGHQKGNRAEARGNRMADQAAREVATRETPETSTLLAGKRTADGSEFEKRTADGSEFESPKKKAKVE

SEQ ID NO: 2609 - protein, 2118 aa, synthetic construct
MPAAKRVKLDGGDKKYSIGLDIGTNSVGWAVITDEYKVPSKKFKVLGNTDRHSIKKNLIGALLFDSGETAEATRLKRTARRRYTRRKNRICYLQEIFSNEMAKVDDSFFHRLEESFLVEEDKKHERHPIFGNIVDEVAYHEKYPTIYHLRKKLVDSTDKADLRLIYLALAHMIKFRGHFLIEGDLNPDNSDVDKLFIQLVQTYNQLFEENPINASGVDAKAILSARLSKSRRLENLIAQLPGEKKNGLFGNLIALSLGLTPNFKSNFDLAEDAKLQLSKDTYDDDLDNLLAQIGDQYADLFLAAKNLSDAILLSDILRVNTEITKAPLSASMIKRYDEHHQDLTLLKALVRQQLPEKYKEIFFDQSKNGYAGYIDGGASQEEFYKFIKPILEKMDGTEELLVKLNREDLLRKQRTFDNGSIPHQIHLGELHAILRRQEDFYPFLKDNREKIEKILTFRIPYYVGPLARGNSRFAWMTRKSEETITPWNFEEVVDKGASAQSFIERMTNFDKNLPNEKVLPKHSLLYEYFTVYNELTKVKYVTEGMRKPAFLSGEQKKAIVDLLFKTNRKVTVKQLKEDYFKKIECFDSVEISGVEDRFNASLGTYHDLLKIIKDKDFLDNEENEDILEDIVLTLTLFEDREMIEERLKTYAHLFDDKVMKQLKRRRYTGWGRLSRKLINGIRDKQSGKTILDFLKSDGFANRNFMQLIHDDSLTFKEDIQKAQVSGQGDSLHEHIANLAGSPAIKKGILQTVKVVDELVKVMGRHKPENIVIEMARENQTTQKGQKNSRERMKRIEEGIKELGSQILKEHPVENTQLQNEKLYLYYLQNGRDMYVDQELDINRLSDYDVDHIVPQSFLKDDSIDNKVLTRSDKARGKSDNVPSEEVVKKMKNYWRQLLNAKLITQRKFDNLTKAERGGLSELDKAGFIKRQLVETRQITKHVAQILDSRMNTKYDENDKLIREVKVITLKSKLVSDFRKDFQFYKVREINNYHHAHDAYLNAVVGTALIKKYPKLESEFVYGDYKVYDVRKMIAKSEQEIGKATAKYFFYSNIMNFFKTEITLANGEIRKRPLIETNGETGEIVWDKGRDFATVRKVLSMPQVNIVKKTEVQTGGFSKESILPKRNSDKLIARKKDWDPKKYGGFDSPTVAYSVLVVAKVEKGKSKKLKSVKELLGITIMERSSFEKNPIDFLEAKGYKEVKKDLIIKLPKYSLFELENGRKRMLASAGELQKGNELALPSKYVNFLYLASHYEKLKGSPEDNEQKQLFVEQHKHYLDEIIEQISEFSKRVILADANLDKVLSAYNKHRDKPIREQAENIIHLFTLTNLGAPAAFKYFDTTIDRKRYTSTKEVLDATLIHQSITGLYETRIDLSQLGGDGGSGGSSGGSSGSETPGTSESATPESSGGSSGGSSGGTLNIEDEYRLHETSKGPDVPLGSTWLSDFPQAWAETGGMGLAVRQAPLIIPLKATSTPVSIKQYPMSQEARLGIKPHIQRLLDQGILVPCQSPWNTPLLPVKKPGTNDYRPVQDLREVNKRVEDIHPTVPNPYNLLSGLPPSHQWYTVLDLKDAFFCLRLHPTSQSLFAFEWRDPEMGISGQLTWTRLPQGFKNSPTLFNEALHRDLADFRIQHPDLILLQYVDDLLLAATSELDCQQGTRALLQTLGDLGYRASAKKAQICQKQVKYLGYLLKEGQRWLTEARKETVMGQPTPKTPRQLREFLGKAGFCRLFIPGFAEMAAPLYPLTKPGTLFEWGPDQQKAYQEIKQALLTAPALGLPDLTKPFELFVDEKQGYAKGVLTQKLGPWRRPVAYLSKKLDPVAAGWPPCLRMVAAIAVLTKDAGKLTMGQPLVILAPHAVEALVKQPPDRWLSNARMTHYQALLLDTDRVQFGPIVALNPATLLPLPEEGLQHDCLDILAEAHGTRPDLTDQPLPDADHTWYTDGSSFLQEGQRKAGAAVTTETEVVWAKALPAGTSAQRAELIALTQALKMAEGKKLNVYTDSRYAFATAHIHGEIYRRRGWLTSEGKEIKNKDEILALLKALFLPKRLSIIHCPGHQKGNRAEARGNRMADQAAREVATRETPETSTLLAGKRTADGSEFEKRTADGSEFESPKKKAKVE

SEQ ID NO: 2610 - protein, 2125 aa, synthetic construct
MPAAKRVKLDGGDKKYSIGLDIGTNSVGWAVITDEYKVPSKKFKVLGNTDRHSIKKNLIGALLFDSGETAEATRLKRTARRRYTRRKNRICYLQEIFSNEMAKVDDSFFHRLEESFLVEEDKKHERHPIFGNIVDEVAYHEKYPTIYHLRKKLVDSTDKADLRLIYLALAHMIKFRGHFLIEGDLNPDNSDVDKLFIQLVQTYNQLFEENPINASGVDAKAILSARLSKSRRLENLIAQLPGEKKNGLFGNLIALSLGLTPNFKSNFDLAEDAKLQLSKDTYDDDLDNLLAQIGDQYADLFLAAKNLSDAILLSDILRVNTEITKAPLSASMIKRYDEHHQDLTLLKALVRQQLPEKYKEIFFDQSKNGYAGYIDGGASQEEFYKFIKPILEKMDGTEELLVKLNREDLLRKQRTFDNGSIPHQIHLGELHAILRRQEDFYPFLKDNREKIEKILTFRIPYYVGPLARGNSRFAWMTRKSEETITPWNFEEVVDKGASAQSFIERMTNFDKNLPNEKVLPKHSLLYEYFTVYNELTKVKYVTEGMRKPAFLSGEQKKAIVDLLFKTNRKVTVKQLKEDYFKKIECFDSVEISGVEDRFNASLGTYHDLLKIIKDKDFLDNEENEDILEDIVLTLTLFEDREMIEERLKTYAHLFDDKVMKQLKRRRYTGWGRLSRKLINGIRDKQSGKTILDFLKSDGFANRNFMQLIHDDSLTFKEDIQKAQVSGQGDSLHEHIANLAGSPAIKKGILQTVKVVDELVKVMGRHKPENIVIEMARENQTTQKGQKNSRERMKRIEEGIKELGSQILKEHPVENTQLQNEKLYLYYLQNGRDMYVDQELDINRLSDYDVDHIVPQSFLKDDSIDNKVLTRSDKARGKSDNVPSEEVVKKMKNYWRQLLNAKLITQRKFDNLTKAERGGLSELDKAGFIKRQLVETRQITKHVAQILDSRMNTKYDENDKLIREVKVITLKSKLVSDFRKDFQFYKVREINNYHHAHDAYLNAVVGTALIKKYPKLESEFVYGDYKVYDVRKMIAKSEQEIGKATAKYFFYSNIMNFFKTEITLANGEIRKRPLIETNGETGEIVWDKGRDFATVRKVLSMPQVNIVKKTEVQTGGFSKESILPKRNSDKLIARKKDWDPKKYGGFDSPTVAYSVLVVAKVEKGKSKKLKSVKELLGITIMERSSFEKNPIDFLEAKGYKEVKKDLIIKLPKYSLFELENGRKRMLASAGELQKGNELALPSKYVNFLYLASHYEKLKGSPEDNEQKQLFVEQHKHYLDEIIEQISEFSKRVILADANLDKVLSAYNKHRDKPIREQAENIIHLFTLTNLGAPAAFKYFDTTIDRKRYTSTKEVLDATLIHQSITGLYETRIDLSQLGGDGGEAAAKEAAAKEAAAKEAAAKGGTLNIEDEYRLHETSKEPDVSLGSTWLSDFPQAWAETGGMGLAVRQAPLIIPLKATSTPVSIKQYPMSQEARLGIKPHIQRLLDQGILVPCQSPWNTPLLPVKKPGTNDYRPVQDLREVNKRVEDIHPTVPNPYNLLSGLPPSHQWYTVLDLKDAFFCLRLHPTSQPLFAFEWRDPEMGISGQLTWTRLPQGFKNSPTLFNEALHRDLADFRIQHPDLILLQYVDDLLLAATSELDCQQGTRALLQTLGNLGYRASAKKAQICQKQVKYLGYLLKEGQRWLTEARKETVMGQPTPKTPRQLREFLGKAGFCRLFIPGFAEMAAPLYPLTKPGTLFNWGPDQQKAYQEIKQALLTAPALGLPDLTKPFELFVDEKQGYAKGVLTQKLGPWRRPVAYLSKKLDPVAAGWPPCLRMVAAIAVLTKDAGKLTMGQPLVILAPHAVEALVKQPPDRWLSNARMTHYQALLLDTDRVQFGPVVALNPATLLPLPEEGLQHNCLDILAEAHGTRPDLTDQPLPDADHTWYTDGSSLLQEGQRKAGAAVTTETEVIWAKALPAGTSAQRAELIALTQALKMAEGKKLNVYTDSRYAFATAHIHGEIYRRRGWLTSEGKEIKNKDEILALLKALFLPKRLSIIHCPGHQKGHSAEARGNRMADQAARKAAITETPDTSTLLIENSSPSGGSKRTADGSEFEAGKRTADGSEFEKRTADGSEFESPKKKAKVE

SEQ ID NO: 2611 - protein, 2151 aa, synthetic construct
MPAAKRVKLDGGDKKYSIGLDIGTNSVGWAVITDEYKVPSKKFKVLGNTDRHSIKKNLIGALLFDSGETAEATRLKRTARRRYTRRKNRICYLQEIFSNEMAKVDDSFFHRLEESFLVEEDKKHERHPIFGNIVDEVAYHEKYPTIYHLRKKLVDSTDKADLRLIYLALAHMIKFRGHFLIEGDLNPDNSDVDKLFIQLVQTYNQLFEENPINASGVDAKAILSARLSKSRRLENLIAQLPGEKKNGLFGNLIALSLGLTPNFKSNFDLAEDAKLQLSKDTYDDDLDNLLAQIGDQYADLFLAAKNLSDAILLSDILRVNTEITKAPLSASMIKRYDEHHQDLTLLKALVRQQLPEKYKEIFFDQSKNGYAGYIDGGASQEEFYKFIKPILEKMDGTEELLVKLNREDLLRKQRTFDNGSIPHQIHLGELHAILRRQEDFYPFLKDNREKIEKILTFRIPYYVGPLARGNSRFAWMTRKSEETITPWNFEEVVDKGASAQSFIERMTNFDKNLPNEKVLPKHSLLYEYFTVYNELTKVKYVTEGMRKPAFLSGEQKKAIVDLLFKTNRKVTVKQLKEDYFKKIECFDSVEISGVEDRFNASLGTYHDLLKIIKDKDFLDNEENEDILEDIVLTLTLFEDREMIEERLKTYAHLFDDKVMKQLKRRRYTGWGRLSRKLINGIRDKQSGKTILDFLKSDGFANRNFMQLIHDDSLTFKEDIQKAQVSGQGDSLHEHIANLAGSPAIKKGILQTVKVVDELVKVMGRHKPENIVIEMARENQTTQKGQKNSRERMKRIEEGIKELGSQILKEHPVENTQLQNEKLYLYYLQNGRDMYVDQELDINRLSDYDVDHIVPQSFLKDDSIDNKVLTRSDKARGKSDNVPSEEVVKKMKNYWRQLLNAKLITQRKFDNLTKAERGGLSELDKAGFIKRQLVETRQITKHVAQILDSRMNTKYDENDKLIREVKVITLKSKLVSDFRKDFQFYKVREINNYHHAHDAYLNAVVGTALIKKYPKLESEFVYGDYKVYDVRKMIAKSEQEIGKATAKYFFYSNIMNFFKTEITLANGEIRKRPLIETNGETGEIVWDKGRDFATVRKVLSMPQVNIVKKTEVQTGGFSKESILPKRNSDKLIARKKDWDPKKYGGFDSPTVAYSVLVVAKVEKGKSKKLKSVKELLGITIMERSSFEKNPIDFLEAKGYKEVKKDLIIKLPKYSLFELENGRKRMLASAGELQKGNELALPSKYVNFLYLASHYEKLKGSPEDNEQKQLFVEQHKHYLDEIIEQISEFSKRVILADANLDKVLSAYNKHRDKPIREQAENIIHLFTLTNLGAPAAFKYFDTTIDRKRYTSTKEVLDATLIHQSITGLYETRIDLSQLGGDGGAEAAAKEAAAKEAAAKEAAAKALEAEAAAKEAAAKEAAAKEAAAKAGGTLNIEDEYRLHETSKEPDVSLGSTWLSDFPQAWAETGGMGLAVRQAPLIIPLKATSTPVSIKQYPMSQEARLGIKPHIQRLLDQGILVPCQSPWNTPLLPVKKPGTNDYRPVQDLREVNKRVEDIHPTVPNPYNLLSGLPPSHQWYTVLDLKDAFFCLRLHPTSQPLFAFEWRDPEMGISGQLTWTRLPQGFKNSPTLFNEALHRDLADFRIQHPDLILLQYVDDLLLAATSELDCQQGTRALLQTLGNLGYRASAKKAQICQKQVKYLGYLLKEGQRWLTEARKETVMGQPTPKTPRQLREFLGKAGFCRLFIPGFAEMAAPLYPLTKPGTLFNWGPDQQKAYQEIKQALLTAPALGLPDLTKPFELFVDEKQGYAKGVLTQKLGPWRRPVAYLSKKLDPVAAGWPPCLRMVAAIAVLTKDAGKLTMGQPLVILAPHAVEALVKQPPDRWLSNARMTHYQALLLDTDRVQFGPVVALNPATLLPLPEEGLQHNCLDILAEAHGTRPDLTDQPLPDADHTWYTDGSSLLQEGQRKAGAAVTTETEVIWAKALPAGTSAQRAELIALTQALKMAEGKKLNVYTDSRYAFATAHIHGEIYRRRGWLTSEGKEIKNKDEILALLKALFLPKRLSIIHCPGHQKGHSAEARGNRMADQAARKAAITETPDTSTLLIENSSPSGGSKRTADGSEFEAGKRTADGSEFEKRTADGSEFESPKKKAKVE

SEQ ID NO: 2612 - protein, 2123 aa, synthetic construct
MPAAKRVKLDGGDKKYSIGLDIGTNSVGWAVITDEYKVPSKKFKVLGNTDRHSIKKNLIGALLFDSGETAEATRLKRTARRRYTRRKNRICYLQEIFSNEMAKVDDSFFHRLEESFLVEEDKKHERHPIFGNIVDEVAYHEKYPTIYHLRKKLVDSTDKADLRLIYLALAHMIKFRGHFLIEGDLNPDNSDVDKLFIQLVQTYNQLFEENPINASGVDAKAILSARLSKSRRLENLIAQLPGEKKNGLFGNLIALSLGLTPNFKSNFDLAEDAKLQLSKDTYDDDLDNLLAQIGDQYADLFLAAKNLSDAILLSDILRVNTEITKAPLSASMIKRYDEHHQDLTLLKALVRQQLPEKYKEIFFDQSKNGYAGYIDGGASQEEFYKFIKPILEKMDGTEELLVKLNREDLLRKQRTFDNGSIPHQIHLGELHAILRRQEDFYPFLKDNREKIEKILTFRIPYYVGPLARGNSRFAWMTRKSEETITPWNFEEVVDKGASAQSFIERMTNFDKNLPNEKVLPKHSLLYEYFTVYNELTKVKYVTEGMRKPAFLSGEQKKAIVDLLFKTNRKVTVKQLKEDYFKKIECFDSVEISGVEDRFNASLGTYHDLLKIIKDKDFLDNEENEDILEDIVLTLTLFEDREMIEERLKTYAHLFDDKVMKQLKRRRYTGWGRLSRKLINGIRDKQSGKTILDFLKSDGFANRNFMQLIHDDSLTFKEDIQKAQVSGQGDSLHEHIANLAGSPAIKKGILQTVKVVDELVKVMGRHKPENIVIEMARENQTTQKGQKNSRERMKRIEEGIKELGSQILKEHPVENTQLQNEKLYLYYLQNGRDMYVDQELDINRLSDYDVDHIVPQSFLKDDSIDNKVLTRSDKARGKSDNVPSEEVVKKMKNYWRQLLNAKLITQRKFDNLTKAERGGLSELDKAGFIKRQLVETRQITKHVAQILDSRMNTKYDENDKLIREVKVITLKSKLVSDFRKDFQFYKVREINNYHHAHDAYLNAVVGTALIKKYPKLESEFVYGDYKVYDVRKMIAKSEQEIGKATAKYFFYSNIMNFFKTEITLANGEIRKRPLIETNGETGEIVWDKGRDFATVRKVLSMPQVNIVKKTEVQTGGFSKESILPKRNSDKLIARKKDWDPKKYGGFDSPTVAYSVLVVAKVEKGKSKKLKSVKELLGITIMERSSFEKNPIDFLEAKGYKEVKKDLIIKLPKYSLFELENGRKRMLASAGELQKGNELALPSKYVNFLYLASHYEKLKGSPEDNEQKQLFVEQHKHYLDEIIEQISEFSKRVILADANLDKVLSAYNKHRDKPIREQAENIIHLFTLTNLGAPAAFKYFDTTIDRKRYTSTKEVLDATLIHQSITGLYETRIDLSQLGGDGGGSSGSSGSSGSSGSSGSSGGTLNIEDEYRLHETSKEPDVSLGSTWLSDFPQAWAETGGMGLAVRQAPLIIPLKATSTPVSIKQYPMSQEARLGIKPHIQRLLDQGILVPCQSPWNTPLLPVKKPGTNDYRPVQDLREVNKRVEDIHPTVPNPYNLLSGLPPSHQWYTVLDLKDAFFCLRLHPTSQPLFAFEWRDPEMGISGQLTWTRLPQGFKNSPTLFNEALHRDLADFRIQHPDLILLQYVDDLLLAATSELDCQQGTRALLQTLGNLGYRASAKKAQICQKQVKYLGYLLKEGQRWLTEARKETVMGQPTPKTPRQLREFLGKAGFCRLFIPGFAEMAAPLYPLTKPGTLFNWGPDQQKAYQEIKQALLTAPALGLPDLTKPFELFVDEKQGYAKGVLTQKLGPWRRPVAYLSKKLDPVAAGWPPCLRMVAAIAVLTKDAGKLTMGQPLVILAPHAVEALVKQPPDRWLSNARMTHYQALLLDTDRVQFGPVVALNPATLLPLPEEGLQHNCLDILAEAHGTRPDLTDQPLPDADHTWYTDGSSLLQEGQRKAGAAVTTETEVIWAKALPAGTSAQRAELIALTQALKMAEGKKLNVYTDSRYAFATAHIHGEIYRRRGWLTSEGKEIKNKDEILALLKALFLPKRLSIIHCPGHQKGHSAEARGNRMADQAARKAAITETPDTSTLLIENSSPSGGSKRTADGSEFEAGKRTADGSEFEKRTADGSEFESPKKKAKVE

SEQ ID NO: 2613 - protein, 2130 aa, synthetic construct
MPAAKRVKLDGGDKKYSIGLDIGTNSVGWAVITDEYKVPSKKFKVLGNTDRHSIKKNLIGALLFDSGETAEATRLKRTARRRYTRRKNRICYLQEIFSNEMAKVDDSFFHRLEESFLVEEDKKHERHPIFGNIVDEVAYHEKYPTIYHLRKKLVDSTDKADLRLIYLALAHMIKFRGHFLIEGDLNPDNSDVDKLFIQLVQTYNQLFEENPINASGVDAKAILSARLSKSRRLENLIAQLPGEKKNGLFGNLIALSLGLTPNFKSNFDLAEDAKLQLSKDTYDDDLDNLLAQIGDQYADLFLAAKNLSDAILLSDILRVNTEITKAPLSASMIKRYDEHHQDLTLLKALVRQQLPEKYKEIFFDQSKNGYAGYIDGGASQEEFYKFIKPILEKMDGTEELLVKLNREDLLRKQRTFDNGSIPHQIHLGELHAILRRQEDFYPFLKDNREKIEKILTFRIPYYVGPLARGNSRFAWMTRKSEETITPWNFEEVVDKGASAQSFIERMTNFDKNLPNEKVLPKHSLLYEYFTVYNELTKVKYVTEGMRKPAFLSGEQKKAIVDLLFKTNRKVTVKQLKEDYFKKIECFDSVEISGVEDRFNASLGTYHDLLKIIKDKDFLDNEENEDILEDIVLTLTLFEDREMIEERLKTYAHLFDDKVMKQLKRRRYTGWGRLSRKLINGIRDKQSGKTILDFLKSDGFANRNFMQLIHDDSLTFKEDIQKAQVSGQGDSLHEHIANLAGSPAIKKGILQTVKVVDELVKVMGRHKPENIVIEMARENQTTQKGQKNSRERMKRIEEGIKELGSQILKEHPVENTQLQNEKLYLYYLQNGRDMYVDQELDINRLSDYDVDHIVPQSFLKDDSIDNKVLTRSDKARGKSDNVPSEEVVKKMKNYWRQLLNAKLITQRKFDNLTKAERGGLSELDKAGFIKRQLVETRQITKHVAQILDSRMNTKYDENDKLIREVKVITLKSKLVSDFRKDFQFYKVREINNYHHAHDAYLNAVVGTALIKKYPKLESEFVYGDYKVYDVRKMIAKSEQEIGKATAKYFFYSNIMNFFKTEITLANGEIRKRPLIETNGETGEIVWDKGRDFATVRKVLSMPQVNIVKKTEVQTGGFSKESILPKRNSDKLIARKKDWDPKKYGGFDSPTVAYSVLVVAKVEKGKSKKLKSVKELLGITIMERSSFEKNPIDFLEAKGYKEVKKDLIIKLPKYSLFELENGRKRMLASAGELQKGNELALPSKYVNFLYLASHYEKLKGSPEDNEQKQLFVEQHKHYLDEIIEQISEFSKRVILADANLDKVLSAYNKHRDKPIREQAENIIHLFTLTNLGAPAAFKYFDTTIDRKRYTSTKEVLDATLIHQSITGLYETRIDLSQLGGDGGGGGGSGGGGSGGGGSGGGGSGGGGSGGTLNIEDEYRLHETSKEPDVSLGSTWLSDFPQAWAETGGMGLAVRQAPLIIPLKATSTPVSIKQYPMSQEARLGIKPHIQRLLDQGILVPCQSPWNTPLLPVKKPGTNDYRPVQDLREVNKRVEDIHPTVPNPYNLLSGLPPSHQWYTVLDLKDAFFCLRLHPTSQPLFAFEWRDPEMGISGQLTWTRLPQGFKNSPTLFNEALHRDLADFRIQHPDLILLQYVDDLLLAATSELDCQQGTRALLQTLGNLGYRASAKKAQICQKQVKYLGYLLKEGQRWLTEARKETVMGQPTPKTPRQLREFLGKAGFCRLFIPGFAEMAAPLYPLTKPGTLFNWGPDQQKAYQEIKQALLTAPALGLPDLTKPFELFVDEKQGYAKGVLTQKLGPWRRPVAYLSKKLDPVAAGWPPCLRMVAAIAVLTKDAGKLTMGQPLVILAPHAVEALVKQPPDRWLSNARMTHYQALLLDTDRVQFGPVVALNPATLLPLPEEGLQHNCLDILAEAHGTRPDLTDQPLPDADHTWYTDGSSLLQEGQRKAGAAVTTETEVIWAKALPAGTSAQRAELIALTQALKMAEGKKLNVYTDSRYAFATAHIHGEIYRRRGWLTSEGKEIKNKDEILALLKALFLPKRLSIIHCPGHQKGHSAEARGNRMADQAARKAAITETPDTSTLLIENSSPSGGSKRTADGSEFEAGKRTADGSEFEKRTADGSEFESPKKKAKVE

SEQ ID NO: 2614 - protein, 2116 aa, synthetic construct
MPAAKRVKLDGGDKKYSIGLDIGTNSVGWAVITDEYKVPSKKFKVLGNTDRHSIKKNLIGALLFDSGETAEATRLKRTARRRYTRRKNRICYLQEIFSNEMAKVDDSFFHRLEESFLVEEDKKHERHPIFGNIVDEVAYHEKYPTIYHLRKKLVDSTDKADLRLIYLALAHMIKFRGHFLIEGDLNPDNSDVDKLFIQLVQTYNQLFEENPINASGVDAKAILSARLSKSRRLENLIAQLPGEKKNGLFGNLIALSLGLTPNFKSNFDLAEDAKLQLSKDTYDDDLDNLLAQIGDQYADLFLAAKNLSDAILLSDILRVNTEITKAPLSASMIKRYDEHHQDLTLLKALVRQQLPEKYKEIFFDQSKNGYAGYIDGGASQEEFYKFIKPILEKMDGTEELLVKLNREDLLRKQRTFDNGSIPHQIHLGELHAILRRQEDFYPFLKDNREKIEKILTFRIPYYVGPLARGNSRFAWMTRKSEETITPWNFEEVVDKGASAQSFIERMTNFDKNLPNEKVLPKHSLLYEYFTVYNELTKVKYVTEGMRKPAFLSGEQKKAIVDLLFKTNRKVTVKQLKEDYFKKIECFDSVEISGVEDRFNASLGTYHDLLKIIKDKDFLDNEENEDILEDIVLTLTLFEDREMIEERLKTYAHLFDDKVMKQLKRRRYTGWGRLSRKLINGIRDKQSGKTILDFLKSDGFANRNFMQLIHDDSLTFKEDIQKAQVSGQGDSLHEHIANLAGSPAIKKGILQTVKVVDELVKVMGRHKPENIVIEMARENQTTQKGQKNSRERMKRIEEGIKELGSQILKEHPVENTQLQNEKLYLYYLQNGRDMYVDQELDINRLSDYDVDHIVPQSFLKDDSIDNKVLTRSDKARGKSDNVPSEEVVKKMKNYWRQLLNAKLITQRKFDNLTKAERGGLSELDKAGFIKRQLVETRQITKHVAQILDSRMNTKYDENDKLIREVKVITLKSKLVSDFRKDFQFYKVREINNYHHAHDAYLNAVVGTALIKKYPKLESEFVYGDYKVYDVRKMIAKSEQEIGKATAKYFFYSNIMNFFKTEITLANGEIRKRPLIETNGETGEIVWDKGRDFATVRKVLSMPQVNIVKKTEVQTGGFSKESILPKRNSDKLIARKKDWDPKKYGGFDSPTVAYSVLVVAKVEKGKSKKLKSVKELLGITIMERSSFEKNPIDFLEAKGYKEVKKDLIIKLPKYSLFELENGRKRMLASAGELQKGNELALPSKYVNFLYLASHYEKLKGSPEDNEQKQLFVEQHKHYLDEIIEQISEFSKRVILADANLDKVLSAYNKHRDKPIREQAENIIHLFTLTNLGAPAAFKYFDTTIDRKRYTSTKEVLDATLIHQSITGLYETRIDLSQLGGDGGEAAAKGGGPAPGGTLNIEDEYRLHETSKEPDVSLGSTWLSDFPQAWAETGGMGLAVRQAPLIIPLKATSTPVSIKQYPMSQEARLGIKPHIQRLLDQGILVPCQSPWNTPLLPVKKPGTNDYRPVQDLREVNKRVEDIHPTVPNPYNLLSGLPPSHQWYTVLDLKDAFFCLRLHPTSQPLFAFEWRDPEMGISGQLTWTRLPQGFKNSPTLFNEALHRDLADFRIQHPDLILLQYVDDLLLAATSELDCQQGTRALLQTLGNLGYRASAKKAQICQKQVKYLGYLLKEGQRWLTEARKETVMGQPTPKTPRQLREFLGKAGFCRLFIPGFAEMAAPLYPLTKPGTLFNWGPDQQKAYQEIKQALLTAPALGLPDLTKPFELFVDEKQGYAKGVLTQKLGPWRRPVAYLSKKLDPVAAGWPPCLRMVAAIAVLTKDAGKLTMGQPLVILAPHAVEALVKQPPDRWLSNARMTHYQALLLDTDRVQFGPVVALNPATLLPLPEEGLQHNCLDILAEAHGTRPDLTDQPLPDADHTWYTDGSSLLQEGQRKAGAAVTTETEVIWAKALPAGTSAQRAELIALTQALKMAEGKKLNVYTDSRYAFATAHIHGEIYRRRGWLTSEGKEIKNKDEILALLKALFLPKRLSIIHCPGHQKGHSAEARGNRMADQAARKAAITETPDTSTLLIENSSPSGGSKRTADGSEFEAGKRTADGSEFEKRTADGSEFESPKKKAKVE

SEQ ID NO: 2615 - protein, 2125 aa, synthetic construct
MPAAKRVKLDGGDKKYSIGLDIGTNSVGWAVITDEYKVPSKKFKVLGNTDRHSIKKNLIGALLFDSGETAEATRLKRTARRRYTRRKNRICYLQEIFSNEMAKVDDSFFHRLEESFLVEEDKKHERHPIFGNIVDEVAYHEKYPTIYHLRKKLVDSTDKADLRLIYLALAHMIKFRGHFLIEGDLNPDNSDVDKLFIQLVQTYNQLFEENPINASGVDAKAILSARLSKSRRLENLIAQLPGEKKNGLFGNLIALSLGLTPNFKSNFDLAEDAKLQLSKDTYDDDLDNLLAQIGDQYADLFLAAKNLSDAILLSDILRVNTEITKAPLSASMIKRYDEHHQDLTLLKALVRQQLPEKYKEIFFDQSKNGYAGYIDGGASQEEFYKFIKPILEKMDGTEELLVKLNREDLLRKQRTFDNGSIPHQIHLGELHAILRRQEDFYPFLKDNREKIEKILTFRIPYYVGPLARGNSRFAWMTRKSEETITPWNFEEVVDKGASAQSFIERMTNFDKNLPNEKVLPKHSLLYEYFTVYNELTKVKYVTEGMRKPAFLSGEQKKAIVDLLFKTNRKVTVKQLKEDYFKKIECFDSVEISGVEDRFNASLGTYHDLLKIIKDKDFLDNEENEDILEDIVLTLTLFEDREMIEERLKTYAHLFDDKVMKQLKRRRYTGWGRLSRKLINGIRDKQSGKTILDFLKSDGFANRNFMQLIHDDSLTFKEDIQKAQVSGQGDSLHEHIANLAGSPAIKKGILQTVKVVDELVKVMGRHKPENIVIEMARENQTTQKGQKNSRERMKRIEEGIKELGSQILKEHPVENTQLQNEKLYLYYLQNGRDMYVDQELDINRLSDYDVDHIVPQSFLKDDSIDNKVLTRSDKARGKSDNVPSEEVVKKMKNYWRQLLNAKLITQRKFDNLTKAERGGLSELDKAGFIKRQLVETRQITKHVAQILDSRMNTKYDENDKLIREVKVITLKSKLVSDFRKDFQFYKVREINNYHHAHDAYLNAVVGTALIKKYPKLESEFVYGDYKVYDVRKMIAKSEQEIGKATAKYFFYSNIMNFFKTEITLANGEIRKRPLIETNGETGEIVWDKGRDFATVRKVLSMPQVNIVKKTEVQTGGFSKESILPKRNSDKLIARKKDWDPKKYGGFDSPTVAYSVLVVAKVEKGKSKKLKSVKELLGITIMERSSFEKNPIDFLEAKGYKEVKKDLIIKLPKYSLFELENGRKRMLASAGELQKGNELALPSKYVNFLYLASHYEKLKGSPEDNEQKQLFVEQHKHYLDEIIEQISEFSKRVILADANLDKVLSAYNKHRDKPIREQAENIIHLFTLTNLGAPAAFKYFDTTIDRKRYTSTKEVLDATLIHQSITGLYETRIDLSQLGGDGGGGGGSGGGGSGGGGSGGGGSGGTLNIEDEYRLHETSKEPDVSLGSTWLSDFPQAWAETGGMGLAVRQAPLIIPLKATSTPVSIKQYPMSQEARLGIKPHIQRLLDQGILVPCQSPWNTPLLPVKKPGTNDYRPVQDLREVNKRVEDIHPTVPNPYNLLSGLPPSHQWYTVLDLKDAFFCLRLHPTSQPLFAFEWRDPEMGISGQLTWTRLPQGFKNSPTLFNEALHRDLADFRIQHPDLILLQYVDDLLLAATSELDCQQGTRALLQTLGNLGYRASAKKAQICQKQVKYLGYLLKEGQRWLTEARKETVMGQPTPKTPRQLREFLGKAGFCRLFIPGFAEMAAPLYPLTKPGTLFNWGPDQQKAYQEIKQALLTAPALGLPDLTKPFELFVDEKQGYAKGVLTQKLGPWRRPVAYLSKKLDPVAAGWPPCLRMVAAIAVLTKDAGKLTMGQPLVILAPHAVEALVKQPPDRWLSNARMTHYQALLLDTDRVQFGPVVALNPATLLPLPEEGLQHNCLDILAEAHGTRPDLTDQPLPDADHTWYTDGSSLLQEGQRKAGAAVTTETEVIWAKALPAGTSAQRAELIALTQALKMAEGKKLNVYTDSRYAFATAHIHGEIYRRRGWLTSEGKEIKNKDEILALLKALFLPKRLSIIHCPGHQKGHSAEARGNRMADQAARKAAITETPDTSTLLIENSSPSGGSKRTADGSEFEAGKRTADGSEFEKRTADGSEFESPKKKAKVE

SEQ ID NO: 2616 - protein, 2114 aa, synthetic construct
MPAAKRVKLDGGDKKYSIGLDIGTNSVGWAVITDEYKVPSKKFKVLGNTDRHSIKKNLIGALLFDSGETAEATRLKRTARRRYTRRKNRICYLQEIFSNEMAKVDDSFFHRLEESFLVEEDKKHERHPIFGNIVDEVAYHEKYPTIYHLRKKLVDSTDKADLRLIYLALAHMIKFRGHFLIEGDLNPDNSDVDKLFIQLVQTYNQLFEENPINASGVDAKAILSARLSKSRRLENLIAQLPGEKKNGLFGNLIALSLGLTPNFKSNFDLAEDAKLQLSKDTYDDDLDNLLAQIGDQYADLFLAAKNLSDAILLSDILRVNTEITKAPLSASMIKRYDEHHQDLTLLKALVRQQLPEKYKEIFFDQSKNGYAGYIDGGASQEEFYKFIKPILEKMDGTEELLVKLNREDLLRKQRTFDNGSIPHQIHLGELHAILRRQEDFYPFLKDNREKIEKILTFRIPYYVGPLARGNSRFAWMTRKSEETITPWNFEEVVDKGASAQSFIERMTNFDKNLPNEKVLPKHSLLYEYFTVYNELTKVKYVTEGMRKPAFLSGEQKKAIVDLLFKTNRKVTVKQLKEDYFKKIECFDSVEISGVEDRFNASLGTYHDLLKIIKDKDFLDNEENEDILEDIVLTLTLFEDREMIEERLKTYAHLFDDKVMKQLKRRRYTGWGRLSRKLINGIRDKQSGKTILDFLKSDGFANRNFMQLIHDDSLTFKEDIQKAQVSGQGDSLHEHIANLAGSPAIKKGILQTVKVVDELVKVMGRHKPENIVIEMARENQTTQKGQKNSRERMKRIEEGIKELGSQILKEHPVENTQLQNEKLYLYYLQNGRDMYVDQELDINRLSDYDVDHIVPQSFLKDDSIDNKVLTRSDKARGKSDNVPSEEVVKKMKNYWRQLLNAKLITQRKFDNLTKAERGGLSELDKAGFIKRQLVETRQITKHVAQILDSRMNTKYDENDKLIREVKVITLKSKLVSDFRKDFQFYKVREINNYHHAHDAYLNAVVGTALIKKYPKLESEFVYGDYKVYDVRKMIAKSEQEIGKATAKYFFYSNIMNFFKTEITLANGEIRKRPLIETNGETGEIVWDKGRDFATVRKVLSMPQVNIVKKTEVQTGGFSKESILPKRNSDKLIARKKDWDPKKYGGFDSPTVAYSVLVVAKVEKGKSKKLKSVKELLGITIMERSSFEKNPIDFLEAKGYKEVKKDLIIKLPKYSLFELENGRKRMLASAGELQKGNELALPSKYVNFLYLASHYEKLKGSPEDNEQKQLFVEQHKHYLDEIIEQISEFSKRVILADANLDKVLSAYNKHRDKPIREQAENIIHLFTLTNLGAPAAFKYFDTTIDRKRYTSTKEVLDATLIHQSITGLYETRIDLSQLGGDGGPAPGSSGGGGGTLNIEDEYRLHETSKEPDVSLGSTWLSDFPQAWAETGGMGLAVRQAPLIIPLKATSTPVSIKQYPMSQEARLGIKPHIQRLLDQGILVPCQSPWNTPLLPVKKPGTNDYRPVQDLREVNKRVEDIHPTVPNPYNLLSGLPPSHQWYTVLDLKDAFFCLRLHPTSQPLFAFEWRDPEMGISGQLTWTRLPQGFKNSPTLFNEALHRDLADFRIQHPDLILLQYVDDLLLAATSELDCQQGTRALLQTLGNLGYRASAKKAQICQKQVKYLGYLLKEGQRWLTEARKETVMGQPTPKTPRQLREFLGKAGFCRLFIPGFAEMAAPLYPLTKPGTLFNWGPDQQKAYQEIKQALLTAPALGLPDLTKPFELFVDEKQGYAKGVLTQKLGPWRRPVAYLSKKLDPVAAGWPPCLRMVAAIAVLTKDAGKLTMGQPLVILAPHAVEALVKQPPDRWLSNARMTHYQALLLDTDRVQFGPVVALNPATLLPLPEEGLQHNCLDILAEAHGTRPDLTDQPLPDADHTWYTDGSSLLQEGQRKAGAAVTTETEVIWAKALPAGTSAQRAELIALTQALKMAEGKKLNVYTDSRYAFATAHIHGEIYRRRGWLTSEGKEIKNKDEILALLKALFLPKRLSIIHCPGHQKGHSAEARGNRMADQAARKAAITETPDTSTLLIENSSPSGGSKRTADGSEFEAGKRTADGSEFEKRTADGSEFESPKKKAKVE

SEQ ID NO: 2617 - protein, 2114 aa, synthetic construct
MPAAKRVKLDGGDKKYSIGLDIGTNSVGWAVITDEYKVPSKKFKVLGNTDRHSIKKNLIGALLFDSGETAEATRLKRTARRRYTRRKNRICYLQEIFSNEMAKVDDSFFHRLEESFLVEEDKKHERHPIFGNIVDEVAYHEKYPTIYHLRKKLVDSTDKADLRLIYLALAHMIKFRGHFLIEGDLNPDNSDVDKLFIQLVQTYNQLFEENPINASGVDAKAILSARLSKSRRLENLIAQLPGEKKNGLFGNLIALSLGLTPNFKSNFDLAEDAKLQLSKDTYDDDLDNLLAQIGDQYADLFLAAKNLSDAILLSDILRVNTEITKAPLSASMIKRYDEHHQDLTLLKALVRQQLPEKYKEIFFDQSKNGYAGYIDGGASQEEFYKFIKPILEKMDGTEELLVKLNREDLLRKQRTFDNGSIPHQIHLGELHAILRRQEDFYPFLKDNREKIEKILTFRIPYYVGPLARGNSRFAWMTRKSEETITPWNFEEVVDKGASAQSFIERMTNFDKNLPNEKVLPKHSLLYEYFTVYNELTKVKYVTEGMRKPAFLSGEQKKAIVDLLFKTNRKVTVKQLKEDYFKKIECFDSVEISGVEDRFNASLGTYHDLLKIIKDKDFLDNEENEDILEDIVLTLTLFEDREMIEERLKTYAHLFDDKVMKQLKRRRYTGWGRLSRKLINGIRDKQSGKTILDFLKSDGFANRNFMQLIHDDSLTFKEDIQKAQVSGQGDSLHEHIANLAGSPAIKKGILQTVKVVDELVKVMGRHKPENIVIEMARENQTTQKGQKNSRERMKRIEEGIKELGSQILKEHPVENTQLQNEKLYLYYLQNGRDMYVDQELDINRLSDYDVDHIVPQSFLKDDSIDNKVLTRSDKARGKSDNVPSEEVVKKMKNYWRQLLNAKLITQRKFDNLTKAERGGLSELDKAGFIKRQLVETRQITKHVAQILDSRMNTKYDENDKLIREVKVITLKSKLVSDFRKDFQFYKVREINNYHHAHDAYLNAVVGTALIKKYPKLESEFVYGDYKVYDVRKMIAKSEQEIGKATAKYFFYSNIMNFFKTEITLANGEIRKRPLIETNGETGEIVWDKGRDFATVRKVLSMPQVNIVKKTEVQTGGFSKESILPKRNSDKLIARKKDWDPKKYGGFDSPTVAYSVLVVAKVEKGKSKKLKSVKELLGITIMERSSFEKNPIDFLEAKGYKEVKKDLIIKLPKYSLFELENGRKRMLASAGELQKGNELALPSKYVNFLYLASHYEKLKGSPEDNEQKQLFVEQHKHYLDEIIEQISEFSKRVILADANLDKVLSAYNKHRDKPIREQAENIIHLFTLTNLGAPAAFKYFDTTIDRKRYTSTKEVLDATLIHQSITGLYETRIDLSQLGGDGGGSSGGGGGSGGTLNIEDEYRLHETSKEPDVSLGSTWLSDFPQAWAETGGMGLAVRQAPLIIPLKATSTPVSIKQYPMSQEARLGIKPHIQRLLDQGILVPCQSPWNTPLLPVKKPGTNDYRPVQDLREVNKRVEDIHPTVPNPYNLLSGLPPSHQWYTVLDLKDAFFCLRLHPTSQPLFAFEWRDPEMGISGQLTWTRLPQGFKNSPTLFNEALHRDLADFRIQHPDLILLQYVDDLLLAATSELDCQQGTRALLQTLGNLGYRASAKKAQICQKQVKYLGYLLKEGQRWLTEARKETVMGQPTPKTPRQLREFLGKAGFCRLFIPGFAEMAAPLYPLTKPGTLFNWGPDQQKAYQEIKQALLTAPALGLPDLTKPFELFVDEKQGYAKGVLTQKLGPWRRPVAYLSKKLDPVAAGWPPCLRMVAAIAVLTKDAGKLTMGQPLVILAPHAVEALVKQPPDRWLSNARMTHYQALLLDTDRVQFGPVVALNPATLLPLPEEGLQHNCLDILAEAHGTRPDLTDQPLPDADHTWYTDGSSLLQEGQRKAGAAVTTETEVIWAKALPAGTSAQRAELIALTQALKMAEGKKLNVYTDSRYAFATAHIHGEIYRRRGWLTSEGKEIKNKDEILALLKALFLPKRLSIIHCPGHQKGHSAEARGNRMADQAARKAAITETPDTSTLLIENSSPSGGSKRTADGSEFEAGKRTADGSEFEKRTADGSEFESPKKKAKVE

SEQ ID NO: 2618 - protein, 2114 aa, synthetic construct
MPAAKRVKLDGGDKKYSIGLDIGTNSVGWAVITDEYKVPSKKFKVLGNTDRHSIKKNLIGALLFDSGETAEATRLKRTARRRYTRRKNRICYLQEIFSNEMAKVDDSFFHRLEESFLVEEDKKHERHPIFGNIVDEVAYHEKYPTIYHLRKKLVDSTDKADLRLIYLALAHMIKFRGHFLIEGDLNPDNSDVDKLFIQLVQTYNQLFEENPINASGVDAKAILSARLSKSRRLENLIAQLPGEKKNGLFGNLIALSLGLTPNFKSNFDLAEDAKLQLSKDTYDDDLDNLLAQIGDQYADLFLAAKNLSDAILLSDILRVNTEITKAPLSASMIKRYDEHHQDLTLLKALVRQQLPEKYKEIFFDQSKNGYAGYIDGGASQEEFYKFIKPILEKMDGTEELLVKLNREDLLRKQRTFDNGSIPHQIHLGELHAILRRQEDFYPFLKDNREKIEKILTFRIPYYVGPLARGNSRFAWMTRKSEETITPWNFEEVVDKGASAQSFIERMTNFDKNLPNEKVLPKHSLLYEYFTVYNELTKVKYVTEGMRKPAFLSGEQKKAIVDLLFKTNRKVTVKQLKEDYFKKIECFDSVEISGVEDRFNASLGTYHDLLKIIKDKDFLDNEENEDILEDIVLTLTLFEDREMIEERLKTYAHLFDDKVMKQLKRRRYTGWGRLSRKLINGIRDKQSGKTILDFLKSDGFANRNFMQLIHDDSLTFKEDIQKAQVSGQGDSLHEHIANLAGSPAIKKGILQTVKVVDELVKVMGRHKPENIVIEMARENQTTQKGQKNSRERMKRIEEGIKELGSQILKEHPVENTQLQNEKLYLYYLQNGRDMYVDQELDINRLSDYDVDHIVPQSFLKDDSIDNKVLTRSDKARGKSDNVPSEEVVKKMKNYWRQLLNAKLITQRKFDNLTKAERGGLSELDKAGFIKRQLVETRQITKHVAQILDSRMNTKYDENDKLIREVKVITLKSKLVSDFRKDFQFYKVREINNYHHAHDAYLNAVVGTALIKKYPKLESEFVYGDYKVYDVRKMIAKSEQEIGKATAKYFFYSNIMNFFKTEITLANGEIRKRPLIETNGETGEIVWDKGRDFATVRKVLSMPQVNIVKKTEVQTGGFSKESILPKRNSDKLIARKKDWDPKKYGGFDSPTVAYSVLVVAKVEKGKSKKLKSVKELLGITIMERSSFEKNPIDFLEAKGYKEVKKDLIIKLPKYSLFELENGRKRMLASAGELQKGNELALPSKYVNFLYLASHYEKLKGSPEDNEQKQLFVEQHKHYLDEIIEQISEFSKRVILADANLDKVLSAYNKHRDKPIREQAENIIHLFTLTNLGAPAAFKYFDTTIDRKRYTSTKEVLDATLIHQSITGLYETRIDLSQLGGDGGGGGPAPGGSGGTLNIEDEYRLHETSKEPDVSLGSTWLSDFPQAWAETGGMGLAVRQAPLIIPLKATSTPVSIKQYPMSQEARLGIKPHIQRLLDQGILVPCQSPWNTPLLPVKKPGTNDYRPVQDLREVNKRVEDIHPTVPNPYNLLSGLPPSHQWYTVLDLKDAFFCLRLHPTSQPLFAFEWRDPEMGISGQLTWTRLPQGFKNSPTLFNEALHRDLADFRIQHPDLILLQYVDDLLLAATSELDCQQGTRALLQTLGNLGYRASAKKAQICQKQVKYLGYLLKEGQRWLTEARKETVMGQPTPKTPRQLREFLGKAGFCRLFIPGFAEMAAPLYPLTKPGTLFNWGPDQQKAYQEIKQALLTAPALGLPDLTKPFELFVDEKQGYAKGVLTQKLGPWRRPVAYLSKKLDPVAAGWPPCLRMVAAIAVLTKDAGKLTMGQPLVILAPHAVEALVKQPPDRWLSNARMTHYQALLLDTDRVQFGPVVALNPATLLPLPEEGLQHNCLDILAEAHGTRPDLTDQPLPDADHTWYTDGSSLLQEGQRKAGAAVTTETEVIWAKALPAGTSAQRAELIALTQALKMAEGKKLNVYTDSRYAFATAHIHGEIYRRRGWLTSEGKEIKNKDEILALLKALFLPKRLSIIHCPGHQKGHSAEARGNRMADQAARKAAITETPDTSTLLIENSSPSGGSKRTADGSEFEAGKRTADGSEFEKRTADGSEFESPKKKAKVE

SEQ ID NO: 2619 - protein, 2116 aa, synthetic construct
MPAAKRVKLDGGDKKYSIGLDIGTNSVGWAVITDEYKVPSKKFKVLGNTDRHSIKKNLIGALLFDSGETAEATRLKRTARRRYTRRKNRICYLQEIFSNEMAKVDDSFFHRLEESFLVEEDKKHERHPIFGNIVDEVAYHEKYPTIYHLRKKLVDSTDKADLRLIYLALAHMIKFRGHFLIEGDLNPDNSDVDKLFIQLVQTYNQLFEENPINASGVDAKAILSARLSKSRRLENLIAQLPGEKKNGLFGNLIALSLGLTPNFKSNFDLAEDAKLQLSKDTYDDDLDNLLAQIGDQYADLFLAAKNLSDAILLSDILRVNTEITKAPLSASMIKRYDEHHQDLTLLKALVRQQLPEKYKEIFFDQSKNGYAGYIDGGASQEEFYKFIKPILEKMDGTEELLVKLNREDLLRKQRTFDNGSIPHQIHLGELHAILRRQEDFYPFLKDNREKIEKILTFRIPYYVGPLARGNSRFAWMTRKSEETITPWNFEEVVDKGASAQSFIERMTNFDKNLPNEKVLPKHSLLYEYFTVYNELTKVKYVTEGMRKPAFLSGEQKKAIVDLLFKTNRKVTVKQLKEDYFKKIECFDSVEISGVEDRFNASLGTYHDLLKIIKDKDFLDNEENEDILEDIVLTLTLFEDREMIEERLKTYAHLFDDKVMKQLKRRRYTGWGRLSRKLINGIRDKQSGKTILDFLKSDGFANRNFMQLIHDDSLTFKEDIQKAQVSGQGDSLHEHIANLAGSPAIKKGILQTVKVVDELVKVMGRHKPENIVIEMARENQTTQKGQKNSRERMKRIEEGIKELGSQILKEHPVENTQLQNEKLYLYYLQNGRDMYVDQELDINRLSDYDVDHIVPQSFLKDDSIDNKVLTRSDKARGKSDNVPSEEVVKKMKNYWRQLLNAKLITQRKFDNLTKAERGGLSELDKAGFIKRQLVETRQITKHVAQILDSRMNTKYDENDKLIREVKVITLKSKLVSDFRKDFQFYKVREINNYHHAHDAYLNAVVGTALIKKYPKLESEFVYGDYKVYDVRKMIAKSEQEIGKATAKYFFYSNIMNFFKTEITLANGEIRKRPLIETNGETGEIVWDKGRDFATVRKVLSMPQVNIVKKTEVQTGGFSKESILPKRNSDKLIARKKDWDPKKYGGFDSPTVAYSVLVVAKVEKGKSKKLKSVKELLGITIMERSSFEKNPIDFLEAKGYKEVKKDLIIKLPKYSLFELENGRKRMLASAGELQKGNELALPSKYVNFLYLASHYEKLKGSPEDNEQKQLFVEQHKHYLDEIIEQISEFSKRVILADANLDKVLSAYNKHRDKPIREQAENIIHLFTLTNLGAPAAFKYFDTTIDRKRYTSTKEVLDATLIHQSITGLYETRIDLSQLGGDGGPAPAPAPAPAPGGTLNIEDEYRLHETSKEPDVSLGSTWLSDFPQAWAETGGMGLAVRQAPLIIPLKATSTPVSIKQYPMSQEARLGIKPHIQRLLDQGILVPCQSPWNTPLLPVKKPGTNDYRPVQDLREVNKRVEDIHPTVPNPYNLLSGLPPSHQWYTVLDLKDAFFCLRLHPTSQPLFAFEWRDPEMGISGQLTWTRLPQGFKNSPTLFNEALHRDLADFRIQHPDLILLQYVDDLLLAATSELDCQQGTRALLQTLGNLGYRASAKKAQICQKQVKYLGYLLKEGQRWLTEARKETVMGQPTPKTPRQLREFLGKAGFCRLFIPGFAEMAAPLYPLTKPGTLFNWGPDQQKAYQEIKQALLTAPALGLPDLTKPFELFVDEKQGYAKGVLTQKLGPWRRPVAYLSKKLDPVAAGWPPCLRMVAAIAVLTKDAGKLTMGQPLVILAPHAVEALVKQPPDRWLSNARMTHYQALLLDTDRVQFGPVVALNPATLLPLPEEGLQHNCLDILAEAHGTRPDLTDQPLPDADHTWYTDGSSLLQEGQRKAGAAVTTETEVIWAKALPAGTSAQRAELIALTQALKMAEGKKLNVYTDSRYAFATAHIHGEIYRRRGWLTSEGKEIKNKDEILALLKALFLPKRLSIIHCPGHQKGHSAEARGNRMADQAARKAAITETPDTSTLLIENSSPSGGSKRTADGSEFEAGKRTADGSEFEKRTADGSEFESPKKKAKVE

SEQ ID NO: 2620 - protein, 2110 aa, synthetic construct
MPAAKRVKLDGGDKKYSIGLDIGTNSVGWAVITDEYKVPSKKFKVLGNTDRHSIKKNLIGALLFDSGETAEATRLKRTARRRYTRRKNRICYLQEIFSNEMAKVDDSFFHRLEESFLVEEDKKHERHPIFGNIVDEVAYHEKYPTIYHLRKKLVDSTDKADLRLIYLALAHMIKFRGHFLIEGDLNPDNSDVDKLFIQLVQTYNQLFEENPINASGVDAKAILSARLSKSRRLENLIAQLPGEKKNGLFGNLIALSLGLTPNFKSNFDLAEDAKLQLSKDTYDDDLDNLLAQIGDQYADLFLAAKNLSDAILLSDILRVNTEITKAPLSASMIKRYDEHHQDLTLLKALVRQQLPEKYKEIFFDQSKNGYAGYIDGGASQEEFYKFIKPILEKMDGTEELLVKLNREDLLRKQRTFDNGSIPHQIHLGELHAILRRQEDFYPFLKDNREKIEKILTFRIPYYVGPLARGNSRFAWMTRKSEETITPWNFEEVVDKGASAQSFIERMTNFDKNLPNEKVLPKHSLLYEYFTVYNELTKVKYVTEGMRKPAFLSGEQKKAIVDLLFKTNRKVTVKQLKEDYFKKIECFDSVEISGVEDRFNASLGTYHDLLKIIKDKDFLDNEENEDILEDIVLTLTLFEDREMIEERLKTYAHLFDDKVMKQLKRRRYTGWGRLSRKLINGIRDKQSGKTILDFLKSDGFANRNFMQLIHDDSLTFKEDIQKAQVSGQGDSLHEHIANLAGSPAIKKGILQTVKVVDELVKVMGRHKPENIVIEMARENQTTQKGQKNSRERMKRIEEGIKELGSQILKEHPVENTQLQNEKLYLYYLQNGRDMYVDQELDINRLSDYDVDHIVPQSFLKDDSIDNKVLTRSDKARGKSDNVPSEEVVKKMKNYWRQLLNAKLITQRKFDNLTKAERGGLSELDKAGFIKRQLVETRQITKHVAQILDSRMNTKYDENDKLIREVKVITLKSKLVSDFRKDFQFYKVREINNYHHAHDAYLNAVVGTALIKKYPKLESEFVYGDYKVYDVRKMIAKSEQEIGKATAKYFFYSNIMNFFKTEITLANGEIRKRPLIETNGETGEIVWDKGRDFATVRKVLSMPQVNIVKKTEVQTGGFSKESILPKRNSDKLIARKKDWDPKKYGGFDSPTVAYSVLVVAKVEKGKSKKLKSVKELLGITIMERSSFEKNPIDFLEAKGYKEVKKDLIIKLPKYSLFELENGRKRMLASAGELQKGNELALPSKYVNFLYLASHYEKLKGSPEDNEQKQLFVEQHKHYLDEIIEQISEFSKRVILADANLDKVLSAYNKHRDKPIREQAENIIHLFTLTNLGAPAAFKYFDTTIDRKRYTSTKEVLDATLIHQSITGLYETRIDLSQLGGDGGEAAAKGGTLNIEDEYRLHETSKEPDVSLGSTWLSDFPQAWAETGGMGLAVRQAPLIIPLKATSTPVSIKQYPMSQEARLGIKPHIQRLLDQGILVPCQSPWNTPLLPVKKPGTNDYRPVQDLREVNKRVEDIHPTVPNPYNLLSGLPPSHQWYTVLDLKDAFFCLRLHPTSQPLFAFEWRDPEMGISGQLTWTRLPQGFKNSPTLFNEALHRDLADFRIQHPDLILLQYVDDLLLAATSELDCQQGTRALLQTLGNLGYRASAKKAQICQKQVKYLGYLLKEGQRWLTEARKETVMGQPTPKTPRQLREFLGKAGFCRLFIPGFAEMAAPLYPLTKPGTLFNWGPDQQKAYQEIKQALLTAPALGLPDLTKPFELFVDEKQGYAKGVLTQKLGPWRRPVAYLSKKLDPVAAGWPPCLRMVAAIAVLTKDAGKLTMGQPLVILAPHAVEALVKQPPDRWLSNARMTHYQALLLDTDRVQFGPVVALNPATLLPLPEEGLQHNCLDILAEAHGTRPDLTDQPLPDADHTWYTDGSSLLQEGQRKAGAAVTTETEVIWAKALPAGTSAQRAELIALTQALKMAEGKKLNVYTDSRYAFATAHIHGEIYRRRGWLTSEGKEIKNKDEILALLKALFLPKRLSIIHCPGHQKGHSAEARGNRMADQAARKAAITETPDTSTLLIENSSPSGGSKRTADGSEFEAGKRTADGSEFEKRTADGSEFESPKKKAKVE

SEQ ID NO: 2621 - protein, 2111 aa, synthetic construct
MPAAKRVKLDGGDKKYSIGLDIGTNSVGWAVITDEYKVPSKKFKVLGNTDRHSIKKNLIGALLFDSGETAEATRLKRTARRRYTRRKNRICYLQEIFSNEMAKVDDSFFHRLEESFLVEEDKKHERHPIFGNIVDEVAYHEKYPTIYHLRKKLVDSTDKADLRLIYLALAHMIKFRGHFLIEGDLNPDNSDVDKLFIQLVQTYNQLFEENPINASGVDAKAILSARLSKSRRLENLIAQLPGEKKNGLFGNLIALSLGLTPNFKSNFDLAEDAKLQLSKDTYDDDLDNLLAQIGDQYADLFLAAKNLSDAILLSDILRVNTEITKAPLSASMIKRYDEHHQDLTLLKALVRQQLPEKYKEIFFDQSKNGYAGYIDGGASQEEFYKFIKPILEKMDGTEELLVKLNREDLLRKQRTFDNGSIPHQIHLGELHAILRRQEDFYPFLKDNREKIEKILTFRIPYYVGPLARGNSRFAWMTRKSEETITPWNFEEVVDKGASAQSFIERMTNFDKNLPNEKVLPKHSLLYEYFTVYNELTKVKYVTEGMRKPAFLSGEQKKAIVDLLFKTNRKVTVKQLKEDYFKKIECFDSVEISGVEDRFNASLGTYHDLLKIIKDKDFLDNEENEDILEDIVLTLTLFEDREMIEERLKTYAHLFDDKVMKQLKRRRYTGWGRLSRKLINGIRDKQSGKTILDFLKSDGFANRNFMQLIHDDSLTFKEDIQKAQVSGQGDSLHEHIANLAGSPAIKKGILQTVKVVDELVKVMGRHKPENIVIEMARENQTTQKGQKNSRERMKRIEEGIKELGSQILKEHPVENTQLQNEKLYLYYLQNGRDMYVDQELDINRLSDYDVDHIVPQSFLKDDSIDNKVLTRSDKARGKSDNVPSEEVVKKMKNYWRQLLNAKLITQRKFDNLTKAERGGLSELDKAGFIKRQLVETRQITKHVAQILDSRMNTKYDENDKLIREVKVITLKSKLVSDFRKDFQFYKVREINNYHHAHDAYLNAVVGTALIKKYPKLESEFVYGDYKVYDVRKMIAKSEQEIGKATAKYFFYSNIMNFFKTEITLANGEIRKRPLIETNGETGEIVWDKGRDFATVRKVLSMPQVNIVKKTEVQTGGFSKESILPKRNSDKLIARKKDWDPKKYGGFDSPTVAYSVLVVAKVEKGKSKKLKSVKELLGITIMERSSFEKNPIDFLEAKGYKEVKKDLIIKLPKYSLFELENGRKRMLASAGELQKGNELALPSKYVNFLYLASHYEKLKGSPEDNEQKQLFVEQHKHYLDEIIEQISEFSKRVILADANLDKVLSAYNKHRDKPIREQAENIIHLFTLTNLGAPAAFKYFDTTIDRKRYTSTKEVLDATLIHQSITGLYETRIDLSQLGGDGGGGGGSSGGTLNIEDEYRLHETSKEPDVSLGSTWLSDFPQAWAETGGMGLAVRQAPLIIPLKATSTPVSIKQYPMSQEARLGIKPHIQRLLDQGILVPCQSPWNTPLLPVKKPGTNDYRPVQDLREVNKRVEDIHPTVPNPYNLLSGLPPSHQWYTVLDLKDAFFCLRLHPTSQPLFAFEWRDPEMGISGQLTWTRLPQGFKNSPTLFNEALHRDLADFRIQHPDLILLQYVDDLLLAATSELDCQQGTRALLQTLGNLGYRASAKKAQICQKQVKYLGYLLKEGQRWLTEARKETVMGQPTPKTPRQLREFLGKAGFCRLFIPGFAEMAAPLYPLTKPGTLFNWGPDQQKAYQEIKQALLTAPALGLPDLTKPFELFVDEKQGYAKGVLTQKLGPWRRPVAYLSKKLDPVAAGWPPCLRMVAAIAVLTKDAGKLTMGQPLVILAPHAVEALVKQPPDRWLSNARMTHYQALLLDTDRVQFGPVVALNPATLLPLPEEGLQHNCLDILAEAHGTRPDLTDQPLPDADHTWYTDGSSLLQEGQRKAGAAVTTETEVIWAKALPAGTSAQRAELIALTQALKMAEGKKLNVYTDSRYAFATAHIHGEIYRRRGWLTSEGKEIKNKDEILALLKALFLPKRLSIIHCPGHQKGHSAEARGNRMADQAARKAAITETPDTSTLLIENSSPSGGSKRTADGSEFEAGKRTADGSEFEKRTADGSEFESPKKKAKVE

SEQ ID NO: 2622 - protein, 2114 aa, synthetic construct
MPAAKRVKLDGGDKKYSIGLDIGTNSVGWAVITDEYKVPSKKFKVLGNTDRHSIKKNLIGALLFDSGETAEATRLKRTARRRYTRRKNRICYLQEIFSNEMAKVDDSFFHRLEESFLVEEDKKHERHPIFGNIVDEVAYHEKYPTIYHLRKKLVDSTDKADLRLIYLALAHMIKFRGHFLIEGDLNPDNSDVDKLFIQLVQTYNQLFEENPINASGVDAKAILSARLSKSRRLENLIAQLPGEKKNGLFGNLIALSLGLTPNFKSNFDLAEDAKLQLSKDTYDDDLDNLLAQIGDQYADLFLAAKNLSDAILLSDILRVNTEITKAPLSASMIKRYDEHHQDLTLLKALVRQQLPEKYKEIFFDQSKNGYAGYIDGGASQEEFYKFIKPILEKMDGTEELLVKLNREDLLRKQRTFDNGSIPHQIHLGELHAILRRQEDFYPFLKDNREKIEKILTFRIPYYVGPLARGNSRFAWMTRKSEETITPWNFEEVVDKGASAQSFIERMTNFDKNLPNEKVLPKHSLLYEYFTVYNELTKVKYVTEGMRKPAFLSGEQKKAIVDLLFKTNRKVTVKQLKEDYFKKIECFDSVEISGVEDRFNASLGTYHDLLKIIKDKDFLDNEENEDILEDIVLTLTLFEDREMIEERLKTYAHLFDDKVMKQLKRRRYTGWGRLSRKLINGIRDKQSGKTILDFLKSDGFANRNFMQLIHDDSLTFKEDIQKAQVSGQGDSLHEHIANLAGSPAIKKGILQTVKVVDELVKVMGRHKPENIVIEMARENQTTQKGQKNSRERMKRIEEGIKELGSQILKEHPVENTQLQNEKLYLYYLQNGRDMYVDQELDINRLSDYDVDHIVPQSFLKDDSIDNKVLTRSDKARGKSDNVPSEEVVKKMKNYWRQLLNAKLITQRKFDNLTKAERGGLSELDKAGFIKRQLVETRQITKHVAQILDSRMNTKYDENDKLIREVKVITLKSKLVSDFRKDFQFYKVREINNYHHAHDAYLNAVVGTALIKKYPKLESEFVYGDYKVYDVRKMIAKSEQEIGKATAKYFFYSNIMNFFKTEITLANGEIRKRPLIETNGETGEIVWDKGRDFATVRKVLSMPQVNIVKKTEVQTGGFSKESILPKRNSDKLIARKKDWDPKKYGGFDSPTVAYSVLVVAKVEKGKSKKLKSVKELLGITIMERSSFEKNPIDFLEAKGYKEVKKDLIIKLPKYSLFELENGRKRMLASAGELQKGNELALPSKYVNFLYLASHYEKLKGSPEDNEQKQLFVEQHKHYLDEIIEQISEFSKRVILADANLDKVLSAYNKHRDKPIREQAENIIHLFTLTNLGAPAAFKYFDTTIDRKRYTSTKEVLDATLIHQSITGLYETRIDLSQLGGDGGGGSGGGPAPGGTLNIEDEYRLHETSKEPDVSLGSTWLSDFPQAWAETGGMGLAVRQAPLIIPLKATSTPVSIKQYPMSQEARLGIKPHIQRLLDQGILVPCQSPWNTPLLPVKKPGTNDYRPVQDLREVNKRVEDIHPTVPNPYNLLSGLPPSHQWYTVLDLKDAFFCLRLHPTSQPLFAFEWRDPEMGISGQLTWTRLPQGFKNSPTLFNEALHRDLADFRIQHPDLILLQYVDDLLLAATSELDCQQGTRALLQTLGNLGYRASAKKAQICQKQVKYLGYLLKEGQRWLTEARKETVMGQPTPKTPRQLREFLGKAGFCRLFIPGFAEMAAPLYPLTKPGTLFNWGPDQQKAYQEIKQALLTAPALGLPDLTKPFELFVDEKQGYAKGVLTQKLGPWRRPVAYLSKKLDPVAAGWPPCLRMVAAIAVLTKDAGKLTMGQPLVILAPHAVEALVKQPPDRWLSNARMTHYQALLLDTDRVQFGPVVALNPATLLPLPEEGLQHNCLDILAEAHGTRPDLTDQPLPDADHTWYTDGSSLLQEGQRKAGAAVTTETEVIWAKALPAGTSAQRAELIALTQALKMAEGKKLNVYTDSRYAFATAHIHGEIYRRRGWLTSEGKEIKNKDEILALLKALFLPKRLSIIHCPGHQKGHSAEARGNRMADQAARKAAITETPDTSTLLIENSSPSGGSKRTADGSEFEAGKRTADGSEFEKRTADGSEFESPKKKAKVE

SEQ ID NO: 2623 - protein, 2120 aa, synthetic construct
MPAAKRVKLDGGDKKYSIGLDIGTNSVGWAVITDEYKVPSKKFKVLGNTDRHSIKKNLIGALLFDSGETAEATRLKRTARRRYTRRKNRICYLQEIFSNEMAKVDDSFFHRLEESFLVEEDKKHERHPIFGNIVDEVAYHEKYPTIYHLRKKLVDSTDKADLRLIYLALAHMIKFRGHFLIEGDLNPDNSDVDKLFIQLVQTYNQLFEENPINASGVDAKAILSARLSKSRRLENLIAQLPGEKKNGLFGNLIALSLGLTPNFKSNFDLAEDAKLQLSKDTYDDDLDNLLAQIGDQYADLFLAAKNLSDAILLSDILRVNTEITKAPLSASMIKRYDEHHQDLTLLKALVRQQLPEKYKEIFFDQSKNGYAGYIDGGASQEEFYKFIKPILEKMDGTEELLVKLNREDLLRKQRTFDNGSIPHQIHLGELHAILRRQEDFYPFLKDNREKIEKILTFRIPYYVGPLARGNSRFAWMTRKSEETITPWNFEEVVDKGASAQSFIERMTNFDKNLPNEKVLPKHSLLYEYFTVYNELTKVKYVTEGMRKPAFLSGEQKKAIVDLLFKTNRKVTVKQLKEDYFKKIECFDSVEISGVEDRFNASLGTYHDLLKIIKDKDFLDNEENEDILEDIVLTLTLFEDREMIEERLKTYAHLFDDKVMKQLKRRRYTGWGRLSRKLINGIRDKQSGKTILDFLKSDGFANRNFMQLIHDDSLTFKEDIQKAQVSGQGDSLHEHIANLAGSPAIKKGILQTVKVVDELVKVMGRHKPENIVIEMARENQTTQKGQKNSRERMKRIEEGIKELGSQILKEHPVENTQLQNEKLYLYYLQNGRDMYVDQELDINRLSDYDVDHIVPQSFLKDDSIDNKVLTRSDKARGKSDNVPSEEVVKKMKNYWRQLLNAKLITQRKFDNLTKAERGGLSELDKAGFIKRQLVETRQITKHVAQILDSRMNTKYDENDKLIREVKVITLKSKLVSDFRKDFQFYKVREINNYHHAHDAYLNAVVGTALIKKYPKLESEFVYGDYKVYDVRKMIAKSEQEIGKATAKYFFYSNIMNFFKTEITLANGEIRKRPLIETNGETGEIVWDKGRDFATVRKVLSMPQVNIVKKTEVQTGGFSKESILPKRNSDKLIARKKDWDPKKYGGFDSPTVAYSVLVVAKVEKGKSKKLKSVKELLGITIMERSSFEKNPIDFLEAKGYKEVKKDLIIKLPKYSLFELENGRKRMLASAGELQKGNELALPSKYVNFLYLASHYEKLKGSPEDNEQKQLFVEQHKHYLDEIIEQISEFSKRVILADANLDKVLSAYNKHRDKPIREQAENIIHLFTLTNLGAPAAFKYFDTTIDRKRYTSTKEVLDATLIHQSITGLYETRIDLSQLGGDGGEAAAKGGGGSEAAAKGGTLNIEDEYRLHETSKEPDVSLGSTWLSDFPQAWAETGGMGLAVRQAPLIIPLKATSTPVSIKQYPMSQEARLGIKPHIQRLLDQGILVPCQSPWNTPLLPVKKPGTNDYRPVQDLREVNKRVEDIHPTVPNPYNLLSGLPPSHQWYTVLDLKDAFFCLRLHPTSQPLFAFEWRDPEMGISGQLTWTRLPQGFKNSPTLFNEALHRDLADFRIQHPDLILLQYVDDLLLAATSELDCQQGTRALLQTLGNLGYRASAKKAQICQKQVKYLGYLLKEGQRWLTEARKETVMGQPTPKTPRQLREFLGKAGFCRLFIPGFAEMAAPLYPLTKPGTLFNWGPDQQKAYQEIKQALLTAPALGLPDLTKPFELFVDEKQGYAKGVLTQKLGPWRRPVAYLSKKLDPVAAGWPPCLRMVAAIAVLTKDAGKLTMGQPLVILAPHAVEALVKQPPDRWLSNARMTHYQALLLDTDRVQFGPVVALNPATLLPLPEEGLQHNCLDILAEAHGTRPDLTDQPLPDADHTWYTDGSSLLQEGQRKAGAAVTTETEVIWAKALPAGTSAQRAELIALTQALKMAEGKKLNVYTDSRYAFATAHIHGEIYRRRGWLTSEGKEIKNKDEILALLKALFLPKRLSIIHCPGHQKGHSAEARGNRMADQAARKAAITETPDTSTLLIENSSPSGGSKRTADGSEFEAGKRTADGSEFEKRTADGSEFESPKKKAKVE

SEQ ID NO: 2624 - protein, 2108 aa, synthetic construct
MPAAKRVKLDGGDKKYSIGLDIGTNSVGWAVITDEYKVPSKKFKVLGNTDRHSIKKNLIGALLFDSGETAEATRLKRTARRRYTRRKNRICYLQEIFSNEMAKVDDSFFHRLEESFLVEEDKKHERHPIFGNIVDEVAYHEKYPTIYHLRKKLVDSTDKADLRLIYLALAHMIKFRGHFLIEGDLNPDNSDVDKLFIQLVQTYNQLFEENPINASGVDAKAILSARLSKSRRLENLIAQLPGEKKNGLFGNLIALSLGLTPNFKSNFDLAEDAKLQLSKDTYDDDLDNLLAQIGDQYADLFLAAKNLSDAILLSDILRVNTEITKAPLSASMIKRYDEHHQDLTLLKALVRQQLPEKYKEIFFDQSKNGYAGYIDGGASQEEFYKFIKPILEKMDGTEELLVKLNREDLLRKQRTFDNGSIPHQIHLGELHAILRRQEDFYPFLKDNREKIEKILTFRIPYYVGPLARGNSRFAWMTRKSEETITPWNFEEVVDKGASAQSFIERMTNFDKNLPNEKVLPKHSLLYEYFTVYNELTKVKYVTEGMRKPAFLSGEQKKAIVDLLFKTNRKVTVKQLKEDYFKKIECFDSVEISGVEDRFNASLGTYHDLLKIIKDKDFLDNEENEDILEDIVLTLTLFEDREMIEERLKTYAHLFDDKVMKQLKRRRYTGWGRLSRKLINGIRDKQSGKTILDFLKSDGFANRNFMQLIHDDSLTFKEDIQKAQVSGQGDSLHEHIANLAGSPAIKKGILQTVKVVDELVKVMGRHKPENIVIEMARENQTTQKGQKNSRERMKRIEEGIKELGSQILKEHPVENTQLQNEKLYLYYLQNGRDMYVDQELDINRLSDYDVDHIVPQSFLKDDSIDNKVLTRSDKARGKSDNVPSEEVVKKMKNYWRQLLNAKLITQRKFDNLTKAERGGLSELDKAGFIKRQLVETRQITKHVAQILDSRMNTKYDENDKLIREVKVITLKSKLVSDFRKDFQFYKVREINNYHHAHDAYLNAVVGTALIKKYPKLESEFVYGDYKVYDVRKMIAKSEQEIGKATAKYFFYSNIMNFFKTEITLANGEIRKRPLIETNGETGEIVWDKGRDFATVRKVLSMPQVNIVKKTEVQTGGFSKESILPKRNSDKLIARKKDWDPKKYGGFDSPTVAYSVLVVAKVEKGKSKKLKSVKELLGITIMERSSFEKNPIDFLEAKGYKEVKKDLIIKLPKYSLFELENGRKRMLASAGELQKGNELALPSKYVNFLYLASHYEKLKGSPEDNEQKQLFVEQHKHYLDEIIEQISEFSKRVILADANLDKVLSAYNKHRDKPIREQAENIIHLFTLTNLGAPAAFKYFDTTIDRKRYTSTKEVLDATLIHQSITGLYETRIDLSQLGGDGGPAPGGTLNIEDEYRLHETSKEPDVSLGSTWLSDFPQAWAETGGMGLAVRQAPLIIPLKATSTPVSIKQYPMSQEARLGIKPHIQRLLDQGILVPCQSPWNTPLLPVKKPGTNDYRPVQDLREVNKRVEDIHPTVPNPYNLLSGLPPSHQWYTVLDLKDAFFCLRLHPTSQPLFAFEWRDPEMGISGQLTWTRLPQGFKNSPTLFNEALHRDLADFRIQHPDLILLQYVDDLLLAATSELDCQQGTRALLQTLGNLGYRASAKKAQICQKQVKYLGYLLKEGQRWLTEARKETVMGQPTPKTPRQLREFLGKAGFCRLFIPGFAEMAAPLYPLTKPGTLFNWGPDQQKAYQEIKQALLTAPALGLPDLTKPFELFVDEKQGYAKGVLTQKLGPWRRPVAYLSKKLDPVAAGWPPCLRMVAAIAVLTKDAGKLTMGQPLVILAPHAVEALVKQPPDRWLSNARMTHYQALLLDTDRVQFGPVVALNPATLLPLPEEGLQHNCLDILAEAHGTRPDLTDQPLPDADHTWYTDGSSLLQEGQRKAGAAVTTETEVIWAKALPAGTSAQRAELIALTQALKMAEGKKLNVYTDSRYAFATAHIHGEIYRRRGWLTSEGKEIKNKDEILALLKALFLPKRLSIIHCPGHQKGHSAEARGNRMADQAARKAAITETPDTSTLLIENSSPSGGSKRTADGSEFEAGKRTADGSEFEKRTADGSEFESPKKKAKVE

SEQ ID NO: 2625 - protein, 2113 aa, synthetic construct
MPAAKRVKLDGGDKKYSIGLDIGTNSVGWAVITDEYKVPSKKFKVLGNTDRHSIKKNLIGALLFDSGETAEATRLKRTARRRYTRRKNRICYLQEIFSNEMAKVDDSFFHRLEESFLVEEDKKHERHPIFGNIVDEVAYHEKYPTIYHLRKKLVDSTDKADLRLIYLALAHMIKFRGHFLIEGDLNPDNSDVDKLFIQLVQTYNQLFEENPINASGVDAKAILSARLSKSRRLENLIAQLPGEKKNGLFGNLIALSLGLTPNFKSNFDLAEDAKLQLSKDTYDDDLDNLLAQIGDQYADLFLAAKNLSDAILLSDILRVNTEITKAPLSASMIKRYDEHHQDLTLLKALVRQQLPEKYKEIFFDQSKNGYAGYIDGGASQEEFYKFIKPILEKMDGTEELLVKLNREDLLRKQRTFDNGSIPHQIHLGELHAILRRQEDFYPFLKDNREKIEKILTFRIPYYVGPLARGNSRFAWMTRKSEETITPWNFEEVVDKGASAQSFIERMTNFDKNLPNEKVLPKHSLLYEYFTVYNELTKVKYVTEGMRKPAFLSGEQKKAIVDLLFKTNRKVTVKQLKEDYFKKIECFDSVEISGVEDRFNASLGTYHDLLKIIKDKDFLDNEENEDILEDIVLTLTLFEDREMIEERLKTYAHLFDDKVMKQLKRRRYTGWGRLSRKLINGIRDKQSGKTILDFLKSDGFANRNFMQLIHDDSLTFKEDIQKAQVSGQGDSLHEHIANLAGSPAIKKGILQTVKVVDELVKVMGRHKPENIVIEMARENQTTQKGQKNSRERMKRIEEGIKELGSQILKEHPVENTQLQNEKLYLYYLQNGRDMYVDQELDINRLSDYDVDHIVPQSFLKDDSIDNKVLTRSDKARGKSDNVPSEEVVKKMKNYWRQLLNAKLITQRKFDNLTKAERGGLSELDKAGFIKRQLVETRQITKHVAQILDSRMNTKYDENDKLIREVKVITLKSKLVSDFRKDFQFYKVREINNYHHAHDAYLNAVVGTALIKKYPKLESEFVYGDYKVYDVRKMIAKSEQEIGKATAKYFFYSNIMNFFKTEITLANGEIRKRPLIETNGETGEIVWDKGRDFATVRKVLSMPQVNIVKKTEVQTGGFSKESILPKRNSDKLIARKKDWDPKKYGGFDSPTVAYSVLVVAKVEKGKSKKLKSVKELLGITIMERSSFEKNPIDFLEAKGYKEVKKDLIIKLPKYSLFELENGRKRMLASAGELQKGNELALPSKYVNFLYLASHYEKLKGSPEDNEQKQLFVEQHKHYLDEIIEQISEFSKRVILADANLDKVLSAYNKHRDKPIREQAENIIHLFTLTNLGAPAAFKYFDTTIDRKRYTSTKEVLDATLIHQSITGLYETRIDLSQLGGDGGEAAAKGSSGGTLNIEDEYRLHETSKEPDVSLGSTWLSDFPQAWAETGGMGLAVRQAPLIIPLKATSTPVSIKQYPMSQEARLGIKPHIQRLLDQGILVPCQSPWNTPLLPVKKPGTNDYRPVQDLREVNKRVEDIHPTVPNPYNLLSGLPPSHQWYTVLDLKDAFFCLRLHPTSQPLFAFEWRDPEMGISGQLTWTRLPQGFKNSPTLFNEALHRDLADFRIQHPDLILLQYVDDLLLAATSELDCQQGTRALLQTLGNLGYRASAKKAQICQKQVKYLGYLLKEGQRWLTEARKETVMGQPTPKTPRQLREFLGKAGFCRLFIPGFAEMAAPLYPLTKPGTLFNWGPDQQKAYQEIKQALLTAPALGLPDLTKPFELFVDEKQGYAKGVLTQKLGPWRRPVAYLSKKLDPVAAGWPPCLRMVAAIAVLTKDAGKLTMGQPLVILAPHAVEALVKQPPDRWLSNARMTHYQALLLDTDRVQFGPVVALNPATLLPLPEEGLQHNCLDILAEAHGTRPDLTDQPLPDADHTWYTDGSSLLQEGQRKAGAAVTTETEVIWAKALPAGTSAQRAELIALTQALKMAEGKKLNVYTDSRYAFATAHIHGEIYRRRGWLTSEGKEIKNKDEILALLKALFLPKRLSIIHCPGHQKGHSAEARGNRMADQAARKAAITETPDTSTLLIENSSPSGGSKRTADGSEFEAGKRTADGSEFEKRTADGSEFESPKKKAKVE

SEQ ID NO: 2626 - protein, 2113 aa, synthetic construct
MPAAKRVKLDGGDKKYSIGLDIGTNSVGWAVITDEYKVPSKKFKVLGNTDRHSIKKNLIGALLFDSGETAEATRLKRTARRRYTRRKNRICYLQEIFSNEMAKVDDSFFHRLEESFLVEEDKKHERHPIFGNIVDEVAYHEKYPTIYHLRKKLVDSTDKADLRLIYLALAHMIKFRGHFLIEGDLNPDNSDVDKLFIQLVQTYNQLFEENPINASGVDAKAILSARLSKSRRLENLIAQLPGEKKNGLFGNLIALSLGLTPNFKSNFDLAEDAKLQLSKDTYDDDLDNLLAQIGDQYADLFLAAKNLSDAILLSDILRVNTEITKAPLSASMIKRYDEHHQDLTLLKALVRQQLPEKYKEIFFDQSKNGYAGYIDGGASQEEFYKFIKPILEKMDGTEELLVKLNREDLLRKQRTFDNGSIPHQIHLGELHAILRRQEDFYPFLKDNREKIEKILTFRIPYYVGPLARGNSRFAWMTRKSEETITPWNFEEVVDKGASAQSFIERMTNFDKNLPNEKVLPKHSLLYEYFTVYNELTKVKYVTEGMRKPAFLSGEQKKAIVDLLFKTNRKVTVKQLKEDYFKKIECFDSVEISGVEDRFNASLGTYHDLLKIIKDKDFLDNEENEDILEDIVLTLTLFEDREMIEERLKTYAHLFDDKVMKQLKRRRYTGWGRLSRKLINGIRDKQSGKTILDFLKSDGFANRNFMQLIHDDSLTFKEDIQKAQVSGQGDSLHEHIANLAGSPAIKKGILQTVKVVDELVKVMGRHKPENIVIEMARENQTTQKGQKNSRERMKRIEEGIKELGSQILKEHPVENTQLQNEKLYLYYLQNGRDMYVDQELDINRLSDYDVDHIVPQSFLKDDSIDNKVLTRSDKARGKSDNVPSEEVVKKMKNYWRQLLNAKLITQRKFDNLTKAERGGLSELDKAGFIKRQLVETRQITKHVAQILDSRMNTKYDENDKLIREVKVITLKSKLVSDFRKDFQFYKVREINNYHHAHDAYLNAVVGTALIKKYPKLESEFVYGDYKVYDVRKMIAKSEQEIGKATAKYFFYSNIMNFFKTEITLANGEIRKRPLIETNGETGEIVWDKGRDFATVRKVLSMPQVNIVKKTEVQTGGFSKESILPKRNSDKLIARKKDWDPKKYGGFDSPTVAYSVLVVAKVEKGKSKKLKSVKELLGITIMERSSFEKNPIDFLEAKGYKEVKKDLIIKLPKYSLFELENGRKRMLASAGELQKGNELALPSKYVNFLYLASHYEKLKGSPEDNEQKQLFVEQHKHYLDEIIEQISEFSKRVILADANLDKVLSAYNKHRDKPIREQAENIIHLFTLTNLGAPAAFKYFDTTIDRKRYTSTKEVLDATLIHQSITGLYETRIDLSQLGGDGGGGGGGGGGGGTLNIEDEYRLHETSKEPDVSLGSTWLSDFPQAWAETGGMGLAVRQAPLIIPLKATSTPVSIKQYPMSQEARLGIKPHIQRLLDQGILVPCQSPWNTPLLPVKKPGTNDYRPVQDLREVNKRVEDIHPTVPNPYNLLSGLPPSHQWYTVLDLKDAFFCLRLHPTSQPLFAFEWRDPEMGISGQLTWTRLPQGFKNSPTLFNEALHRDLADFRIQHPDLILLQYVDDLLLAATSELDCQQGTRALLQTLGNLGYRASAKKAQICQKQVKYLGYLLKEGQRWLTEARKETVMGQPTPKTPRQLREFLGKAGFCRLFIPGFAEMAAPLYPLTKPGTLFNWGPDQQKAYQEIKQALLTAPALGLPDLTKPFELFVDEKQGYAKGVLTQKLGPWRRPVAYLSKKLDPVAAGWPPCLRMVAAIAVLTKDAGKLTMGQPLVILAPHAVEALVKQPPDRWLSNARMTHYQALLLDTDRVQFGPVVALNPATLLPLPEEGLQHNCLDILAEAHGTRPDLTDQPLPDADHTWYTDGSSLLQEGQRKAGAAVTTETEVIWAKALPAGTSAQRAELIALTQALKMAEGKKLNVYTDSRYAFATAHIHGEIYRRRGWLTSEGKEIKNKDEILALLKALFLPKRLSIIHCPGHQKGHSAEARGNRMADQAARKAAITETPDTSTLLIENSSPSGGSKRTADGSEFEAGKRTADGSEFEKRTADGSEFESPKKKAKVE

SEQ ID NO: 2627 - protein, 2120 aa, synthetic construct
MPAAKRVKLDGGDKKYSIGLDIGTNSVGWAVITDEYKVPSKKFKVLGNTDRHSIKKNLIGALLFDSGETAEATRLKRTARRRYTRRKNRICYLQEIFSNEMAKVDDSFFHRLEESFLVEEDKKHERHPIFGNIVDEVAYHEKYPTIYHLRKKLVDSTDKADLRLIYLALAHMIKFRGHFLIEGDLNPDNSDVDKLFIQLVQTYNQLFEENPINASGVDAKAILSARLSKSRRLENLIAQLPGEKKNGLFGNLIALSLGLTPNFKSNFDLAEDAKLQLSKDTYDDDLDNLLAQIGDQYADLFLAAKNLSDAILLSDILRVNTEITKAPLSASMIKRYDEHHQDLTLLKALVRQQLPEKYKEIFFDQSKNGYAGYIDGGASQEEFYKFIKPILEKMDGTEELLVKLNREDLLRKQRTFDNGSIPHQIHLGELHAILRRQEDFYPFLKDNREKIEKILTFRIPYYVGPLARGNSRFAWMTRKSEETITPWNFEEVVDKGASAQSFIERMTNFDKNLPNEKVLPKHSLLYEYFTVYNELTKVKYVTEGMRKPAFLSGEQKKAIVDLLFKTNRKVTVKQLKEDYFKKIECFDSVEISGVEDRFNASLGTYHDLLKIIKDKDFLDNEENEDILEDIVLTLTLFEDREMIEERLKTYAHLFDDKVMKQLKRRRYTGWGRLSRKLINGIRDKQSGKTILDFLKSDGFANRNFMQLIHDDSLTFKEDIQKAQVSGQGDSLHEHIANLAGSPAIKKGILQTVKVVDELVKVMGRHKPENIVIEMARENQTTQKGQKNSRERMKRIEEGIKELGSQILKEHPVENTQLQNEKLYLYYLQNGRDMYVDQELDINRLSDYDVDHIVPQSFLKDDSIDNKVLTRSDKARGKSDNVPSEEVVKKMKNYWRQLLNAKLITQRKFDNLTKAERGGLSELDKAGFIKRQLVETRQITKHVAQILDSRMNTKYDENDKLIREVKVITLKSKLVSDFRKDFQFYKVREINNYHHAHDAYLNAVVGTALIKKYPKLESEFVYGDYKVYDVRKMIAKSEQEIGKATAKYFFYSNIMNFFKTEITLANGEIRKRPLIETNGETGEIVWDKGRDFATVRKVLSMPQVNIVKKTEVQTGGFSKESILPKRNSDKLIARKKDWDPKKYGGFDSPTVAYSVLVVAKVEKGKSKKLKSVKELLGITIMERSSFEKNPIDFLEAKGYKEVKKDLIIKLPKYSLFELENGRKRMLASAGELQKGNELALPSKYVNFLYLASHYEKLKGSPEDNEQKQLFVEQHKHYLDEIIEQISEFSKRVILADANLDKVLSAYNKHRDKPIREQAENIIHLFTLTNLGAPAAFKYFDTTIDRKRYTSTKEVLDATLIHQSITGLYETRIDLSQLGGDGGEAAAKEAAAKEAAAKGGTLNIEDEYRLHETSKEPDVSLGSTWLSDFPQAWAETGGMGLAVRQAPLIIPLKATSTPVSIKQYPMSQEARLGIKPHIQRLLDQGILVPCQSPWNTPLLPVKKPGTNDYRPVQDLREVNKRVEDIHPTVPNPYNLLSGLPPSHQWYTVLDLKDAFFCLRLHPTSQPLFAFEWRDPEMGISGQLTWTRLPQGFKNSPTLFNEALHRDLADFRIQHPDLILLQYVDDLLLAATSELDCQQGTRALLQTLGNLGYRASAKKAQICQKQVKYLGYLLKEGQRWLTEARKETVMGQPTPKTPRQLREFLGKAGFCRLFIPGFAEMAAPLYPLTKPGTLFNWGPDQQKAYQEIKQALLTAPALGLPDLTKPFELFVDEKQGYAKGVLTQKLGPWRRPVAYLSKKLDPVAAGWPPCLRMVAAIAVLTKDAGKLTMGQPLVILAPHAVEALVKQPPDRWLSNARMTHYQALLLDTDRVQFGPVVALNPATLLPLPEEGLQHNCLDILAEAHGTRPDLTDQPLPDADHTWYTDGSSLLQEGQRKAGAAVTTETEVIWAKALPAGTSAQRAELIALTQALKMAEGKKLNVYTDSRYAFATAHIHGEIYRRRGWLTSEGKEIKNKDEILALLKALFLPKRLSIIHCPGHQKGHSAEARGNRMADQAARKAAITETPDTSTLLIENSSPSGGSKRTADGSEFEAGKRTADGSEFEKRTADGSEFESPKKKAKVE

SEQ ID NO: 2628 - protein, 2116 aa, synthetic construct
MPAAKRVKLDGGDKKYSIGLDIGTNSVGWAVITDEYKVPSKKFKVLGNTDRHSIKKNLIGALLFDSGETAEATRLKRTARRRYTRRKNRICYLQEIFSNEMAKVDDSFFHRLEESFLVEEDKKHERHPIFGNIVDEVAYHEKYPTIYHLRKKLVDSTDKADLRLIYLALAHMIKFRGHFLIEGDLNPDNSDVDKLFIQLVQTYNQLFEENPINASGVDAKAILSARLSKSRRLENLIAQLPGEKKNGLFGNLIALSLGLTPNFKSNFDLAEDAKLQLSKDTYDDDLDNLLAQIGDQYADLFLAAKNLSDAILLSDILRVNTEITKAPLSASMIKRYDEHHQDLTLLKALVRQQLPEKYKEIFFDQSKNGYAGYIDGGASQEEFYKFIKPILEKMDGTEELLVKLNREDLLRKQRTFDNGSIPHQIHLGELHAILRRQEDFYPFLKDNREKIEKILTFRIPYYVGPLARGNSRFAWMTRKSEETITPWNFEEVVDKGASAQSFIERMTNFDKNLPNEKVLPKHSLLYEYFTVYNELTKVKYVTEGMRKPAFLSGEQKKAIVDLLFKTNRKVTVKQLKEDYFKKIECFDSVEISGVEDRFNASLGTYHDLLKIIKDKDFLDNEENEDILEDIVLTLTLFEDREMIEERLKTYAHLFDDKVMKQLKRRRYTGWGRLSRKLINGIRDKQSGKTILDFLKSDGFANRNFMQLIHDDSLTFKEDIQKAQVSGQGDSLHEHIANLAGSPAIKKGILQTVKVVDELVKVMGRHKPENIVIEMARENQTTQKGQKNSRERMKRIEEGIKELGSQILKEHPVENTQLQNEKLYLYYLQNGRDMYVDQELDINRLSDYDVDHIVPQSFLKDDSIDNKVLTRSDKARGKSDNVPSEEVVKKMKNYWRQLLNAKLITQRKFDNLTKAERGGLSELDKAGFIKRQLVETRQITKHVAQILDSRMNTKYDENDKLIREVKVITLKSKLVSDFRKDFQFYKVREINNYHHAHDAYLNAVVGTALIKKYPKLESEFVYGDYKVYDVRKMIAKSEQEIGKATAKYFFYSNIMNFFKTEITLANGEIRKRPLIETNGETGEIVWDKGRDFATVRKVLSMPQVNIVKKTEVQTGGFSKESILPKRNSDKLIARKKDWDPKKYGGFDSPTVAYSVLVVAKVEKGKSKKLKSVKELLGITIMERSSFEKNPIDFLEAKGYKEVKKDLIIKLPKYSLFELENGRKRMLASAGELQKGNELALPSKYVNFLYLASHYEKLKGSPEDNEQKQLFVEQHKHYLDEIIEQISEFSKRVILADANLDKVLSAYNKHRDKPIREQAENIIHLFTLTNLGAPAAFKYFDTTIDRKRYTSTKEVLDATLIHQSITGLYETRIDLSQLGGDGGEAAAKPAPGSSGGTLNIEDEYRLHETSKEPDVSLGSTWLSDFPQAWAETGGMGLAVRQAPLIIPLKATSTPVSIKQYPMSQEARLGIKPHIQRLLDQGILVPCQSPWNTPLLPVKKPGTNDYRPVQDLREVNKRVEDIHPTVPNPYNLLSGLPPSHQWYTVLDLKDAFFCLRLHPTSQPLFAFEWRDPEMGISGQLTWTRLPQGFKNSPTLFNEALHRDLADFRIQHPDLILLQYVDDLLLAATSELDCQQGTRALLQTLGNLGYRASAKKAQICQKQVKYLGYLLKEGQRWLTEARKETVMGQPTPKTPRQLREFLGKAGFCRLFIPGFAEMAAPLYPLTKPGTLFNWGPDQQKAYQEIKQALLTAPALGLPDLTKPFELFVDEKQGYAKGVLTQKLGPWRRPVAYLSKKLDPVAAGWPPCLRMVAAIAVLTKDAGKLTMGQPLVILAPHAVEALVKQPPDRWLSNARMTHYQALLLDTDRVQFGPVVALNPATLLPLPEEGLQHNCLDILAEAHGTRPDLTDQPLPDADHTWYTDGSSLLQEGQRKAGAAVTTETEVIWAKALPAGTSAQRAELIALTQALKMAEGKKLNVYTDSRYAFATAHIHGEIYRRRGWLTSEGKEIKNKDEILALLKALFLPKRLSIIHCPGHQKGHSAEARGNRMADQAARKAAITETPDTSTLLIENSSPSGGSKRTADGSEFEAGKRTADGSEFEKRTADGSEFESPKKKAKVE

SEQ ID NO: 2629 - protein, 2116 aa, synthetic construct
MPAAKRVKLDGGDKKYSIGLDIGTNSVGWAVITDEYKVPSKKFKVLGNTDRHSIKKNLIGALLFDSGETAEATRLKRTARRRYTRRKNRICYLQEIFSNEMAKVDDSFFHRLEESFLVEEDKKHERHPIFGNIVDEVAYHEKYPTIYHLRKKLVDSTDKADLRLIYLALAHMIKFRGHFLIEGDLNPDNSDVDKLFIQLVQTYNQLFEENPINASGVDAKAILSARLSKSRRLENLIAQLPGEKKNGLFGNLIALSLGLTPNFKSNFDLAEDAKLQLSKDTYDDDLDNLLAQIGDQYADLFLAAKNLSDAILLSDILRVNTEITKAPLSASMIKRYDEHHQDLTLLKALVRQQLPEKYKEIFFDQSKNGYAGYIDGGASQEEFYKFIKPILEKMDGTEELLVKLNREDLLRKQRTFDNGSIPHQIHLGELHAILRRQEDFYPFLKDNREKIEKILTFRIPYYVGPLARGNSRFAWMTRKSEETITPWNFEEVVDKGASAQSFIERMTNFDKNLPNEKVLPKHSLLYEYFTVYNELTKVKYVTEGMRKPAFLSGEQKKAIVDLLFKTNRKVTVKQLKEDYFKKIECFDSVEISGVEDRFNASLGTYHDLLKIIKDKDFLDNEENEDILEDIVLTLTLFEDREMIEERLKTYAHLFDDKVMKQLKRRRYTGWGRLSRKLINGIRDKQSGKTILDFLKSDGFANRNFMQLIHDDSLTFKEDIQKAQVSGQGDSLHEHIANLAGSPAIKKGILQTVKVVDELVKVMGRHKPENIVIEMARENQTTQKGQKNSRERMKRIEEGIKELGSQILKEHPVENTQLQNEKLYLYYLQNGRDMYVDQELDINRLSDYDVDHIVPQSFLKDDSIDNKVLTRSDKARGKSDNVPSEEVVKKMKNYWRQLLNAKLITQRKFDNLTKAERGGLSELDKAGFIKRQLVETRQITKHVAQILDSRMNTKYDENDKLIREVKVITLKSKLVSDFRKDFQFYKVREINNYHHAHDAYLNAVVGTALIKKYPKLESEFVYGDYKVYDVRKMIAKSEQEIGKATAKYFFYSNIMNFFKTEITLANGEIRKRPLIETNGETGEIVWDKGRDFATVRKVLSMPQVNIVKKTEVQTGGFSKESILPKRNSDKLIARKKDWDPKKYGGFDSPTVAYSVLVVAKVEKGKSKKLKSVKELLGITIMERSSFEKNPIDFLEAKGYKEVKKDLIIKLPKYSLFELENGRKRMLASAGELQKGNELALPSKYVNFLYLASHYEKLKGSPEDNEQKQLFVEQHKHYLDEIIEQISEFSKRVILADANLDKVLSAYNKHRDKPIREQAENIIHLFTLTNLGAPAAFKYFDTTIDRKRYTSTKEVLDATLIHQSITGLYETRIDLSQLGGDGGGGSEAAAKGGGGGTLNIEDEYRLHETSKEPDVSLGSTWLSDFPQAWAETGGMGLAVRQAPLIIPLKATSTPVSIKQYPMSQEARLGIKPHIQRLLDQGILVPCQSPWNTPLLPVKKPGTNDYRPVQDLREVNKRVEDIHPTVPNPYNLLSGLPPSHQWYTVLDLKDAFFCLRLHPTSQPLFAFEWRDPEMGISGQLTWTRLPQGFKNSPTLFNEALHRDLADFRIQHPDLILLQYVDDLLLAATSELDCQQGTRALLQTLGNLGYRASAKKAQICQKQVKYLGYLLKEGQRWLTEARKETVMGQPTPKTPRQLREFLGKAGFCRLFIPGFAEMAAPLYPLTKPGTLFNWGPDQQKAYQEIKQALLTAPALGLPDLTKPFELFVDEKQGYAKGVLTQKLGPWRRPVAYLSKKLDPVAAGWPPCLRMVAAIAVLTKDAGKLTMGQPLVILAPHAVEALVKQPPDRWLSNARMTHYQALLLDTDRVQFGPVVALNPATLLPLPEEGLQHNCLDILAEAHGTRPDLTDQPLPDADHTWYTDGSSLLQEGQRKAGAAVTTETEVIWAKALPAGTSAQRAELIALTQALKMAEGKKLNVYTDSRYAFATAHIHGEIYRRRGWLTSEGKEIKNKDEILALLKALFLPKRLSIIHCPGHQKGHSAEARGNRMADQAARKAAITETPDTSTLLIENSSPSGGSKRTADGSEFEAGKRTADGSEFEKRTADGSEFESPKKKAKVE

SEQ ID NO: 2630 - protein, 2135 aa, synthetic construct
MPAAKRVKLDGGDKKYSIGLDIGTNSVGWAVITDEYKVPSKKFKVLGNTDRHSIKKNLIGALLFDSGETAEATRLKRTARRRYTRRKNRICYLQEIFSNEMAKVDDSFFHRLEESFLVEEDKKHERHPIFGNIVDEVAYHEKYPTIYHLRKKLVDSTDKADLRLIYLALAHMIKFRGHFLIEGDLNPDNSDVDKLFIQLVQTYNQLFEENPINASGVDAKAILSARLSKSRRLENLIAQLPGEKKNGLFGNLIALSLGLTPNFKSNFDLAEDAKLQLSKDTYDDDLDNLLAQIGDQYADLFLAAKNLSDAILLSDILRVNTEITKAPLSASMIKRYDEHHQDLTLLKALVRQQLPEKYKEIFFDQSKNGYAGYIDGGASQEEFYKFIKPILEKMDGTEELLVKLNREDLLRKQRTFDNGSIPHQIHLGELHAILRRQEDFYPFLKDNREKIEKILTFRIPYYVGPLARGNSRFAWMTRKSEETITPWNFEEVVDKGASAQSFIERMTNFDKNLPNEKVLPKHSLLYEYFTVYNELTKVKYVTEGMRKPAFLSGEQKKAIVDLLFKTNRKVTVKQLKEDYFKKIECFDSVEISGVEDRFNASLGTYHDLLKIIKDKDFLDNEENEDILEDIVLTLTLFEDREMIEERLKTYAHLFDDKVMKQLKRRRYTGWGRLSRKLINGIRDKQSGKTILDFLKSDGFANRNFMQLIHDDSLTFKEDIQKAQVSGQGDSLHEHIANLAGSPAIKKGILQTVKVVDELVKVMGRHKPENIVIEMARENQTTQKGQKNSRERMKRIEEGIKELGSQILKEHPVENTQLQNEKLYLYYLQNGRDMYVDQELDINRLSDYDVDHIVPQSFLKDDSIDNKVLTRSDKARGKSDNVPSEEVVKKMKNYWRQLLNAKLITQRKFDNLTKAERGGLSELDKAGFIKRQLVETRQITKHVAQILDSRMNTKYDENDKLIREVKVITLKSKLVSDFRKDFQFYKVREINNYHHAHDAYLNAVVGTALIKKYPKLESEFVYGDYKVYDVRKMIAKSEQEIGKATAKYFFYSNIMNFFKTEITLANGEIRKRPLIETNGETGEIVWDKGRDFATVRKVLSMPQVNIVKKTEVQTGGFSKESILPKRNSDKLIARKKDWDPKKYGGFDSPTVAYSVLVVAKVEKGKSKKLKSVKELLGITIMERSSFEKNPIDFLEAKGYKEVKKDLIIKLPKYSLFELENGRKRMLASAGELQKGNELALPSKYVNFLYLASHYEKLKGSPEDNEQKQLFVEQHKHYLDEIIEQISEFSKRVILADANLDKVLSAYNKHRDKPIREQAENIIHLFTLTNLGAPAAFKYFDTTIDRKRYTSTKEVLDATLIHQSITGLYETRIDLSQLGGDGGEAAAKEAAAKEAAAKEAAAKEAAAKEAAAKGGTLNIEDEYRLHETSKEPDVSLGSTWLSDFPQAWAETGGMGLAVRQAPLIIPLKATSTPVSIKQYPMSQEARLGIKPHIQRLLDQGILVPCQSPWNTPLLPVKKPGTNDYRPVQDLREVNKRVEDIHPTVPNPYNLLSGLPPSHQWYTVLDLKDAFFCLRLHPTSQPLFAFEWRDPEMGISGQLTWTRLPQGFKNSPTLFNEALHRDLADFRIQHPDLILLQYVDDLLLAATSELDCQQGTRALLQTLGNLGYRASAKKAQICQKQVKYLGYLLKEGQRWLTEARKETVMGQPTPKTPRQLREFLGKAGFCRLFIPGFAEMAAPLYPLTKPGTLFNWGPDQQKAYQEIKQALLTAPALGLPDLTKPFELFVDEKQGYAKGVLTQKLGPWRRPVAYLSKKLDPVAAGWPPCLRMVAAIAVLTKDAGKLTMGQPLVILAPHAVEALVKQPPDRWLSNARMTHYQALLLDTDRVQFGPVVALNPATLLPLPEEGLQHNCLDILAEAHGTRPDLTDQPLPDADHTWYTDGSSLLQEGQRKAGAAVTTETEVIWAKALPAGTSAQRAELIALTQALKMAEGKKLNVYTDSRYAFATAHIHGEIYRRRGWLTSEGKEIKNKDEILALLKALFLPKRLSIIHCPGHQKGHSAEARGNRMADQAARKAAITETPDTSTLLIENSSPSGGSKRTADGSEFEAGKRTADGSEFEKRTADGSEFESPKKKAKVE

SEQ ID NO: 2631 - protein, 2108 aa, synthetic construct
MPAAKRVKLDGGDKKYSIGLDIGTNSVGWAVITDEYKVPSKKFKVLGNTDRHSIKKNLIGALLFDSGETAEATRLKRTARRRYTRRKNRICYLQEIFSNEMAKVDDSFFHRLEESFLVEEDKKHERHPIFGNIVDEVAYHEKYPTIYHLRKKLVDSTDKADLRLIYLALAHMIKFRGHFLIEGDLNPDNSDVDKLFIQLVQTYNQLFEENPINASGVDAKAILSARLSKSRRLENLIAQLPGEKKNGLFGNLIALSLGLTPNFKSNFDLAEDAKLQLSKDTYDDDLDNLLAQIGDQYADLFLAAKNLSDAILLSDILRVNTEITKAPLSASMIKRYDEHHQDLTLLKALVRQQLPEKYKEIFFDQSKNGYAGYIDGGASQEEFYKFIKPILEKMDGTEELLVKLNREDLLRKQRTFDNGSIPHQIHLGELHAILRRQEDFYPFLKDNREKIEKILTFRIPYYVGPLARGNSRFAWMTRKSEETITPWNFEEVVDKGASAQSFIERMTNFDKNLPNEKVLPKHSLLYEYFTVYNELTKVKYVTEGMRKPAFLSGEQKKAIVDLLFKTNRKVTVKQLKEDYFKKIECFDSVEISGVEDRFNASLGTYHDLLKIIKDKDFLDNEENEDILEDIVLTLTLFEDREMIEERLKTYAHLFDDKVMKQLKRRRYTGWGRLSRKLINGIRDKQSGKTILDFLKSDGFANRNFMQLIHDDSLTFKEDIQKAQVSGQGDSLHEHIANLAGSPAIKKGILQTVKVVDELVKVMGRHKPENIVIEMARENQTTQKGQKNSRERMKRIEEGIKELGSQILKEHPVENTQLQNEKLYLYYLQNGRDMYVDQELDINRLSDYDVDHIVPQSFLKDDSIDNKVLTRSDKARGKSDNVPSEEVVKKMKNYWRQLLNAKLITQRKFDNLTKAERGGLSELDKAGFIKRQLVETRQITKHVAQILDSRMNTKYDENDKLIREVKVITLKSKLVSDFRKDFQFYKVREINNYHHAHDAYLNAVVGTALIKKYPKLESEFVYGDYKVYDVRKMIAKSEQEIGKATAKYFFYSNIMNFFKTEITLANGEIRKRPLIETNGETGEIVWDKGRDFATVRKVLSMPQVNIVKKTEVQTGGFSKESILPKRNSDKLIARKKDWDPKKYGGFDSPTVAYSVLVVAKVEKGKSKKLKSVKELLGITIMERSSFEKNPIDFLEAKGYKEVKKDLIIKLPKYSLFELENGRKRMLASAGELQKGNELALPSKYVNFLYLASHYEKLKGSPEDNEQKQLFVEQHKHYLDEIIEQISEFSKRVILADANLDKVLSAYNKHRDKPIREQAENIIHLFTLTNLGAPAAFKYFDTTIDRKRYTSTKEVLDATLIHQSITGLYETRIDLSQLGGDGGGGSGGTLNIEDEYRLHETSKEPDVSLGSTWLSDFPQAWAETGGMGLAVRQAPLIIPLKATSTPVSIKQYPMSQEARLGIKPHIQRLLDQGILVPCQSPWNTPLLPVKKPGTNDYRPVQDLREVNKRVEDIHPTVPNPYNLLSGLPPSHQWYTVLDLKDAFFCLRLHPTSQPLFAFEWRDPEMGISGQLTWTRLPQGFKNSPTLFNEALHRDLADFRIQHPDLILLQYVDDLLLAATSELDCQQGTRALLQTLGNLGYRASAKKAQICQKQVKYLGYLLKEGQRWLTEARKETVMGQPTPKTPRQLREFLGKAGFCRLFIPGFAEMAAPLYPLTKPGTLFNWGPDQQKAYQEIKQALLTAPALGLPDLTKPFELFVDEKQGYAKGVLTQKLGPWRRPVAYLSKKLDPVAAGWPPCLRMVAAIAVLTKDAGKLTMGQPLVILAPHAVEALVKQPPDRWLSNARMTHYQALLLDTDRVQFGPVVALNPATLLPLPEEGLQHNCLDILAEAHGTRPDLTDQPLPDADHTWYTDGSSLLQEGQRKAGAAVTTETEVIWAKALPAGTSAQRAELIALTQALKMAEGKKLNVYTDSRYAFATAHIHGEIYRRRGWLTSEGKEIKNKDEILALLKALFLPKRLSIIHCPGHQKGHSAEARGNRMADQAARKAAITETPDTSTLLIENSSPSGGSKRTADGSEFEAGKRTADGSEFEKRTADGSEFESPKKKAKVE

SEQ ID NO: 2632 - protein, 2114 aa, synthetic construct
MPAAKRVKLDGGDKKYSIGLDIGTNSVGWAVITDEYKVPSKKFKVLGNTDRHSIKKNLIGALLFDSGETAEATRLKRTARRRYTRRKNRICYLQEIFSNEMAKVDDSFFHRLEESFLVEEDKKHERHPIFGNIVDEVAYHEKYPTIYHLRKKLVDSTDKADLRLIYLALAHMIKFRGHFLIEGDLNPDNSDVDKLFIQLVQTYNQLFEENPINASGVDAKAILSARLSKSRRLENLIAQLPGEKKNGLFGNLIALSLGLTPNFKSNFDLAEDAKLQLSKDTYDDDLDNLLAQIGDQYADLFLAAKNLSDAILLSDILRVNTEITKAPLSASMIKRYDEHHQDLTLLKALVRQQLPEKYKEIFFDQSKNGYAGYIDGGASQEEFYKFIKPILEKMDGTEELLVKLNREDLLRKQRTFDNGSIPHQIHLGELHAILRRQEDFYPFLKDNREKIEKILTFRIPYYVGPLARGNSRFAWMTRKSEETITPWNFEEVVDKGASAQSFIERMTNFDKNLPNEKVLPKHSLLYEYFTVYNELTKVKYVTEGMRKPAFLSGEQKKAIVDLLFKTNRKVTVKQLKEDYFKKIECFDSVEISGVEDRFNASLGTYHDLLKIIKDKDFLDNEENEDILEDIVLTLTLFEDREMIEERLKTYAHLFDDKVMKQLKRRRYTGWGRLSRKLINGIRDKQSGKTILDFLKSDGFANRNFMQLIHDDSLTFKEDIQKAQVSGQGDSLHEHIANLAGSPAIKKGILQTVKVVDELVKVMGRHKPENIVIEMARENQTTQKGQKNSRERMKRIEEGIKELGSQILKEHPVENTQLQNEKLYLYYLQNGRDMYVDQELDINRLSDYDVDHIVPQSFLKDDSIDNKVLTRSDKARGKSDNVPSEEVVKKMKNYWRQLLNAKLITQRKFDNLTKAERGGLSELDKAGFIKRQLVETRQITKHVAQILDSRMNTKYDENDKLIREVKVITLKSKLVSDFRKDFQFYKVREINNYHHAHDAYLNAVVGTALIKKYPKLESEFVYGDYKVYDVRKMIAKSEQEIGKATAKYFFYSNIMNFFKTEITLANGEIRKRPLIETNGETGEIVWDKGRDFATVRKVLSMPQVNIVKKTEVQTGGFSKESILPKRNSDKLIARKKDWDPKKYGGFDSPTVAYSVLVVAKVEKGKSKKLKSVKELLGITIMERSSFEKNPIDFLEAKGYKEVKKDLIIKLPKYSLFELENGRKRMLASAGELQKGNELALPSKYVNFLYLASHYEKLKGSPEDNEQKQLFVEQHKHYLDEIIEQISEFSKRVILADANLDKVLSAYNKHRDKPIREQAENIIHLFTLTNLGAPAAFKYFDTTIDRKRYTSTKEVLDATLIHQSITGLYETRIDLSQLGGDGGGGGGSSGGSGGTLNIEDEYRLHETSKEPDVSLGSTWLSDFPQAWAETGGMGLAVRQAPLIIPLKATSTPVSIKQYPMSQEARLGIKPHIQRLLDQGILVPCQSPWNTPLLPVKKPGTNDYRPVQDLREVNKRVEDIHPTVPNPYNLLSGLPPSHQWYTVLDLKDAFFCLRLHPTSQPLFAFEWRDPEMGISGQLTWTRLPQGFKNSPTLFNEALHRDLADFRIQHPDLILLQYVDDLLLAATSELDCQQGTRALLQTLGNLGYRASAKKAQICQKQVKYLGYLLKEGQRWLTEARKETVMGQPTPKTPRQLREFLGKAGFCRLFIPGFAEMAAPLYPLTKPGTLFNWGPDQQKAYQEIKQALLTAPALGLPDLTKPFELFVDEKQGYAKGVLTQKLGPWRRPVAYLSKKLDPVAAGWPPCLRMVAAIAVLTKDAGKLTMGQPLVILAPHAVEALVKQPPDRWLSNARMTHYQALLLDTDRVQFGPVVALNPATLLPLPEEGLQHNCLDILAEAHGTRPDLTDQPLPDADHTWYTDGSSLLQEGQRKAGAAVTTETEVIWAKALPAGTSAQRAELIALTQALKMAEGKKLNVYTDSRYAFATAHIHGEIYRRRGWLTSEGKEIKNKDEILALLKALFLPKRLSIIHCPGHQKGHSAEARGNRMADQAARKAAITETPDTSTLLIENSSPSGGSKRTADGSEFEAGKRTADGSEFEKRTADGSEFESPKKKAKVE

SEQ ID NO: 2633 - protein, 2114 aa, synthetic construct
MPAAKRVKLDGGDKKYSIGLDIGTNSVGWAVITDEYKVPSKKFKVLGNTDRHSIKKNLIGALLFDSGETAEATRLKRTARRRYTRRKNRICYLQEIFSNEMAKVDDSFFHRLEESFLVEEDKKHERHPIFGNIVDEVAYHEKYPTIYHLRKKLVDSTDKADLRLIYLALAHMIKFRGHFLIEGDLNPDNSDVDKLFIQLVQTYNQLFEENPINASGVDAKAILSARLSKSRRLENLIAQLPGEKKNGLFGNLIALSLGLTPNFKSNFDLAEDAKLQLSKDTYDDDLDNLLAQIGDQYADLFLAAKNLSDAILLSDILRVNTEITKAPLSASMIKRYDEHHQDLTLLKALVRQQLPEKYKEIFFDQSKNGYAGYIDGGASQEEFYKFIKPILEKMDGTEELLVKLNREDLLRKQRTFDNGSIPHQIHLGELHAILRRQEDFYPFLKDNREKIEKILTFRIPYYVGPLARGNSRFAWMTRKSEETITPWNFEEVVDKGASAQSFIERMTNFDKNLPNEKVLPKHSLLYEYFTVYNELTKVKYVTEGMRKPAFLSGEQKKAIVDLLFKTNRKVTVKQLKEDYFKKIECFDSVEISGVEDRFNASLGTYHDLLKIIKDKDFLDNEENEDILEDIVLTLTLFEDREMIEERLKTYAHLFDDKVMKQLKRRRYTGWGRLSRKLINGIRDKQSGKTILDFLKSDGFANRNFMQLIHDDSLTFKEDIQKAQVSGQGDSLHEHIANLAGSPAIKKGILQTVKVVDELVKVMGRHKPENIVIEMARENQTTQKGQKNSRERMKRIEEGIKELGSQILKEHPVENTQLQNEKLYLYYLQNGRDMYVDQELDINRLSDYDVDHIVPQSFLKDDSIDNKVLTRSDKARGKSDNVPSEEVVKKMKNYWRQLLNAKLITQRKFDNLTKAERGGLSELDKAGFIKRQLVETRQITKHVAQILDSRMNTKYDENDKLIREVKVITLKSKLVSDFRKDFQFYKVREINNYHHAHDAYLNAVVGTALIKKYPKLESEFVYGDYKVYDVRKMIAKSEQEIGKATAKYFFYSNIMNFFKTEITLANGEIRKRPLIETNGETGEIVWDKGRDFATVRKVLSMPQVNIVKKTEVQTGGFSKESILPKRNSDKLIARKKDWDPKKYGGFDSPTVAYSVLVVAKVEKGKSKKLKSVKELLGITIMERSSFEKNPIDFLEAKGYKEVKKDLIIKLPKYSLFELENGRKRMLASAGELQKGNELALPSKYVNFLYLASHYEKLKGSPEDNEQKQLFVEQHKHYLDEIIEQISEFSKRVILADANLDKVLSAYNKHRDKPIREQAENIIHLFTLTNLGAPAAFKYFDTTIDRKRYTSTKEVLDATLIHQSITGLYETRIDLSQLGGDGGGSSPAPGGGGGTLNIEDEYRLHETSKEPDVSLGSTWLSDFPQAWAETGGMGLAVRQAPLIIPLKATSTPVSIKQYPMSQEARLGIKPHIQRLLDQGILVPCQSPWNTPLLPVKKPGTNDYRPVQDLREVNKRVEDIHPTVPNPYNLLSGLPPSHQWYTVLDLKDAFFCLRLHPTSQPLFAFEWRDPEMGISGQLTWTRLPQGFKNSPTLFNEALHRDLADFRIQHPDLILLQYVDDLLLAATSELDCQQGTRALLQTLGNLGYRASAKKAQICQKQVKYLGYLLKEGQRWLTEARKETVMGQPTPKTPRQLREFLGKAGFCRLFIPGFAEMAAPLYPLTKPGTLFNWGPDQQKAYQEIKQALLTAPALGLPDLTKPFELFVDEKQGYAKGVLTQKLGPWRRPVAYLSKKLDPVAAGWPPCLRMVAAIAVLTKDAGKLTMGQPLVILAPHAVEALVKQPPDRWLSNARMTHYQALLLDTDRVQFGPVVALNPATLLPLPEEGLQHNCLDILAEAHGTRPDLTDQPLPDADHTWYTDGSSLLQEGQRKAGAAVTTETEVIWAKALPAGTSAQRAELIALTQALKMAEGKKLNVYTDSRYAFATAHIHGEIYRRRGWLTSEGKEIKNKDEILALLKALFLPKRLSIIHCPGHQKGHSAEARGNRMADQAARKAAITETPDTSTLLIENSSPSGGSKRTADGSEFEAGKRTADGSEFEKRTADGSEFESPKKKAKVE

SEQ ID NO: 2634 - protein, 2114 aa, synthetic construct
MPAAKRVKLDGGDKKYSIGLDIGTNSVGWAVITDEYKVPSKKFKVLGNTDRHSIKKNLIGALLFDSGETAEATRLKRTARRRYTRRKNRICYLQEIFSNEMAKVDDSFFHRLEESFLVEEDKKHERHPIFGNIVDEVAYHEKYPTIYHLRKKLVDSTDKADLRLIYLALAHMIKFRGHFLIEGDLNPDNSDVDKLFIQLVQTYNQLFEENPINASGVDAKAILSARLSKSRRLENLIAQLPGEKKNGLFGNLIALSLGLTPNFKSNFDLAEDAKLQLSKDTYDDDLDNLLAQIGDQYADLFLAAKNLSDAILLSDILRVNTEITKAPLSASMIKRYDEHHQDLTLLKALVRQQLPEKYKEIFFDQSKNGYAGYIDGGASQEEFYKFIKPILEKMDGTEELLVKLNREDLLRKQRTFDNGSIPHQIHLGELHAILRRQEDFYPFLKDNREKIEKILTFRIPYYVGPLARGNSRFAWMTRKSEETITPWNFEEVVDKGASAQSFIERMTNFDKNLPNEKVLPKHSLLYEYFTVYNELTKVKYVTEGMRKPAFLSGEQKKAIVDLLFKTNRKVTVKQLKEDYFKKIECFDSVEISGVEDRFNASLGTYHDLLKIIKDKDFLDNEENEDILEDIVLTLTLFEDREMIEERLKTYAHLFDDKVMKQLKRRRYTGWGRLSRKLINGIRDKQSGKTILDFLKSDGFANRNFMQLIHDDSLTFKEDIQKAQVSGQGDSLHEHIANLAGSPAIKKGILQTVKVVDELVKVMGRHKPENIVIEMARENQTTQKGQKNSRERMKRIEEGIKELGSQILKEHPVENTQLQNEKLYLYYLQNGRDMYVDQELDINRLSDYDVDHIVPQSFLKDDSIDNKVLTRSDKARGKSDNVPSEEVVKKMKNYWRQLLNAKLITQRKFDNLTKAERGGLSELDKAGFIKRQLVETRQITKHVAQILDSRMNTKYDENDKLIREVKVITLKSKLVSDFRKDFQFYKVREINNYHHAHDAYLNAVVGTALIKKYPKLESEFVYGDYKVYDVRKMIAKSEQEIGKATAKYFFYSNIMNFFKTEITLANGEIRKRPLIETNGETGEIVWDKGRDFATVRKVLSMPQVNIVKKTEVQTGGFSKESILPKRNSDKLIARKKDWDPKKYGGFDSPTVAYSVLVVAKVEKGKSKKLKSVKELLGITIMERSSFEKNPIDFLEAKGYKEVKKDLIIKLPKYSLFELENGRKRMLASAGELQKGNELALPSKYVNFLYLASHYEKLKGSPEDNEQKQLFVEQHKHYLDEIIEQISEFSKRVILADANLDKVLSAYNKHRDKPIREQAENIIHLFTLTNLGAPAAFKYFDTTIDRKRYTSTKEVLDATLIHQSITGLYETRIDLSQLGGDGGGSSGSSGSSGGTLNIEDEYRLHETSKEPDVSLGSTWLSDFPQAWAETGGMGLAVRQAPLIIPLKATSTPVSIKQYPMSQEARLGIKPHIQRLLDQGILVPCQSPWNTPLLPVKKPGTNDYRPVQDLREVNKRVEDIHPTVPNPYNLLSGLPPSHQWYTVLDLKDAFFCLRLHPTSQPLFAFEWRDPEMGISGQLTWTRLPQGFKNSPTLFNEALHRDLADFRIQHPDLILLQYVDDLLLAATSELDCQQGTRALLQTLGNLGYRASAKKAQICQKQVKYLGYLLKEGQRWLTEARKETVMGQPTPKTPRQLREFLGKAGFCRLFIPGFAEMAAPLYPLTKPGTLFNWGPDQQKAYQEIKQALLTAPALGLPDLTKPFELFVDEKQGYAKGVLTQKLGPWRRPVAYLSKKLDPVAAGWPPCLRMVAAIAVLTKDAGKLTMGQPLVILAPHAVEALVKQPPDRWLSNARMTHYQALLLDTDRVQFGPVVALNPATLLPLPEEGLQHNCLDILAEAHGTRPDLTDQPLPDADHTWYTDGSSLLQEGQRKAGAAVTTETEVIWAKALPAGTSAQRAELIALTQALKMAEGKKLNVYTDSRYAFATAHIHGEIYRRRGWLTSEGKEIKNKDEILALLKALFLPKRLSIIHCPGHQKGHSAEARGNRMADQAARKAAITETPDTSTLLIENSSPSGGSKRTADGSEFEAGKRTADGSEFEKRTADGSEFESPKKKAKVE

SEQ ID NO: 2635 - protein, 2112 aa, synthetic construct
MPAAKRVKLDGGDKKYSIGLDIGTNSVGWAVITDEYKVPSKKFKVLGNTDRHSIKKNLIGALLFDSGETAEATRLKRTARRRYTRRKNRICYLQEIFSNEMAKVDDSFFHRLEESFLVEEDKKHERHPIFGNIVDEVAYHEKYPTIYHLRKKLVDSTDKADLRLIYLALAHMIKFRGHFLIEGDLNPDNSDVDKLFIQLVQTYNQLFEENPINASGVDAKAILSARLSKSRRLENLIAQLPGEKKNGLFGNLIALSLGLTPNFKSNFDLAEDAKLQLSKDTYDDDLDNLLAQIGDQYADLFLAAKNLSDAILLSDILRVNTEITKAPLSASMIKRYDEHHQDLTLLKALVRQQLPEKYKEIFFDQSKNGYAGYIDGGASQEEFYKFIKPILEKMDGTEELLVKLNREDLLRKQRTFDNGSIPHQIHLGELHAILRRQEDFYPFLKDNREKIEKILTFRIPYYVGPLARGNSRFAWMTRKSEETITPWNFEEVVDKGASAQSFIERMTNFDKNLPNEKVLPKHSLLYEYFTVYNELTKVKYVTEGMRKPAFLSGEQKKAIVDLLFKTNRKVTVKQLKEDYFKKIECFDSVEISGVEDRFNASLGTYHDLLKIIKDKDFLDNEENEDILEDIVLTLTLFEDREMIEERLKTYAHLFDDKVMKQLKRRRYTGWGRLSRKLINGIRDKQSGKTILDFLKSDGFANRNFMQLIHDDSLTFKEDIQKAQVSGQGDSLHEHIANLAGSPAIKKGILQTVKVVDELVKVMGRHKPENIVIEMARENQTTQKGQKNSRERMKRIEEGIKELGSQILKEHPVENTQLQNEKLYLYYLQNGRDMYVDQELDINRLSDYDVDHIVPQSFLKDDSIDNKVLTRSDKARGKSDNVPSEEVVKKMKNYWRQLLNAKLITQRKFDNLTKAERGGLSELDKAGFIKRQLVETRQITKHVAQILDSRMNTKYDENDKLIREVKVITLKSKLVSDFRKDFQFYKVREINNYHHAHDAYLNAVVGTALIKKYPKLESEFVYGDYKVYDVRKMIAKSEQEIGKATAKYFFYSNIMNFFKTEITLANGEIRKRPLIETNGETGEIVWDKGRDFATVRKVLSMPQVNIVKKTEVQTGGFSKESILPKRNSDKLIARKKDWDPKKYGGFDSPTVAYSVLVVAKVEKGKSKKLKSVKELLGITIMERSSFEKNPIDFLEAKGYKEVKKDLIIKLPKYSLFELENGRKRMLASAGELQKGNELALPSKYVNFLYLASHYEKLKGSPEDNEQKQLFVEQHKHYLDEIIEQISEFSKRVILADANLDKVLSAYNKHRDKPIREQAENIIHLFTLTNLGAPAAFKYFDTTIDRKRYTSTKEVLDATLIHQSITGLYETRIDLSQLGGDGGGGGGGGGGGTLNIEDEYRLHETSKEPDVSLGSTWLSDFPQAWAETGGMGLAVRQAPLIIPLKATSTPVSIKQYPMSQEARLGIKPHIQRLLDQGILVPCQSPWNTPLLPVKKPGTNDYRPVQDLREVNKRVEDIHPTVPNPYNLLSGLPPSHQWYTVLDLKDAFFCLRLHPTSQPLFAFEWRDPEMGISGQLTWTRLPQGFKNSPTLFNEALHRDLADFRIQHPDLILLQYVDDLLLAATSELDCQQGTRALLQTLGNLGYRASAKKAQICQKQVKYLGYLLKEGQRWLTEARKETVMGQPTPKTPRQLREFLGKAGFCRLFIPGFAEMAAPLYPLTKPGTLFNWGPDQQKAYQEIKQALLTAPALGLPDLTKPFELFVDEKQGYAKGVLTQKLGPWRRPVAYLSKKLDPVAAGWPPCLRMVAAIAVLTKDAGKLTMGQPLVILAPHAVEALVKQPPDRWLSNARMTHYQALLLDTDRVQFGPVVALNPATLLPLPEEGLQHNCLDILAEAHGTRPDLTDQPLPDADHTWYTDGSSLLQEGQRKAGAAVTTETEVIWAKALPAGTSAQRAELIALTQALKMAEGKKLNVYTDSRYAFATAHIHGEIYRRRGWLTSEGKEIKNKDEILALLKALFLPKRLSIIHCPGHQKGHSAEARGNRMADQAARKAAITETPDTSTLLIENSSPSGGSKRTADGSEFEAGKRTADGSEFEKRTADGSEFESPKKKAKVE

SEQ ID NO: 2636 - protein, 2120 aa, synthetic construct
MPAAKRVKLDGGDKKYSIGLDIGTNSVGWAVITDEYKVPSKKFKVLGNTDRHSIKKNLIGALLFDSGETAEATRLKRTARRRYTRRKNRICYLQEIFSNEMAKVDDSFFHRLEESFLVEEDKKHERHPIFGNIVDEVAYHEKYPTIYHLRKKLVDSTDKADLRLIYLALAHMIKFRGHFLIEGDLNPDNSDVDKLFIQLVQTYNQLFEENPINASGVDAKAILSARLSKSRRLENLIAQLPGEKKNGLFGNLIALSLGLTPNFKSNFDLAEDAKLQLSKDTYDDDLDNLLAQIGDQYADLFLAAKNLSDAILLSDILRVNTEITKAPLSASMIKRYDEHHQDLTLLKALVRQQLPEKYKEIFFDQSKNGYAGYIDGGASQEEFYKFIKPILEKMDGTEELLVKLNREDLLRKQRTFDNGSIPHQIHLGELHAILRRQEDFYPFLKDNREKIEKILTFRIPYYVGPLARGNSRFAWMTRKSEETITPWNFEEVVDKGASAQSFIERMTNFDKNLPNEKVLPKHSLLYEYFTVYNELTKVKYVTEGMRKPAFLSGEQKKAIVDLLFKTNRKVTVKQLKEDYFKKIECFDSVEISGVEDRFNASLGTYHDLLKIIKDKDFLDNEENEDILEDIVLTLTLFEDREMIEERLKTYAHLFDDKVMKQLKRRRYTGWGRLSRKLINGIRDKQSGKTILDFLKSDGFANRNFMQLIHDDSLTFKEDIQKAQVSGQGDSLHEHIANLAGSPAIKKGILQTVKVVDELVKVMGRHKPENIVIEMARENQTTQKGQKNSRERMKRIEEGIKELGSQILKEHPVENTQLQNEKLYLYYLQNGRDMYVDQELDINRLSDYDVDHIVPQSFLKDDSIDNKVLTRSDKARGKSDNVPSEEVVKKMKNYWRQLLNAKLITQRKFDNLTKAERGGLSELDKAGFIKRQLVETRQITKHVAQILDSRMNTKYDENDKLIREVKVITLKSKLVSDFRKDFQFYKVREINNYHHAHDAYLNAVVGTALIKKYPKLESEFVYGDYKVYDVRKMIAKSEQEIGKATAKYFFYSNIMNFFKTEITLANGEIRKRPLIETNGETGEIVWDKGRDFATVRKVLSMPQVNIVKKTEVQTGGFSKESILPKRNSDKLIARKKDWDPKKYGGFDSPTVAYSVLVVAKVEKGKSKKLKSVKELLGITIMERSSFEKNPIDFLEAKGYKEVKKDLIIKLPKYSLFELENGRKRMLASAGELQKGNELALPSKYVNFLYLASHYEKLKGSPEDNEQKQLFVEQHKHYLDEIIEQISEFSKRVILADANLDKVLSAYNKHRDKPIREQAENIIHLFTLTNLGAPAAFKYFDTTIDRKRYTSTKEVLDATLIHQSITGLYETRIDLSQLGGDGGGGGGSEAAAKGGGGSGGTLNIEDEYRLHETSKEPDVSLGSTWLSDFPQAWAETGGMGLAVRQAPLIIPLKATSTPVSIKQYPMSQEARLGIKPHIQRLLDQGILVPCQSPWNTPLLPVKKPGTNDYRPVQDLREVNKRVEDIHPTVPNPYNLLSGLPPSHQWYTVLDLKDAFFCLRLHPTSQPLFAFEWRDPEMGISGQLTWTRLPQGFKNSPTLFNEALHRDLADFRIQHPDLILLQYVDDLLLAATSELDCQQGTRALLQTLGNLGYRASAKKAQICQKQVKYLGYLLKEGQRWLTEARKETVMGQPTPKTPRQLREFLGKAGFCRLFIPGFAEMAAPLYPLTKPGTLFNWGPDQQKAYQEIKQALLTAPALGLPDLTKPFELFVDEKQGYAKGVLTQKLGPWRRPVAYLSKKLDPVAAGWPPCLRMVAAIAVLTKDAGKLTMGQPLVILAPHAVEALVKQPPDRWLSNARMTHYQALLLDTDRVQFGPVVALNPATLLPLPEEGLQHNCLDILAEAHGTRPDLTDQPLPDADHTWYTDGSSLLQEGQRKAGAAVTTETEVIWAKALPAGTSAQRAELIALTQALKMAEGKKLNVYTDSRYAFATAHIHGEIYRRRGWLTSEGKEIKNKDEILALLKALFLPKRLSIIHCPGHQKGHSAEARGNRMADQAARKAAITETPDTSTLLIENSSPSGGSKRTADGSEFEAGKRTADGSEFEKRTADGSEFESPKKKAKVE

SEQ ID NO: 2637 - protein, 2116 aa, synthetic construct
MPAAKRVKLDGGDKKYSIGLDIGTNSVGWAVITDEYKVPSKKFKVLGNTDRHSIKKNLIGALLFDSGETAEATRLKRTARRRYTRRKNRICYLQEIFSNEMAKVDDSFFHRLEESFLVEEDKKHERHPIFGNIVDEVAYHEKYPTIYHLRKKLVDSTDKADLRLIYLALAHMIKFRGHFLIEGDLNPDNSDVDKLFIQLVQTYNQLFEENPINASGVDAKAILSARLSKSRRLENLIAQLPGEKKNGLFGNLIALSLGLTPNFKSNFDLAEDAKLQLSKDTYDDDLDNLLAQIGDQYADLFLAAKNLSDAILLSDILRVNTEITKAPLSASMIKRYDEHHQDLTLLKALVRQQLPEKYKEIFFDQSKNGYAGYIDGGASQEEFYKFIKPILEKMDGTEELLVKLNREDLLRKQRTFDNGSIPHQIHLGELHAILRRQEDFYPFLKDNREKIEKILTFRIPYYVGPLARGNSRFAWMTRKSEETITPWNFEEVVDKGASAQSFIERMTNFDKNLPNEKVLPKHSLLYEYFTVYNELTKVKYVTEGMRKPAFLSGEQKKAIVDLLFKTNRKVTVKQLKEDYFKKIECFDSVEISGVEDRFNASLGTYHDLLKIIKDKDFLDNEENEDILEDIVLTLTLFEDREMIEERLKTYAHLFDDKVMKQLKRRRYTGWGRLSRKLINGIRDKQSGKTILDFLKSDGFANRNFMQLIHDDSLTFKEDIQKAQVSGQGDSLHEHIANLAGSPAIKKGILQTVKVVDELVKVMGRHKPENIVIEMARENQTTQKGQKNSRERMKRIEEGIKELGSQILKEHPVENTQLQNEKLYLYYLQNGRDMYVDQELDINRLSDYDVDHIVPQSFLKDDSIDNKVLTRSDKARGKSDNVPSEEVVKKMKNYWRQLLNAKLITQRKFDNLTKAERGGLSELDKAGFIKRQLVETRQITKHVAQILDSRMNTKYDENDKLIREVKVITLKSKLVSDFRKDFQFYKVREINNYHHAHDAYLNAVVGTALIKKYPKLESEFVYGDYKVYDVRKMIAKSEQEIGKATAKYFFYSNIMNFFKTEITLANGEIRKRPLIETNGETGEIVWDKGRDFATVRKVLSMPQVNIVKKTEVQTGGFSKESILPKRNSDKLIARKKDWDPKKYGGFDSPTVAYSVLVVAKVEKGKSKKLKSVKELLGITIMERSSFEKNPIDFLEAKGYKEVKKDLIIKLPKYSLFELENGRKRMLASAGELQKGNELALPSKYVNFLYLASHYEKLKGSPEDNEQKQLFVEQHKHYLDEIIEQISEFSKRVILADANLDKVLSAYNKHRDKPIREQAENIIHLFTLTNLGAPAAFKYFDTTIDRKRYTSTKEVLDATLIHQSITGLYETRIDLSQLGGDGGEAAAKGGSGGGGGTLNIEDEYRLHETSKEPDVSLGSTWLSDFPQAWAETGGMGLAVRQAPLIIPLKATSTPVSIKQYPMSQEARLGIKPHIQRLLDQGILVPCQSPWNTPLLPVKKPGTNDYRPVQDLREVNKRVEDIHPTVPNPYNLLSGLPPSHQWYTVLDLKDAFFCLRLHPTSQPLFAFEWRDPEMGISGQLTWTRLPQGFKNSPTLFNEALHRDLADFRIQHPDLILLQYVDDLLLAATSELDCQQGTRALLQTLGNLGYRASAKKAQICQKQVKYLGYLLKEGQRWLTEARKETVMGQPTPKTPRQLREFLGKAGFCRLFIPGFAEMAAPLYPLTKPGTLFNWGPDQQKAYQEIKQALLTAPALGLPDLTKPFELFVDEKQGYAKGVLTQKLGPWRRPVAYLSKKLDPVAAGWPPCLRMVAAIAVLTKDAGKLTMGQPLVILAPHAVEALVKQPPDRWLSNARMTHYQALLLDTDRVQFGPVVALNPATLLPLPEEGLQHNCLDILAEAHGTRPDLTDQPLPDADHTWYTDGSSLLQEGQRKAGAAVTTETEVIWAKALPAGTSAQRAELIALTQALKMAEGKKLNVYTDSRYAFATAHIHGEIYRRRGWLTSEGKEIKNKDEILALLKALFLPKRLSIIHCPGHQKGHSAEARGNRMADQAARKAAITETPDTSTLLIENSSPSGGSKRTADGSEFEAGKRTADGSEFEKRTADGSEFESPKKKAKVE

SEQ ID NO: 2638 - protein, 2116 aa, synthetic construct
MPAAKRVKLDGGDKKYSIGLDIGTNSVGWAVITDEYKVPSKKFKVLGNTDRHSIKKNLIGALLFDSGETAEATRLKRTARRRYTRRKNRICYLQEIFSNEMAKVDDSFFHRLEESFLVEEDKKHERHPIFGNIVDEVAYHEKYPTIYHLRKKLVDSTDKADLRLIYLALAHMIKFRGHFLIEGDLNPDNSDVDKLFIQLVQTYNQLFEENPINASGVDAKAILSARLSKSRRLENLIAQLPGEKKNGLFGNLIALSLGLTPNFKSNFDLAEDAKLQLSKDTYDDDLDNLLAQIGDQYADLFLAAKNLSDAILLSDILRVNTEITKAPLSASMIKRYDEHHQDLTLLKALVRQQLPEKYKEIFFDQSKNGYAGYIDGGASQEEFYKFIKPILEKMDGTEELLVKLNREDLLRKQRTFDNGSIPHQIHLGELHAILRRQEDFYPFLKDNREKIEKILTFRIPYYVGPLARGNSRFAWMTRKSEETITPWNFEEVVDKGASAQSFIERMTNFDKNLPNEKVLPKHSLLYEYFTVYNELTKVKYVTEGMRKPAFLSGEQKKAIVDLLFKTNRKVTVKQLKEDYFKKIECFDSVEISGVEDRFNASLGTYHDLLKIIKDKDFLDNEENEDILEDIVLTLTLFEDREMIEERLKTYAHLFDDKVMKQLKRRRYTGWGRLSRKLINGIRDKQSGKTILDFLKSDGFANRNFMQLIHDDSLTFKEDIQKAQVSGQGDSLHEHIANLAGSPAIKKGILQTVKVVDELVKVMGRHKPENIVIEMARENQTTQKGQKNSRERMKRIEEGIKELGSQILKEHPVENTQLQNEKLYLYYLQNGRDMYVDQELDINRLSDYDVDHIVPQSFLKDDSIDNKVLTRSDKARGKSDNVPSEEVVKKMKNYWRQLLNAKLITQRKFDNLTKAERGGLSELDKAGFIKRQLVETRQITKHVAQILDSRMNTKYDENDKLIREVKVITLKSKLVSDFRKDFQFYKVREINNYHHAHDAYLNAVVGTALIKKYPKLESEFVYGDYKVYDVRKMIAKSEQEIGKATAKYFFYSNIMNFFKTEITLANGEIRKRPLIETNGETGEIVWDKGRDFATVRKVLSMPQVNIVKKTEVQTGGFSKESILPKRNSDKLIARKKDWDPKKYGGFDSPTVAYSVLVVAKVEKGKSKKLKSVKELLGITIMERSSFEKNPIDFLEAKGYKEVKKDLIIKLPKYSLFELENGRKRMLASAGELQKGNELALPSKYVNFLYLASHYEKLKGSPEDNEQKQLFVEQHKHYLDEIIEQISEFSKRVILADANLDKVLSAYNKHRDKPIREQAENIIHLFTLTNLGAPAAFKYFDTTIDRKRYTSTKEVLDATLIHQSITGLYETRIDLSQLGGDGGGGGEAAAKGGSGGTLNIEDEYRLHETSKEPDVSLGSTWLSDFPQAWAETGGMGLAVRQAPLIIPLKATSTPVSIKQYPMSQEARLGIKPHIQRLLDQGILVPCQSPWNTPLLPVKKPGTNDYRPVQDLREVNKRVEDIHPTVPNPYNLLSGLPPSHQWYTVLDLKDAFFCLRLHPTSQPLFAFEWRDPEMGISGQLTWTRLPQGFKNSPTLFNEALHRDLADFRIQHPDLILLQYVDDLLLAATSELDCQQGTRALLQTLGNLGYRASAKKAQICQKQVKYLGYLLKEGQRWLTEARKETVMGQPTPKTPRQLREFLGKAGFCRLFIPGFAEMAAPLYPLTKPGTLFNWGPDQQKAYQEIKQALLTAPALGLPDLTKPFELFVDEKQGYAKGVLTQKLGPWRRPVAYLSKKLDPVAAGWPPCLRMVAAIAVLTKDAGKLTMGQPLVILAPHAVEALVKQPPDRWLSNARMTHYQALLLDTDRVQFGPVVALNPATLLPLPEEGLQHNCLDILAEAHGTRPDLTDQPLPDADHTWYTDGSSLLQEGQRKAGAAVTTETEVIWAKALPAGTSAQRAELIALTQALKMAEGKKLNVYTDSRYAFATAHIHGEIYRRRGWLTSEGKEIKNKDEILALLKALFLPKRLSIIHCPGHQKGHSAEARGNRMADQAARKAAITETPDTSTLLIENSSPSGGSKRTADGSEFEAGKRTADGSEFEKRTADGSEFESPKKKAKVE

SEQ ID NO: 2639 - protein, 2115 aa, synthetic construct
MPAAKRVKLDGGDKKYSIGLDIGTNSVGWAVITDEYKVPSKKFKVLGNTDRHSIKKNLIGALLFDSGETAEATRLKRTARRRYTRRKNRICYLQEIFSNEMAKVDDSFFHRLEESFLVEEDKKHERHPIFGNIVDEVAYHEKYPTIYHLRKKLVDSTDKADLRLIYLALAHMIKFRGHFLIEGDLNPDNSDVDKLFIQLVQTYNQLFEENPINASGVDAKAILSARLSKSRRLENLIAQLPGEKKNGLFGNLIALSLGLTPNFKSNFDLAEDAKLQLSKDTYDDDLDNLLAQIGDQYADLFLAAKNLSDAILLSDILRVNTEITKAPLSASMIKRYDEHHQDLTLLKALVRQQLPEKYKEIFFDQSKNGYAGYIDGGASQEEFYKFIKPILEKMDGTEELLVKLNREDLLRKQRTFDNGSIPHQIHLGELHAILRRQEDFYPFLKDNREKIEKILTFRIPYYVGPLARGNSRFAWMTRKSEETITPWNFEEVVDKGASAQSFIERMTNFDKNLPNEKVLPKHSLLYEYFTVYNELTKVKYVTEGMRKPAFLSGEQKKAIVDLLFKTNRKVTVKQLKEDYFKKIECFDSVEISGVEDRFNASLGTYHDLLKIIKDKDFLDNEENEDILEDIVLTLTLFEDREMIEERLKTYAHLFDDKVMKQLKRRRYTGWGRLSRKLINGIRDKQSGKTILDFLKSDGFANRNFMQLIHDDSLTFKEDIQKAQVSGQGDSLHEHIANLAGSPAIKKGILQTVKVVDELVKVMGRHKPENIVIEMARENQTTQKGQKNSRERMKRIEEGIKELGSQILKEHPVENTQLQNEKLYLYYLQNGRDMYVDQELDINRLSDYDVDHIVPQSFLKDDSIDNKVLTRSDKARGKSDNVPSEEVVKKMKNYWRQLLNAKLITQRKFDNLTKAERGGLSELDKAGFIKRQLVETRQITKHVAQILDSRMNTKYDENDKLIREVKVITLKSKLVSDFRKDFQFYKVREINNYHHAHDAYLNAVVGTALIKKYPKLESEFVYGDYKVYDVRKMIAKSEQEIGKATAKYFFYSNIMNFFKTEITLANGEIRKRPLIETNGETGEIVWDKGRDFATVRKVLSMPQVNIVKKTEVQTGGFSKESILPKRNSDKLIARKKDWDPKKYGGFDSPTVAYSVLVVAKVEKGKSKKLKSVKELLGITIMERSSFEKNPIDFLEAKGYKEVKKDLIIKLPKYSLFELENGRKRMLASAGELQKGNELALPSKYVNFLYLASHYEKLKGSPEDNEQKQLFVEQHKHYLDEIIEQISEFSKRVILADANLDKVLSAYNKHRDKPIREQAENIIHLFTLTNLGAPAAFKYFDTTIDRKRYTSTKEVLDATLIHQSITGLYETRIDLSQLGGDGGGGGGSGGGGSGGTLNIEDEYRLHETSKEPDVSLGSTWLSDFPQAWAETGGMGLAVRQAPLIIPLKATSTPVSIKQYPMSQEARLGIKPHIQRLLDQGILVPCQSPWNTPLLPVKKPGTNDYRPVQDLREVNKRVEDIHPTVPNPYNLLSGLPPSHQWYTVLDLKDAFFCLRLHPTSQPLFAFEWRDPEMGISGQLTWTRLPQGFKNSPTLFNEALHRDLADFRIQHPDLILLQYVDDLLLAATSELDCQQGTRALLQTLGNLGYRASAKKAQICQKQVKYLGYLLKEGQRWLTEARKETVMGQPTPKTPRQLREFLGKAGFCRLFIPGFAEMAAPLYPLTKPGTLFNWGPDQQKAYQEIKQALLTAPALGLPDLTKPFELFVDEKQGYAKGVLTQKLGPWRRPVAYLSKKLDPVAAGWPPCLRMVAAIAVLTKDAGKLTMGQPLVILAPHAVEALVKQPPDRWLSNARMTHYQALLLDTDRVQFGPVVALNPATLLPLPEEGLQHNCLDILAEAHGTRPDLTDQPLPDADHTWYTDGSSLLQEGQRKAGAAVTTETEVIWAKALPAGTSAQRAELIALTQALKMAEGKKLNVYTDSRYAFATAHIHGEIYRRRGWLTSEGKEIKNKDEILALLKALFLPKRLSIIHCPGHQKGHSAEARGNRMADQAARKAAITETPDTSTLLIENSSPSGGSKRTADGSEFEAGKRTADGSEFEKRTADGSEFESPKKKAKVE

SEQ ID NO: 2640 - protein, 2116 aa, synthetic construct
MPAAKRVKLDGGDKKYSIGLDIGTNSVGWAVITDEYKVPSKKFKVLGNTDRHSIKKNLIGALLFDSGETAEATRLKRTARRRYTRRKNRICYLQEIFSNEMAKVDDSFFHRLEESFLVEEDKKHERHPIFGNIVDEVAYHEKYPTIYHLRKKLVDSTDKADLRLIYLALAHMIKFRGHFLIEGDLNPDNSDVDKLFIQLVQTYNQLFEENPINASGVDAKAILSARLSKSRRLENLIAQLPGEKKNGLFGNLIALSLGLTPNFKSNFDLAEDAKLQLSKDTYDDDLDNLLAQIGDQYADLFLAAKNLSDAILLSDILRVNTEITKAPLSASMIKRYDEHHQDLTLLKALVRQQLPEKYKEIFFDQSKNGYAGYIDGGASQEEFYKFIKPILEKMDGTEELLVKLNREDLLRKQRTFDNGSIPHQIHLGELHAILRRQEDFYPFLKDNREKIEKILTFRIPYYVGPLARGNSRFAWMTRKSEETITPWNFEEVVDKGASAQSFIERMTNFDKNLPNEKVLPKHSLLYEYFTVYNELTKVKYVTEGMRKPAFLSGEQKKAIVDLLFKTNRKVTVKQLKEDYFKKIECFDSVEISGVEDRFNASLGTYHDLLKIIKDKDFLDNEENEDILEDIVLTLTLFEDREMIEERLKTYAHLFDDKVMKQLKRRRYTGWGRLSRKLINGIRDKQSGKTILDFLKSDGFANRNFMQLIHDDSLTFKEDIQKAQVSGQGDSLHEHIANLAGSPAIKKGILQTVKVVDELVKVMGRHKPENIVIEMARENQTTQKGQKNSRERMKRIEEGIKELGSQILKEHPVENTQLQNEKLYLYYLQNGRDMYVDQELDINRLSDYDVDHIVPQSFLKDDSIDNKVLTRSDKARGKSDNVPSEEVVKKMKNYWRQLLNAKLITQRKFDNLTKAERGGLSELDKAGFIKRQLVETRQITKHVAQILDSRMNTKYDENDKLIREVKVITLKSKLVSDFRKDFQFYKVREINNYHHAHDAYLNAVVGTALIKKYPKLESEFVYGDYKVYDVRKMIAKSEQEIGKATAKYFFYSNIMNFFKTEITLANGEIRKRPLIETNGETGEIVWDKGRDFATVRKVLSMPQVNIVKKTEVQTGGFSKESILPKRNSDKLIARKKDWDPKKYGGFDSPTVAYSVLVVAKVEKGKSKKLKSVKELLGITIMERSSFEKNPIDFLEAKGYKEVKKDLIIKLPKYSLFELENGRKRMLASAGELQKGNELALPSKYVNFLYLASHYEKLKGSPEDNEQKQLFVEQHKHYLDEIIEQISEFSKRVILADANLDKVLSAYNKHRDKPIREQAENIIHLFTLTNLGAPAAFKYFDTTIDRKRYTSTKEVLDATLIHQSITGLYETRIDLSQLGGDGGPAPGGSEAAAKGGTLNIEDEYRLHETSKEPDVSLGSTWLSDFPQAWAETGGMGLAVRQAPLIIPLKATSTPVSIKQYPMSQEARLGIKPHIQRLLDQGILVPCQSPWNTPLLPVKKPGTNDYRPVQDLREVNKRVEDIHPTVPNPYNLLSGLPPSHQWYTVLDLKDAFFCLRLHPTSQPLFAFEWRDPEMGISGQLTWTRLPQGFKNSPTLFNEALHRDLADFRIQHPDLILLQYVDDLLLAATSELDCQQGTRALLQTLGNLGYRASAKKAQICQKQVKYLGYLLKEGQRWLTEARKETVMGQPTPKTPRQLREFLGKAGFCRLFIPGFAEMAAPLYPLTKPGTLFNWGPDQQKAYQEIKQALLTAPALGLPDLTKPFELFVDEKQGYAKGVLTQKLGPWRRPVAYLSKKLDPVAAGWPPCLRMVAAIAVLTKDAGKLTMGQPLVILAPHAVEALVKQPPDRWLSNARMTHYQALLLDTDRVQFGPVVALNPATLLPLPEEGLQHNCLDILAEAHGTRPDLTDQPLPDADHTWYTDGSSLLQEGQRKAGAAVTTETEVIWAKALPAGTSAQRAELIALTQALKMAEGKKLNVYTDSRYAFATAHIHGEIYRRRGWLTSEGKEIKNKDEILALLKALFLPKRLSIIHCPGHQKGHSAEARGNRMADQAARKAAITETPDTSTLLIENSSPSGGSKRTADGSEFEAGKRTADGSEFEKRTADGSEFESPKKKAKVE

SEQ ID NO: 2641 - protein, 2116 aa, synthetic construct
MPAAKRVKLDGGDKKYSIGLDIGTNSVGWAVITDEYKVPSKKFKVLGNTDRHSIKKNLIGALLFDSGETAEATRLKRTARRRYTRRKNRICYLQEIFSNEMAKVDDSFFHRLEESFLVEEDKKHERHPIFGNIVDEVAYHEKYPTIYHLRKKLVDSTDKADLRLIYLALAHMIKFRGHFLIEGDLNPDNSDVDKLFIQLVQTYNQLFEENPINASGVDAKAILSARLSKSRRLENLIAQLPGEKKNGLFGNLIALSLGLTPNFKSNFDLAEDAKLQLSKDTYDDDLDNLLAQIGDQYADLFLAAKNLSDAILLSDILRVNTEITKAPLSASMIKRYDEHHQDLTLLKALVRQQLPEKYKEIFFDQSKNGYAGYIDGGASQEEFYKFIKPILEKMDGTEELLVKLNREDLLRKQRTFDNGSIPHQIHLGELHAILRRQEDFYPFLKDNREKIEKILTFRIPYYVGPLARGNSRFAWMTRKSEETITPWNFEEVVDKGASAQSFIERMTNFDKNLPNEKVLPKHSLLYEYFTVYNELTKVKYVTEGMRKPAFLSGEQKKAIVDLLFKTNRKVTVKQLKEDYFKKIECFDSVEISGVEDRFNASLGTYHDLLKIIKDKDFLDNEENEDILEDIVLTLTLFEDREMIEERLKTYAHLFDDKVMKQLKRRRYTGWGRLSRKLINGIRDKQSGKTILDFLKSDGFANRNFMQLIHDDSLTFKEDIQKAQVSGQGDSLHEHIANLAGSPAIKKGILQTVKVVDELVKVMGRHKPENIVIEMARENQTTQKGQKNSRERMKRIEEGIKELGSQILKEHPVENTQLQNEKLYLYYLQNGRDMYVDQELDINRLSDYDVDHIVPQSFLKDDSIDNKVLTRSDKARGKSDNVPSEEVVKKMKNYWRQLLNAKLITQRKFDNLTKAERGGLSELDKAGFIKRQLVETRQITKHVAQILDSRMNTKYDENDKLIREVKVITLKSKLVSDFRKDFQFYKVREINNYHHAHDAYLNAVVGTALIKKYPKLESEFVYGDYKVYDVRKMIAKSEQEIGKATAKYFFYSNIMNFFKTEITLANGEIRKRPLIETNGETGEIVWDKGRDFATVRKVLSMPQVNIVKKTEVQTGGFSKESILPKRNSDKLIARKKDWDPKKYGGFDSPTVAYSVLVVAKVEKGKSKKLKSVKELLGITIMERSSFEKNPIDFLEAKGYKEVKKDLIIKLPKYSLFELENGRKRMLASAGELQKGNELALPSKYVNFLYLASHYEKLKGSPEDNEQKQLFVEQHKHYLDEIIEQISEFSKRVILADANLDKVLSAYNKHRDKPIREQAENIIHLFTLTNLGAPAAFKYFDTTIDRKRYTSTKEVLDATLIHQSITGLYETRIDLSQLGGDGGGSSEAAAKPAPGGTLNIEDEYRLHETSKEPDVSLGSTWLSDFPQAWAETGGMGLAVRQAPLIIPLKATSTPVSIKQYPMSQEARLGIKPHIQRLLDQGILVPCQSPWNTPLLPVKKPGTNDYRPVQDLREVNKRVEDIHPTVPNPYNLLSGLPPSHQWYTVLDLKDAFFCLRLHPTSQPLFAFEWRDPEMGISGQLTWTRLPQGFKNSPTLFNEALHRDLADFRIQHPDLILLQYVDDLLLAATSELDCQQGTRALLQTLGNLGYRASAKKAQICQKQVKYLGYLLKEGQRWLTEARKETVMGQPTPKTPRQLREFLGKAGFCRLFIPGFAEMAAPLYPLTKPGTLFNWGPDQQKAYQEIKQALLTAPALGLPDLTKPFELFVDEKQGYAKGVLTQKLGPWRRPVAYLSKKLDPVAAGWPPCLRMVAAIAVLTKDAGKLTMGQPLVILAPHAVEALVKQPPDRWLSNARMTHYQALLLDTDRVQFGPVVALNPATLLPLPEEGLQHNCLDILAEAHGTRPDLTDQPLPDADHTWYTDGSSLLQEGQRKAGAAVTTETEVIWAKALPAGTSAQRAELIALTQALKMAEGKKLNVYTDSRYAFATAHIHGEIYRRRGWLTSEGKEIKNKDEILALLKALFLPKRLSIIHCPGHQKGHSAEARGNRMADQAARKAAITETPDTSTLLIENSSPSGGSKRTADGSEFEAGKRTADGSEFEKRTADGSEFESPKKKAKVE

SEQ ID NO: 2642 - protein, 2111 aa, synthetic construct
MPAAKRVKLDGGDKKYSIGLDIGTNSVGWAVITDEYKVPSKKFKVLGNTDRHSIKKNLIGALLFDSGETAEATRLKRTARRRYTRRKNRICYLQEIFSNEMAKVDDSFFHRLEESFLVEEDKKHERHPIFGNIVDEVAYHEKYPTIYHLRKKLVDSTDKADLRLIYLALAHMIKFRGHFLIEGDLNPDNSDVDKLFIQLVQTYNQLFEENPINASGVDAKAILSARLSKSRRLENLIAQLPGEKKNGLFGNLIALSLGLTPNFKSNFDLAEDAKLQLSKDTYDDDLDNLLAQIGDQYADLFLAAKNLSDAILLSDILRVNTEITKAPLSASMIKRYDEHHQDLTLLKALVRQQLPEKYKEIFFDQSKNGYAGYIDGGASQEEFYKFIKPILEKMDGTEELLVKLNREDLLRKQRTFDNGSIPHQIHLGELHAILRRQEDFYPFLKDNREKIEKILTFRIPYYVGPLARGNSRFAWMTRKSEETITPWNFEEVVDKGASAQSFIERMTNFDKNLPNEKVLPKHSLLYEYFTVYNELTKVKYVTEGMRKPAFLSGEQKKAIVDLLFKTNRKVTVKQLKEDYFKKIECFDSVEISGVEDRFNASLGTYHDLLKIIKDKDFLDNEENEDILEDIVLTLTLFEDREMIEERLKTYAHLFDDKVMKQLKRRRYTGWGRLSRKLINGIRDKQSGKTILDFLKSDGFANRNFMQLIHDDSLTFKEDIQKAQVSGQGDSLHEHIANLAGSPAIKKGILQTVKVVDELVKVMGRHKPENIVIEMARENQTTQKGQKNSRERMKRIEEGIKELGSQILKEHPVENTQLQNEKLYLYYLQNGRDMYVDQELDINRLSDYDVDHIVPQSFLKDDSIDNKVLTRSDKARGKSDNVPSEEVVKKMKNYWRQLLNAKLITQRKFDNLTKAERGGLSELDKAGFIKRQLVETRQITKHVAQILDSRMNTKYDENDKLIREVKVITLKSKLVSDFRKDFQFYKVREINNYHHAHDAYLNAVVGTALIKKYPKLESEFVYGDYKVYDVRKMIAKSEQEIGKATAKYFFYSNIMNFFKTEITLANGEIRKRPLIETNGETGEIVWDKGRDFATVRKVLSMPQVNIVKKTEVQTGGFSKESILPKRNSDKLIARKKDWDPKKYGGFDSPTVAYSVLVVAKVEKGKSKKLKSVKELLGITIMERSSFEKNPIDFLEAKGYKEVKKDLIIKLPKYSLFELENGRKRMLASAGELQKGNELALPSKYVNFLYLASHYEKLKGSPEDNEQKQLFVEQHKHYLDEIIEQISEFSKRVILADANLDKVLSAYNKHRDKPIREQAENIIHLFTLTNLGAPAAFKYFDTTIDRKRYTSTKEVLDATLIHQSITGLYETRIDLSQLGGDGGGGGGGGGGTLNIEDEYRLHETSKEPDVSLGSTWLSDFPQAWAETGGMGLAVRQAPLIIPLKATSTPVSIKQYPMSQEARLGIKPHIQRLLDQGILVPCQSPWNTPLLPVKKPGTNDYRPVQDLREVNKRVEDIHPTVPNPYNLLSGLPPSHQWYTVLDLKDAFFCLRLHPTSQPLFAFEWRDPEMGISGQLTWTRLPQGFKNSPTLFNEALHRDLADFRIQHPDLILLQYVDDLLLAATSELDCQQGTRALLQTLGNLGYRASAKKAQICQKQVKYLGYLLKEGQRWLTEARKETVMGQPTPKTPRQLREFLGKAGFCRLFIPGFAEMAAPLYPLTKPGTLFNWGPDQQKAYQEIKQALLTAPALGLPDLTKPFELFVDEKQGYAKGVLTQKLGPWRRPVAYLSKKLDPVAAGWPPCLRMVAAIAVLTKDAGKLTMGQPLVILAPHAVEALVKQPPDRWLSNARMTHYQALLLDTDRVQFGPVVALNPATLLPLPEEGLQHNCLDILAEAHGTRPDLTDQPLPDADHTWYTDGSSLLQEGQRKAGAAVTTETEVIWAKALPAGTSAQRAELIALTQALKMAEGKKLNVYTDSRYAFATAHIHGEIYRRRGWLTSEGKEIKNKDEILALLKALFLPKRLSIIHCPGHQKGHSAEARGNRMADQAARKAAITETPDTSTLLIENSSPSGGSKRTADGSEFEAGKRTADGSEFEKRTADGSEFESPKKKAKVE

SEQ ID NO: 2643 - protein, 2111 aa, synthetic construct
MPAAKRVKLDGGDKKYSIGLDIGTNSVGWAVITDEYKVPSKKFKVLGNTDRHSIKKNLIGALLFDSGETAEATRLKRTARRRYTRRKNRICYLQEIFSNEMAKVDDSFFHRLEESFLVEEDKKHERHPIFGNIVDEVAYHEKYPTIYHLRKKLVDSTDKADLRLIYLALAHMIKFRGHFLIEGDLNPDNSDVDKLFIQLVQTYNQLFEENPINASGVDAKAILSARLSKSRRLENLIAQLPGEKKNGLFGNLIALSLGLTPNFKSNFDLAEDAKLQLSKDTYDDDLDNLLAQIGDQYADLFLAAKNLSDAILLSDILRVNTEITKAPLSASMIKRYDEHHQDLTLLKALVRQQLPEKYKEIFFDQSKNGYAGYIDGGASQEEFYKFIKPILEKMDGTEELLVKLNREDLLRKQRTFDNGSIPHQIHLGELHAILRRQEDFYPFLKDNREKIEKILTFRIPYYVGPLARGNSRFAWMTRKSEETITPWNFEEVVDKGASAQSFIERMTNFDKNLPNEKVLPKHSLLYEYFTVYNELTKVKYVTEGMRKPAFLSGEQKKAIVDLLFKTNRKVTVKQLKEDYFKKIECFDSVEISGVEDRFNASLGTYHDLLKIIKDKDFLDNEENEDILEDIVLTLTLFEDREMIEERLKTYAHLFDDKVMKQLKRRRYTGWGRLSRKLINGIRDKQSGKTILDFLKSDGFANRNFMQLIHDDSLTFKEDIQKAQVSGQGDSLHEHIANLAGSPAIKKGILQTVKVVDELVKVMGRHKPENIVIEMARENQTTQKGQKNSRERMKRIEEGIKELGSQILKEHPVENTQLQNEKLYLYYLQNGRDMYVDQELDINRLSDYDVDHIVPQSFLKDDSIDNKVLTRSDKARGKSDNVPSEEVVKKMKNYWRQLLNAKLITQRKFDNLTKAERGGLSELDKAGFIKRQLVETRQITKHVAQILDSRMNTKYDENDKLIREVKVITLKSKLVSDFRKDFQFYKVREINNYHHAHDAYLNAVVGTALIKKYPKLESEFVYGDYKVYDVRKMIAKSEQEIGKATAKYFFYSNIMNFFKTEITLANGEIRKRPLIETNGETGEIVWDKGRDFATVRKVLSMPQVNIVKKTEVQTGGFSKESILPKRNSDKLIARKKDWDPKKYGGFDSPTVAYSVLVVAKVEKGKSKKLKSVKELLGITIMERSSFEKNPIDFLEAKGYKEVKKDLIIKLPKYSLFELENGRKRMLASAGELQKGNELALPSKYVNFLYLASHYEKLKGSPEDNEQKQLFVEQHKHYLDEIIEQISEFSKRVILADANLDKVLSAYNKHRDKPIREQAENIIHLFTLTNLGAPAAFKYFDTTIDRKRYTSTKEVLDATLIHQSITGLYETRIDLSQLGGDGGPAPGGSGGTLNIEDEYRLHETSKEPDVSLGSTWLSDFPQAWAETGGMGLAVRQAPLIIPLKATSTPVSIKQYPMSQEARLGIKPHIQRLLDQGILVPCQSPWNTPLLPVKKPGTNDYRPVQDLREVNKRVEDIHPTVPNPYNLLSGLPPSHQWYTVLDLKDAFFCLRLHPTSQPLFAFEWRDPEMGISGQLTWTRLPQGFKNSPTLFNEALHRDLADFRIQHPDLILLQYVDDLLLAATSELDCQQGTRALLQTLGNLGYRASAKKAQICQKQVKYLGYLLKEGQRWLTEARKETVMGQPTPKTPRQLREFLGKAGFCRLFIPGFAEMAAPLYPLTKPGTLFNWGPDQQKAYQEIKQALLTAPALGLPDLTKPFELFVDEKQGYAKGVLTQKLGPWRRPVAYLSKKLDPVAAGWPPCLRMVAAIAVLTKDAGKLTMGQPLVILAPHAVEALVKQPPDRWLSNARMTHYQALLLDTDRVQFGPVVALNPATLLPLPEEGLQHNCLDILAEAHGTRPDLTDQPLPDADHTWYTDGSSLLQEGQRKAGAAVTTETEVIWAKALPAGTSAQRAELIALTQALKMAEGKKLNVYTDSRYAFATAHIHGEIYRRRGWLTSEGKEIKNKDEILALLKALFLPKRLSIIHCPGHQKGHSAEARGNRMADQAARKAAITETPDTSTLLIENSSPSGGSKRTADGSEFEAGKRTADGSEFEKRTADGSEFESPKKKAKVE

SEQ ID NO: 2644 - protein, 2135 aa, synthetic construct
MPAAKRVKLDGGDKKYSIGLDIGTNSVGWAVITDEYKVPSKKFKVLGNTDRHSIKKNLIGALLFDSGETAEATRLKRTARRRYTRRKNRICYLQEIFSNEMAKVDDSFFHRLEESFLVEEDKKHERHPIFGNIVDEVAYHEKYPTIYHLRKKLVDSTDKADLRLIYLALAHMIKFRGHFLIEGDLNPDNSDVDKLFIQLVQTYNQLFEENPINASGVDAKAILSARLSKSRRLENLIAQLPGEKKNGLFGNLIALSLGLTPNFKSNFDLAEDAKLQLSKDTYDDDLDNLLAQIGDQYADLFLAAKNLSDAILLSDILRVNTEITKAPLSASMIKRYDEHHQDLTLLKALVRQQLPEKYKEIFFDQSKNGYAGYIDGGASQEEFYKFIKPILEKMDGTEELLVKLNREDLLRKQRTFDNGSIPHQIHLGELHAILRRQEDFYPFLKDNREKIEKILTFRIPYYVGPLARGNSRFAWMTRKSEETITPWNFEEVVDKGASAQSFIERMTNFDKNLPNEKVLPKHSLLYEYFTVYNELTKVKYVTEGMRKPAFLSGEQKKAIVDLLFKTNRKVTVKQLKEDYFKKIECFDSVEISGVEDRFNASLGTYHDLLKIIKDKDFLDNEENEDILEDIVLTLTLFEDREMIEERLKTYAHLFDDKVMKQLKRRRYTGWGRLSRKLINGIRDKQSGKTILDFLKSDGFANRNFMQLIHDDSLTFKEDIQKAQVSGQGDSLHEHIANLAGSPAIKKGILQTVKVVDELVKVMGRHKPENIVIEMARENQTTQKGQKNSRERMKRIEEGIKELGSQILKEHPVENTQLQNEKLYLYYLQNGRDMYVDQELDINRLSDYDVDHIVPQSFLKDDSIDNKVLTRSDKARGKSDNVPSEEVVKKMKNYWRQLLNAKLITQRKFDNLTKAERGGLSELDKAGFIKRQLVETRQITKHVAQILDSRMNTKYDENDKLIREVKVITLKSKLVSDFRKDFQFYKVREINNYHHAHDAYLNAVVGTALIKKYPKLESEFVYGDYKVYDVRKMIAKSEQEIGKATAKYFFYSNIMNFFKTEITLANGEIRKRPLIETNGETGEIVWDKGRDFATVRKVLSMPQVNIVKKTEVQTGGFSKESILPKRNSDKLIARKKDWDPKKYGGFDSPTVAYSVLVVAKVEKGKSKKLKSVKELLGITIMERSSFEKNPIDFLEAKGYKEVKKDLIIKLPKYSLFELENGRKRMLASAGELQKGNELALPSKYVNFLYLASHYEKLKGSPEDNEQKQLFVEQHKHYLDEIIEQISEFSKRVILADANLDKVLSAYNKHRDKPIREQAENIIHLFTLTNLGAPAAFKYFDTTIDRKRYTSTKEVLDATLIHQSITGLYETRIDLSQLGGDGGGGGGSGGGGSGGGGSGGGGSGGGGSGGGGSGGTLNIEDEYRLHETSKEPDVSLGSTWLSDFPQAWAETGGMGLAVRQAPLIIPLKATSTPVSIKQYPMSQEARLGIKPHIQRLLDQGILVPCQSPWNTPLLPVKKPGTNDYRPVQDLREVNKRVEDIHPTVPNPYNLLSGLPPSHQWYTVLDLKDAFFCLRLHPTSQPLFAFEWRDPEMGISGQLTWTRLPQGFKNSPTLFNEALHRDLADFRIQHPDLILLQYVDDLLLAATSELDCQQGTRALLQTLGNLGYRASAKKAQICQKQVKYLGYLLKEGQRWLTEARKETVMGQPTPKTPRQLREFLGKAGFCRLFIPGFAEMAAPLYPLTKPGTLFNWGPDQQKAYQEIKQALLTAPALGLPDLTKPFELFVDEKQGYAKGVLTQKLGPWRRPVAYLSKKLDPVAAGWPPCLRMVAAIAVLTKDAGKLTMGQPLVILAPHAVEALVKQPPDRWLSNARMTHYQALLLDTDRVQFGPVVALNPATLLPLPEEGLQHNCLDILAEAHGTRPDLTDQPLPDADHTWYTDGSSLLQEGQRKAGAAVTTETEVIWAKALPAGTSAQRAELIALTQALKMAEGKKLNVYTDSRYAFATAHIHGEIYRRRGWLTSEGKEIKNKDEILALLKALFLPKRLSIIHCPGHQKGHSAEARGNRMADQAARKAAITETPDTSTLLIENSSPSGGSKRTADGSEFEAGKRTADGSEFEKRTADGSEFESPKKKAKVE

SEQ ID NO: 2645 - protein, 2116 aa, synthetic construct
MPAAKRVKLDGGDKKYSIGLDIGTNSVGWAVITDEYKVPSKKFKVLGNTDRHSIKKNLIGALLFDSGETAEATRLKRTARRRYTRRKNRICYLQEIFSNEMAKVDDSFFHRLEESFLVEEDKKHERHPIFGNIVDEVAYHEKYPTIYHLRKKLVDSTDKADLRLIYLALAHMIKFRGHFLIEGDLNPDNSDVDKLFIQLVQTYNQLFEENPINASGVDAKAILSARLSKSRRLENLIAQLPGEKKNGLFGNLIALSLGLTPNFKSNFDLAEDAKLQLSKDTYDDDLDNLLAQIGDQYADLFLAAKNLSDAILLSDILRVNTEITKAPLSASMIKRYDEHHQDLTLLKALVRQQLPEKYKEIFFDQSKNGYAGYIDGGASQEEFYKFIKPILEKMDGTEELLVKLNREDLLRKQRTFDNGSIPHQIHLGELHAILRRQEDFYPFLKDNREKIEKILTFRIPYYVGPLARGNSRFAWMTRKSEETITPWNFEEVVDKGASAQSFIERMTNFDKNLPNEKVLPKHSLLYEYFTVYNELTKVKYVTEGMRKPAFLSGEQKKAIVDLLFKTNRKVTVKQLKEDYFKKIECFDSVEISGVEDRFNASLGTYHDLLKIIKDKDFLDNEENEDILEDIVLTLTLFEDREMIEERLKTYAHLFDDKVMKQLKRRRYTGWGRLSRKLINGIRDKQSGKTILDFLKSDGFANRNFMQLIHDDSLTFKEDIQKAQVSGQGDSLHEHIANLAGSPAIKKGILQTVKVVDELVKVMGRHKPENIVIEMARENQTTQKGQKNSRERMKRIEEGIKELGSQILKEHPVENTQLQNEKLYLYYLQNGRDMYVDQELDINRLSDYDVDHIVPQSFLKDDSIDNKVLTRSDKARGKSDNVPSEEVVKKMKNYWRQLLNAKLITQRKFDNLTKAERGGLSELDKAGFIKRQLVETRQITKHVAQILDSRMNTKYDENDKLIREVKVITLKSKLVSDFRKDFQFYKVREINNYHHAHDAYLNAVVGTALIKKYPKLESEFVYGDYKVYDVRKMIAKSEQEIGKATAKYFFYSNIMNFFKTEITLANGEIRKRPLIETNGETGEIVWDKGRDFATVRKVLSMPQVNIVKKTEVQTGGFSKESILPKRNSDKLIARKKDWDPKKYGGFDSPTVAYSVLVVAKVEKGKSKKLKSVKELLGITIMERSSFEKNPIDFLEAKGYKEVKKDLIIKLPKYSLFELENGRKRMLASAGELQKGNELALPSKYVNFLYLASHYEKLKGSPEDNEQKQLFVEQHKHYLDEIIEQISEFSKRVILADANLDKVLSAYNKHRDKPIREQAENIIHLFTLTNLGAPAAFKYFDTTIDRKRYTSTKEVLDATLIHQSITGLYETRIDLSQLGGDGGPAPEAAAKGSSGGTLNIEDEYRLHETSKEPDVSLGSTWLSDFPQAWAETGGMGLAVRQAPLIIPLKATSTPVSIKQYPMSQEARLGIKPHIQRLLDQGILVPCQSPWNTPLLPVKKPGTNDYRPVQDLREVNKRVEDIHPTVPNPYNLLSGLPPSHQWYTVLDLKDAFFCLRLHPTSQPLFAFEWRDPEMGISGQLTWTRLPQGFKNSPTLFNEALHRDLADFRIQHPDLILLQYVDDLLLAATSELDCQQGTRALLQTLGNLGYRASAKKAQICQKQVKYLGYLLKEGQRWLTEARKETVMGQPTPKTPRQLREFLGKAGFCRLFIPGFAEMAAPLYPLTKPGTLFNWGPDQQKAYQEIKQALLTAPALGLPDLTKPFELFVDEKQGYAKGVLTQKLGPWRRPVAYLSKKLDPVAAGWPPCLRMVAAIAVLTKDAGKLTMGQPLVILAPHAVEALVKQPPDRWLSNARMTHYQALLLDTDRVQFGPVVALNPATLLPLPEEGLQHNCLDILAEAHGTRPDLTDQPLPDADHTWYTDGSSLLQEGQRKAGAAVTTETEVIWAKALPAGTSAQRAELIALTQALKMAEGKKLNVYTDSRYAFATAHIHGEIYRRRGWLTSEGKEIKNKDEILALLKALFLPKRLSIIHCPGHQKGHSAEARGNRMADQAARKAAITETPDTSTLLIENSSPSGGSKRTADGSEFEAGKRTADGSEFEKRTADGSEFESPKKKAKVE

SEQ ID NO: 2646 - protein, 2108 aa, synthetic construct
MPAAKRVKLDGGDKKYSIGLDIGTNSVGWAVITDEYKVPSKKFKVLGNTDRHSIKKNLIGALLFDSGETAEATRLKRTARRRYTRRKNRICYLQEIFSNEMAKVDDSFFHRLEESFLVEEDKKHERHPIFGNIVDEVAYHEKYPTIYHLRKKLVDSTDKADLRLIYLALAHMIKFRGHFLIEGDLNPDNSDVDKLFIQLVQTYNQLFEENPINASGVDAKAILSARLSKSRRLENLIAQLPGEKKNGLFGNLIALSLGLTPNFKSNFDLAEDAKLQLSKDTYDDDLDNLLAQIGDQYADLFLAAKNLSDAILLSDILRVNTEITKAPLSASMIKRYDEHHQDLTLLKALVRQQLPEKYKEIFFDQSKNGYAGYIDGGASQEEFYKFIKPILEKMDGTEELLVKLNREDLLRKQRTFDNGSIPHQIHLGELHAILRRQEDFYPFLKDNREKIEKILTFRIPYYVGPLARGNSRFAWMTRKSEETITPWNFEEVVDKGASAQSFIERMTNFDKNLPNEKVLPKHSLLYEYFTVYNELTKVKYVTEGMRKPAFLSGEQKKAIVDLLFKTNRKVTVKQLKEDYFKKIECFDSVEISGVEDRFNASLGTYHDLLKIIKDKDFLDNEENEDILEDIVLTLTLFEDREMIEERLKTYAHLFDDKVMKQLKRRRYTGWGRLSRKLINGIRDKQSGKTILDFLKSDGFANRNFMQLIHDDSLTFKEDIQKAQVSGQGDSLHEHIANLAGSPAIKKGILQTVKVVDELVKVMGRHKPENIVIEMARENQTTQKGQKNSRERMKRIEEGIKELGSQILKEHPVENTQLQNEKLYLYYLQNGRDMYVDQELDINRLSDYDVDHIVPQSFLKDDSIDNKVLTRSDKARGKSDNVPSEEVVKKMKNYWRQLLNAKLITQRKFDNLTKAERGGLSELDKAGFIKRQLVETRQITKHVAQILDSRMNTKYDENDKLIREVKVITLKSKLVSDFRKDFQFYKVREINNYHHAHDAYLNAVVGTALIKKYPKLESEFVYGDYKVYDVRKMIAKSEQEIGKATAKYFFYSNIMNFFKTEITLANGEIRKRPLIETNGETGEIVWDKGRDFATVRKVLSMPQVNIVKKTEVQTGGFSKESILPKRNSDKLIARKKDWDPKKYGGFDSPTVAYSVLVVAKVEKGKSKKLKSVKELLGITIMERSSFEKNPIDFLEAKGYKEVKKDLIIKLPKYSLFELENGRKRMLASAGELQKGNELALPSKYVNFLYLASHYEKLKGSPEDNEQKQLFVEQHKHYLDEIIEQISEFSKRVILADANLDKVLSAYNKHRDKPIREQAENIIHLFTLTNLGAPAAFKYFDTTIDRKRYTSTKEVLDATLIHQSITGLYETRIDLSQLGGDGGGGGGGTLNIEDEYRLHETSKEPDVSLGSTWLSDFPQAWAETGGMGLAVRQAPLIIPLKATSTPVSIKQYPMSQEARLGIKPHIQRLLDQGILVPCQSPWNTPLLPVKKPGTNDYRPVQDLREVNKRVEDIHPTVPNPYNLLSGLPPSHQWYTVLDLKDAFFCLRLHPTSQPLFAFEWRDPEMGISGQLTWTRLPQGFKNSPTLFNEALHRDLADFRIQHPDLILLQYVDDLLLAATSELDCQQGTRALLQTLGNLGYRASAKKAQICQKQVKYLGYLLKEGQRWLTEARKETVMGQPTPKTPRQLREFLGKAGFCRLFIPGFAEMAAPLYPLTKPGTLFNWGPDQQKAYQEIKQALLTAPALGLPDLTKPFELFVDEKQGYAKGVLTQKLGPWRRPVAYLSKKLDPVAAGWPPCLRMVAAIAVLTKDAGKLTMGQPLVILAPHAVEALVKQPPDRWLSNARMTHYQALLLDTDRVQFGPVVALNPATLLPLPEEGLQHNCLDILAEAHGTRPDLTDQPLPDADHTWYTDGSSLLQEGQRKAGAAVTTETEVIWAKALPAGTSAQRAELIALTQALKMAEGKKLNVYTDSRYAFATAHIHGEIYRRRGWLTSEGKEIKNKDEILALLKALFLPKRLSIIHCPGHQKGHSAEARGNRMADQAARKAAITETPDTSTLLIENSSPSGGSKRTADGSEFEAGKRTADGSEFEKRTADGSEFESPKKKAKVE

SEQ ID NO: 2647 - protein, 2115 aa, synthetic construct
MPAAKRVKLDGGDKKYSIGLDIGTNSVGWAVITDEYKVPSKKFKVLGNTDRHSIKKNLIGALLFDSGETAEATRLKRTARRRYTRRKNRICYLQEIFSNEMAKVDDSFFHRLEESFLVEEDKKHERHPIFGNIVDEVAYHEKYPTIYHLRKKLVDSTDKADLRLIYLALAHMIKFRGHFLIEGDLNPDNSDVDKLFIQLVQTYNQLFEENPINASGVDAKAILSARLSKSRRLENLIAQLPGEKKNGLFGNLIALSLGLTPNFKSNFDLAEDAKLQLSKDTYDDDLDNLLAQIGDQYADLFLAAKNLSDAILLSDILRVNTEITKAPLSASMIKRYDEHHQDLTLLKALVRQQLPEKYKEIFFDQSKNGYAGYIDGGASQEEFYKFIKPILEKMDGTEELLVKLNREDLLRKQRTFDNGSIPHQIHLGELHAILRRQEDFYPFLKDNREKIEKILTFRIPYYVGPLARGNSRFAWMTRKSEETITPWNFEEVVDKGASAQSFIERMTNFDKNLPNEKVLPKHSLLYEYFTVYNELTKVKYVTEGMRKPAFLSGEQKKAIVDLLFKTNRKVTVKQLKEDYFKKIECFDSVEISGVEDRFNASLGTYHDLLKIIKDKDFLDNEENEDILEDIVLTLTLFEDREMIEERLKTYAHLFDDKVMKQLKRRRYTGWGRLSRKLINGIRDKQSGKTILDFLKSDGFANRNFMQLIHDDSLTFKEDIQKAQVSGQGDSLHEHIANLAGSPAIKKGILQTVKVVDELVKVMGRHKPENIVIEMARENQTTQKGQKNSRERMKRIEEGIKELGSQILKEHPVENTQLQNEKLYLYYLQNGRDMYVDQELDINRLSDYDVDHIVPQSFLKDDSIDNKVLTRSDKARGKSDNVPSEEVVKKMKNYWRQLLNAKLITQRKFDNLTKAERGGLSELDKAGFIKRQLVETRQITKHVAQILDSRMNTKYDENDKLIREVKVITLKSKLVSDFRKDFQFYKVREINNYHHAHDAYLNAVVGTALIKKYPKLESEFVYGDYKVYDVRKMIAKSEQEIGKATAKYFFYSNIMNFFKTEITLANGEIRKRPLIETNGETGEIVWDKGRDFATVRKVLSMPQVNIVKKTEVQTGGFSKESILPKRNSDKLIARKKDWDPKKYGGFDSPTVAYSVLVVAKVEKGKSKKLKSVKELLGITIMERSSFEKNPIDFLEAKGYKEVKKDLIIKLPKYSLFELENGRKRMLASAGELQKGNELALPSKYVNFLYLASHYEKLKGSPEDNEQKQLFVEQHKHYLDEIIEQISEFSKRVILADANLDKVLSAYNKHRDKPIREQAENIIHLFTLTNLGAPAAFKYFDTTIDRKRYTSTKEVLDATLIHQSITGLYETRIDLSQLGGDGGEAAAKEAAAKGGTLNIEDEYRLHETSKEPDVSLGSTWLSDFPQAWAETGGMGLAVRQAPLIIPLKATSTPVSIKQYPMSQEARLGIKPHIQRLLDQGILVPCQSPWNTPLLPVKKPGTNDYRPVQDLREVNKRVEDIHPTVPNPYNLLSGLPPSHQWYTVLDLKDAFFCLRLHPTSQPLFAFEWRDPEMGISGQLTWTRLPQGFKNSPTLFNEALHRDLADFRIQHPDLILLQYVDDLLLAATSELDCQQGTRALLQTLGNLGYRASAKKAQICQKQVKYLGYLLKEGQRWLTEARKETVMGQPTPKTPRQLREFLGKAGFCRLFIPGFAEMAAPLYPLTKPGTLFNWGPDQQKAYQEIKQALLTAPALGLPDLTKPFELFVDEKQGYAKGVLTQKLGPWRRPVAYLSKKLDPVAAGWPPCLRMVAAIAVLTKDAGKLTMGQPLVILAPHAVEALVKQPPDRWLSNARMTHYQALLLDTDRVQFGPVVALNPATLLPLPEEGLQHNCLDILAEAHGTRPDLTDQPLPDADHTWYTDGSSLLQEGQRKAGAAVTTETEVIWAKALPAGTSAQRAELIALTQALKMAEGKKLNVYTDSRYAFATAHIHGEIYRRRGWLTSEGKEIKNKDEILALLKALFLPKRLSIIHCPGHQKGHSAEARGNRMADQAARKAAITETPDTSTLLIENSSPSGGSKRTADGSEFEAGKRTADGSEFEKRTADGSEFESPKKKAKVE

SEQ ID NO: 2648 - protein, 2116 aa, synthetic construct
MPAAKRVKLDGGDKKYSIGLDIGTNSVGWAVITDEYKVPSKKFKVLGNTDRHSIKKNLIGALLFDSGETAEATRLKRTARRRYTRRKNRICYLQEIFSNEMAKVDDSFFHRLEESFLVEEDKKHERHPIFGNIVDEVAYHEKYPTIYHLRKKLVDSTDKADLRLIYLALAHMIKFRGHFLIEGDLNPDNSDVDKLFIQLVQTYNQLFEENPINASGVDAKAILSARLSKSRRLENLIAQLPGEKKNGLFGNLIALSLGLTPNFKSNFDLAEDAKLQLSKDTYDDDLDNLLAQIGDQYADLFLAAKNLSDAILLSDILRVNTEITKAPLSASMIKRYDEHHQDLTLLKALVRQQLPEKYKEIFFDQSKNGYAGYIDGGASQEEFYKFIKPILEKMDGTEELLVKLNREDLLRKQRTFDNGSIPHQIHLGELHAILRRQEDFYPFLKDNREKIEKILTFRIPYYVGPLARGNSRFAWMTRKSEETITPWNFEEVVDKGASAQSFIERMTNFDKNLPNEKVLPKHSLLYEYFTVYNELTKVKYVTEGMRKPAFLSGEQKKAIVDLLFKTNRKVTVKQLKEDYFKKIECFDSVEISGVEDRFNASLGTYHDLLKIIKDKDFLDNEENEDILEDIVLTLTLFEDREMIEERLKTYAHLFDDKVMKQLKRRRYTGWGRLSRKLINGIRDKQSGKTILDFLKSDGFANRNFMQLIHDDSLTFKEDIQKAQVSGQGDSLHEHIANLAGSPAIKKGILQTVKVVDELVKVMGRHKPENIVIEMARENQTTQKGQKNSRERMKRIEEGIKELGSQILKEHPVENTQLQNEKLYLYYLQNGRDMYVDQELDINRLSDYDVDHIVPQSFLKDDSIDNKVLTRSDKARGKSDNVPSEEVVKKMKNYWRQLLNAKLITQRKFDNLTKAERGGLSELDKAGFIKRQLVETRQITKHVAQILDSRMNTKYDENDKLIREVKVITLKSKLVSDFRKDFQFYKVREINNYHHAHDAYLNAVVGTALIKKYPKLESEFVYGDYKVYDVRKMIAKSEQEIGKATAKYFFYSNIMNFFKTEITLANGEIRKRPLIETNGETGEIVWDKGRDFATVRKVLSMPQVNIVKKTEVQTGGFSKESILPKRNSDKLIARKKDWDPKKYGGFDSPTVAYSVLVVAKVEKGKSKKLKSVKELLGITIMERSSFEKNPIDFLEAKGYKEVKKDLIIKLPKYSLFELENGRKRMLASAGELQKGNELALPSKYVNFLYLASHYEKLKGSPEDNEQKQLFVEQHKHYLDEIIEQISEFSKRVILADANLDKVLSAYNKHRDKPIREQAENIIHLFTLTNLGAPAAFKYFDTTIDRKRYTSTKEVLDATLIHQSITGLYETRIDLSQLGGDGGGSSPAPEAAAKGGTLNIEDEYRLHETSKEPDVSLGSTWLSDFPQAWAETGGMGLAVRQAPLIIPLKATSTPVSIKQYPMSQEARLGIKPHIQRLLDQGILVPCQSPWNTPLLPVKKPGTNDYRPVQDLREVNKRVEDIHPTVPNPYNLLSGLPPSHQWYTVLDLKDAFFCLRLHPTSQPLFAFEWRDPEMGISGQLTWTRLPQGFKNSPTLFNEALHRDLADFRIQHPDLILLQYVDDLLLAATSELDCQQGTRALLQTLGNLGYRASAKKAQICQKQVKYLGYLLKEGQRWLTEARKETVMGQPTPKTPRQLREFLGKAGFCRLFIPGFAEMAAPLYPLTKPGTLFNWGPDQQKAYQEIKQALLTAPALGLPDLTKPFELFVDEKQGYAKGVLTQKLGPWRRPVAYLSKKLDPVAAGWPPCLRMVAAIAVLTKDAGKLTMGQPLVILAPHAVEALVKQPPDRWLSNARMTHYQALLLDTDRVQFGPVVALNPATLLPLPEEGLQHNCLDILAEAHGTRPDLTDQPLPDADHTWYTDGSSLLQEGQRKAGAAVTTETEVIWAKALPAGTSAQRAELIALTQALKMAEGKKLNVYTDSRYAFATAHIHGEIYRRRGWLTSEGKEIKNKDEILALLKALFLPKRLSIIHCPGHQKGHSAEARGNRMADQAARKAAITETPDTSTLLIENSSPSGGSKRTADGSEFEAGKRTADGSEFEKRTADGSEFESPKKKAKVE

SEQ ID NO: 2649 - protein, 2114 aa, synthetic construct
MPAAKRVKLDGGDKKYSIGLDIGTNSVGWAVITDEYKVPSKKFKVLGNTDRHSIKKNLIGALLFDSGETAEATRLKRTARRRYTRRKNRICYLQEIFSNEMAKVDDSFFHRLEESFLVEEDKKHERHPIFGNIVDEVAYHEKYPTIYHLRKKLVDSTDKADLRLIYLALAHMIKFRGHFLIEGDLNPDNSDVDKLFIQLVQTYNQLFEENPINASGVDAKAILSARLSKSRRLENLIAQLPGEKKNGLFGNLIALSLGLTPNFKSNFDLAEDAKLQLSKDTYDDDLDNLLAQIGDQYADLFLAAKNLSDAILLSDILRVNTEITKAPLSASMIKRYDEHHQDLTLLKALVRQQLPEKYKEIFFDQSKNGYAGYIDGGASQEEFYKFIKPILEKMDGTEELLVKLNREDLLRKQRTFDNGSIPHQIHLGELHAILRRQEDFYPFLKDNREKIEKILTFRIPYYVGPLARGNSRFAWMTRKSEETITPWNFEEVVDKGASAQSFIERMTNFDKNLPNEKVLPKHSLLYEYFTVYNELTKVKYVTEGMRKPAFLSGEQKKAIVDLLFKTNRKVTVKQLKEDYFKKIECFDSVEISGVEDRFNASLGTYHDLLKIIKDKDFLDNEENEDILEDIVLTLTLFEDREMIEERLKTYAHLFDDKVMKQLKRRRYTGWGRLSRKLINGIRDKQSGKTILDFLKSDGFANRNFMQLIHDDSLTFKEDIQKAQVSGQGDSLHEHIANLAGSPAIKKGILQTVKVVDELVKVMGRHKPENIVIEMARENQTTQKGQKNSRERMKRIEEGIKELGSQILKEHPVENTQLQNEKLYLYYLQNGRDMYVDQELDINRLSDYDVDHIVPQSFLKDDSIDNKVLTRSDKARGKSDNVPSEEVVKKMKNYWRQLLNAKLITQRKFDNLTKAERGGLSELDKAGFIKRQLVETRQITKHVAQILDSRMNTKYDENDKLIREVKVITLKSKLVSDFRKDFQFYKVREINNYHHAHDAYLNAVVGTALIKKYPKLESEFVYGDYKVYDVRKMIAKSEQEIGKATAKYFFYSNIMNFFKTEITLANGEIRKRPLIETNGETGEIVWDKGRDFATVRKVLSMPQVNIVKKTEVQTGGFSKESILPKRNSDKLIARKKDWDPKKYGGFDSPTVAYSVLVVAKVEKGKSKKLKSVKELLGITIMERSSFEKNPIDFLEAKGYKEVKKDLIIKLPKYSLFELENGRKRMLASAGELQKGNELALPSKYVNFLYLASHYEKLKGSPEDNEQKQLFVEQHKHYLDEIIEQISEFSKRVILADANLDKVLSAYNKHRDKPIREQAENIIHLFTLTNLGAPAAFKYFDTTIDRKRYTSTKEVLDATLIHQSITGLYETRIDLSQLGGDGGPAPGGSGGGGGTLNIEDEYRLHETSKEPDVSLGSTWLSDFPQAWAETGGMGLAVRQAPLIIPLKATSTPVSIKQYPMSQEARLGIKPHIQRLLDQGILVPCQSPWNTPLLPVKKPGTNDYRPVQDLREVNKRVEDIHPTVPNPYNLLSGLPPSHQWYTVLDLKDAFFCLRLHPTSQPLFAFEWRDPEMGISGQLTWTRLPQGFKNSPTLFNEALHRDLADFRIQHPDLILLQYVDDLLLAATSELDCQQGTRALLQTLGNLGYRASAKKAQICQKQVKYLGYLLKEGQRWLTEARKETVMGQPTPKTPRQLREFLGKAGFCRLFIPGFAEMAAPLYPLTKPGTLFNWGPDQQKAYQEIKQALLTAPALGLPDLTKPFELFVDEKQGYAKGVLTQKLGPWRRPVAYLSKKLDPVAAGWPPCLRMVAAIAVLTKDAGKLTMGQPLVILAPHAVEALVKQPPDRWLSNARMTHYQALLLDTDRVQFGPVVALNPATLLPLPEEGLQHNCLDILAEAHGTRPDLTDQPLPDADHTWYTDGSSLLQEGQRKAGAAVTTETEVIWAKALPAGTSAQRAELIALTQALKMAEGKKLNVYTDSRYAFATAHIHGEIYRRRGWLTSEGKEIKNKDEILALLKALFLPKRLSIIHCPGHQKGHSAEARGNRMADQAARKAAITETPDTSTLLIENSSPSGGSKRTADGSEFEAGKRTADGSEFEKRTADGSEFESPKKKAKVE

SEQ ID NO: 2650 - protein, 2114 aa, synthetic construct
MPAAKRVKLDGGDKKYSIGLDIGTNSVGWAVITDEYKVPSKKFKVLGNTDRHSIKKNLIGALLFDSGETAEATRLKRTARRRYTRRKNRICYLQEIFSNEMAKVDDSFFHRLEESFLVEEDKKHERHPIFGNIVDEVAYHEKYPTIYHLRKKLVDSTDKADLRLIYLALAHMIKFRGHFLIEGDLNPDNSDVDKLFIQLVQTYNQLFEENPINASGVDAKAILSARLSKSRRLENLIAQLPGEKKNGLFGNLIALSLGLTPNFKSNFDLAEDAKLQLSKDTYDDDLDNLLAQIGDQYADLFLAAKNLSDAILLSDILRVNTEITKAPLSASMIKRYDEHHQDLTLLKALVRQQLPEKYKEIFFDQSKNGYAGYIDGGASQEEFYKFIKPILEKMDGTEELLVKLNREDLLRKQRTFDNGSIPHQIHLGELHAILRRQEDFYPFLKDNREKIEKILTFRIPYYVGPLARGNSRFAWMTRKSEETITPWNFEEVVDKGASAQSFIERMTNFDKNLPNEKVLPKHSLLYEYFTVYNELTKVKYVTEGMRKPAFLSGEQKKAIVDLLFKTNRKVTVKQLKEDYFKKIECFDSVEISGVEDRFNASLGTYHDLLKIIKDKDFLDNEENEDILEDIVLTLTLFEDREMIEERLKTYAHLFDDKVMKQLKRRRYTGWGRLSRKLINGIRDKQSGKTILDFLKSDGFANRNFMQLIHDDSLTFKEDIQKAQVSGQGDSLHEHIANLAGSPAIKKGILQTVKVVDELVKVMGRHKPENIVIEMARENQTTQKGQKNSRERMKRIEEGIKELGSQILKEHPVENTQLQNEKLYLYYLQNGRDMYVDQELDINRLSDYDVDHIVPQSFLKDDSIDNKVLTRSDKARGKSDNVPSEEVVKKMKNYWRQLLNAKLITQRKFDNLTKAERGGLSELDKAGFIKRQLVETRQITKHVAQILDSRMNTKYDENDKLIREVKVITLKSKLVSDFRKDFQFYKVREINNYHHAHDAYLNAVVGTALIKKYPKLESEFVYGDYKVYDVRKMIAKSEQEIGKATAKYFFYSNIMNFFKTEITLANGEIRKRPLIETNGETGEIVWDKGRDFATVRKVLSMPQVNIVKKTEVQTGGFSKESILPKRNSDKLIARKKDWDPKKYGGFDSPTVAYSVLVVAKVEKGKSKKLKSVKELLGITIMERSSFEKNPIDFLEAKGYKEVKKDLIIKLPKYSLFELENGRKRMLASAGELQKGNELALPSKYVNFLYLASHYEKLKGSPEDNEQKQLFVEQHKHYLDEIIEQISEFSKRVILADANLDKVLSAYNKHRDKPIREQAENIIHLFTLTNLGAPAAFKYFDTTIDRKRYTSTKEVLDATLIHQSITGLYETRIDLSQLGGDGGPAPGGGGGSGGTLNIEDEYRLHETSKEPDVSLGSTWLSDFPQAWAETGGMGLAVRQAPLIIPLKATSTPVSIKQYPMSQEARLGIKPHIQRLLDQGILVPCQSPWNTPLLPVKKPGTNDYRPVQDLREVNKRVEDIHPTVPNPYNLLSGLPPSHQWYTVLDLKDAFFCLRLHPTSQPLFAFEWRDPEMGISGQLTWTRLPQGFKNSPTLFNEALHRDLADFRIQHPDLILLQYVDDLLLAATSELDCQQGTRALLQTLGNLGYRASAKKAQICQKQVKYLGYLLKEGQRWLTEARKETVMGQPTPKTPRQLREFLGKAGFCRLFIPGFAEMAAPLYPLTKPGTLFNWGPDQQKAYQEIKQALLTAPALGLPDLTKPFELFVDEKQGYAKGVLTQKLGPWRRPVAYLSKKLDPVAAGWPPCLRMVAAIAVLTKDAGKLTMGQPLVILAPHAVEALVKQPPDRWLSNARMTHYQALLLDTDRVQFGPVVALNPATLLPLPEEGLQHNCLDILAEAHGTRPDLTDQPLPDADHTWYTDGSSLLQEGQRKAGAAVTTETEVIWAKALPAGTSAQRAELIALTQALKMAEGKKLNVYTDSRYAFATAHIHGEIYRRRGWLTSEGKEIKNKDEILALLKALFLPKRLSIIHCPGHQKGHSAEARGNRMADQAARKAAITETPDTSTLLIENSSPSGGSKRTADGSEFEAGKRTADGSEFEKRTADGSEFESPKKKAKVE

SEQ ID NO: 2651 - protein, 2116 aa, synthetic construct
MPAAKRVKLDGGDKKYSIGLDIGTNSVGWAVITDEYKVPSKKFKVLGNTDRHSIKKNLIGALLFDSGETAEATRLKRTARRRYTRRKNRICYLQEIFSNEMAKVDDSFFHRLEESFLVEEDKKHERHPIFGNIVDEVAYHEKYPTIYHLRKKLVDSTDKADLRLIYLALAHMIKFRGHFLIEGDLNPDNSDVDKLFIQLVQTYNQLFEENPINASGVDAKAILSARLSKSRRLENLIAQLPGEKKNGLFGNLIALSLGLTPNFKSNFDLAEDAKLQLSKDTYDDDLDNLLAQIGDQYADLFLAAKNLSDAILLSDILRVNTEITKAPLSASMIKRYDEHHQDLTLLKALVRQQLPEKYKEIFFDQSKNGYAGYIDGGASQEEFYKFIKPILEKMDGTEELLVKLNREDLLRKQRTFDNGSIPHQIHLGELHAILRRQEDFYPFLKDNREKIEKILTFRIPYYVGPLARGNSRFAWMTRKSEETITPWNFEEVVDKGASAQSFIERMTNFDKNLPNEKVLPKHSLLYEYFTVYNELTKVKYVTEGMRKPAFLSGEQKKAIVDLLFKTNRKVTVKQLKEDYFKKIECFDSVEISGVEDRFNASLGTYHDLLKIIKDKDFLDNEENEDILEDIVLTLTLFEDREMIEERLKTYAHLFDDKVMKQLKRRRYTGWGRLSRKLINGIRDKQSGKTILDFLKSDGFANRNFMQLIHDDSLTFKEDIQKAQVSGQGDSLHEHIANLAGSPAIKKGILQTVKVVDELVKVMGRHKPENIVIEMARENQTTQKGQKNSRERMKRIEEGIKELGSQILKEHPVENTQLQNEKLYLYYLQNGRDMYVDQELDINRLSDYDVDHIVPQSFLKDDSIDNKVLTRSDKARGKSDNVPSEEVVKKMKNYWRQLLNAKLITQRKFDNLTKAERGGLSELDKAGFIKRQLVETRQITKHVAQILDSRMNTKYDENDKLIREVKVITLKSKLVSDFRKDFQFYKVREINNYHHAHDAYLNAVVGTALIKKYPKLESEFVYGDYKVYDVRKMIAKSEQEIGKATAKYFFYSNIMNFFKTEITLANGEIRKRPLIETNGETGEIVWDKGRDFATVRKVLSMPQVNIVKKTEVQTGGFSKESILPKRNSDKLIARKKDWDPKKYGGFDSPTVAYSVLVVAKVEKGKSKKLKSVKELLGITIMERSSFEKNPIDFLEAKGYKEVKKDLIIKLPKYSLFELENGRKRMLASAGELQKGNELALPSKYVNFLYLASHYEKLKGSPEDNEQKQLFVEQHKHYLDEIIEQISEFSKRVILADANLDKVLSAYNKHRDKPIREQAENIIHLFTLTNLGAPAAFKYFDTTIDRKRYTSTKEVLDATLIHQSITGLYETRIDLSQLGGDGGPAPGSSEAAAKGGTLNIEDEYRLHETSKEPDVSLGSTWLSDFPQAWAETGGMGLAVRQAPLIIPLKATSTPVSIKQYPMSQEARLGIKPHIQRLLDQGILVPCQSPWNTPLLPVKKPGTNDYRPVQDLREVNKRVEDIHPTVPNPYNLLSGLPPSHQWYTVLDLKDAFFCLRLHPTSQPLFAFEWRDPEMGISGQLTWTRLPQGFKNSPTLFNEALHRDLADFRIQHPDLILLQYVDDLLLAATSELDCQQGTRALLQTLGNLGYRASAKKAQICQKQVKYLGYLLKEGQRWLTEARKETVMGQPTPKTPRQLREFLGKAGFCRLFIPGFAEMAAPLYPLTKPGTLFNWGPDQQKAYQEIKQALLTAPALGLPDLTKPFELFVDEKQGYAKGVLTQKLGPWRRPVAYLSKKLDPVAAGWPPCLRMVAAIAVLTKDAGKLTMGQPLVILAPHAVEALVKQPPDRWLSNARMTHYQALLLDTDRVQFGPVVALNPATLLPLPEEGLQHNCLDILAEAHGTRPDLTDQPLPDADHTWYTDGSSLLQEGQRKAGAAVTTETEVIWAKALPAGTSAQRAELIALTQALKMAEGKKLNVYTDSRYAFATAHIHGEIYRRRGWLTSEGKEIKNKDEILALLKALFLPKRLSIIHCPGHQKGHSAEARGNRMADQAARKAAITETPDTSTLLIENSSPSGGSKRTADGSEFEAGKRTADGSEFEKRTADGSEFESPKKKAKVE

SEQ ID NO: 2652 - protein, 2116 aa, synthetic construct
MPAAKRVKLDGGDKKYSIGLDIGTNSVGWAVITDEYKVPSKKFKVLGNTDRHSIKKNLIGALLFDSGETAEATRLKRTARRRYTRRKNRICYLQEIFSNEMAKVDDSFFHRLEESFLVEEDKKHERHPIFGNIVDEVAYHEKYPTIYHLRKKLVDSTDKADLRLIYLALAHMIKFRGHFLIEGDLNPDNSDVDKLFIQLVQTYNQLFEENPINASGVDAKAILSARLSKSRRLENLIAQLPGEKKNGLFGNLIALSLGLTPNFKSNFDLAEDAKLQLSKDTYDDDLDNLLAQIGDQYADLFLAAKNLSDAILLSDILRVNTEITKAPLSASMIKRYDEHHQDLTLLKALVRQQLPEKYKEIFFDQSKNGYAGYIDGGASQEEFYKFIKPILEKMDGTEELLVKLNREDLLRKQRTFDNGSIPHQIHLGELHAILRRQEDFYPFLKDNREKIEKILTFRIPYYVGPLARGNSRFAWMTRKSEETITPWNFEEVVDKGASAQSFIERMTNFDKNLPNEKVLPKHSLLYEYFTVYNELTKVKYVTEGMRKPAFLSGEQKKAIVDLLFKTNRKVTVKQLKEDYFKKIECFDSVEISGVEDRFNASLGTYHDLLKIIKDKDFLDNEENEDILEDIVLTLTLFEDREMIEERLKTYAHLFDDKVMKQLKRRRYTGWGRLSRKLINGIRDKQSGKTILDFLKSDGFANRNFMQLIHDDSLTFKEDIQKAQVSGQGDSLHEHIANLAGSPAIKKGILQTVKVVDELVKVMGRHKPENIVIEMARENQTTQKGQKNSRERMKRIEEGIKELGSQILKEHPVENTQLQNEKLYLYYLQNGRDMYVDQELDINRLSDYDVDHIVPQSFLKDDSIDNKVLTRSDKARGKSDNVPSEEVVKKMKNYWRQLLNAKLITQRKFDNLTKAERGGLSELDKAGFIKRQLVETRQITKHVAQILDSRMNTKYDENDKLIREVKVITLKSKLVSDFRKDFQFYKVREINNYHHAHDAYLNAVVGTALIKKYPKLESEFVYGDYKVYDVRKMIAKSEQEIGKATAKYFFYSNIMNFFKTEITLANGEIRKRPLIETNGETGEIVWDKGRDFATVRKVLSMPQVNIVKKTEVQTGGFSKESILPKRNSDKLIARKKDWDPKKYGGFDSPTVAYSVLVVAKVEKGKSKKLKSVKELLGITIMERSSFEKNPIDFLEAKGYKEVKKDLIIKLPKYSLFELENGRKRMLASAGELQKGNELALPSKYVNFLYLASHYEKLKGSPEDNEQKQLFVEQHKHYLDEIIEQISEFSKRVILADANLDKVLSAYNKHRDKPIREQAENIIHLFTLTNLGAPAAFKYFDTTIDRKRYTSTKEVLDATLIHQSITGLYETRIDLSQLGGDGGGSSGGGEAAAKGGTLNIEDEYRLHETSKEPDVSLGSTWLSDFPQAWAETGGMGLAVRQAPLIIPLKATSTPVSIKQYPMSQEARLGIKPHIQRLLDQGILVPCQSPWNTPLLPVKKPGTNDYRPVQDLREVNKRVEDIHPTVPNPYNLLSGLPPSHQWYTVLDLKDAFFCLRLHPTSQPLFAFEWRDPEMGISGQLTWTRLPQGFKNSPTLFNEALHRDLADFRIQHPDLILLQYVDDLLLAATSELDCQQGTRALLQTLGNLGYRASAKKAQICQKQVKYLGYLLKEGQRWLTEARKETVMGQPTPKTPRQLREFLGKAGFCRLFIPGFAEMAAPLYPLTKPGTLFNWGPDQQKAYQEIKQALLTAPALGLPDLTKPFELFVDEKQGYAKGVLTQKLGPWRRPVAYLSKKLDPVAAGWPPCLRMVAAIAVLTKDAGKLTMGQPLVILAPHAVEALVKQPPDRWLSNARMTHYQALLLDTDRVQFGPVVALNPATLLPLPEEGLQHNCLDILAEAHGTRPDLTDQPLPDADHTWYTDGSSLLQEGQRKAGAAVTTETEVIWAKALPAGTSAQRAELIALTQALKMAEGKKLNVYTDSRYAFATAHIHGEIYRRRGWLTSEGKEIKNKDEILALLKALFLPKRLSIIHCPGHQKGHSAEARGNRMADQAARKAAITETPDTSTLLIENSSPSGGSKRTADGSEFEAGKRTADGSEFEKRTADGSEFESPKKKAKVE

SEQ ID NO: 2653 - protein, 2111 aa, synthetic construct
MPAAKRVKLDGGDKKYSIGLDIGTNSVGWAVITDEYKVPSKKFKVLGNTDRHSIKKNLIGALLFDSGETAEATRLKRTARRRYTRRKNRICYLQEIFSNEMAKVDDSFFHRLEESFLVEEDKKHERHPIFGNIVDEVAYHEKYPTIYHLRKKLVDSTDKADLRLIYLALAHMIKFRGHFLIEGDLNPDNSDVDKLFIQLVQTYNQLFEENPINASGVDAKAILSARLSKSRRLENLIAQLPGEKKNGLFGNLIALSLGLTPNFKSNFDLAEDAKLQLSKDTYDDDLDNLLAQIGDQYADLFLAAKNLSDAILLSDILRVNTEITKAPLSASMIKRYDEHHQDLTLLKALVRQQLPEKYKEIFFDQSKNGYAGYIDGGASQEEFYKFIKPILEKMDGTEELLVKLNREDLLRKQRTFDNGSIPHQIHLGELHAILRRQEDFYPFLKDNREKIEKILTFRIPYYVGPLARGNSRFAWMTRKSEETITPWNFEEVVDKGASAQSFIERMTNFDKNLPNEKVLPKHSLLYEYFTVYNELTKVKYVTEGMRKPAFLSGEQKKAIVDLLFKTNRKVTVKQLKEDYFKKIECFDSVEISGVEDRFNASLGTYHDLLKIIKDKDFLDNEENEDILEDIVLTLTLFEDREMIEERLKTYAHLFDDKVMKQLKRRRYTGWGRLSRKLINGIRDKQSGKTILDFLKSDGFANRNFMQLIHDDSLTFKEDIQKAQVSGQGDSLHEHIANLAGSPAIKKGILQTVKVVDELVKVMGRHKPENIVIEMARENQTTQKGQKNSRERMKRIEEGIKELGSQILKEHPVENTQLQNEKLYLYYLQNGRDMYVDQELDINRLSDYDVDHIVPQSFLKDDSIDNKVLTRSDKARGKSDNVPSEEVVKKMKNYWRQLLNAKLITQRKFDNLTKAERGGLSELDKAGFIKRQLVETRQITKHVAQILDSRMNTKYDENDKLIREVKVITLKSKLVSDFRKDFQFYKVREINNYHHAHDAYLNAVVGTALIKKYPKLESEFVYGDYKVYDVRKMIAKSEQEIGKATAKYFFYSNIMNFFKTEITLANGEIRKRPLIETNGETGEIVWDKGRDFATVRKVLSMPQVNIVKKTEVQTGGFSKESILPKRNSDKLIARKKDWDPKKYGGFDSPTVAYSVLVVAKVEKGKSKKLKSVKELLGITIMERSSFEKNPIDFLEAKGYKEVKKDLIIKLPKYSLFELENGRKRMLASAGELQKGNELALPSKYVNFLYLASHYEKLKGSPEDNEQKQLFVEQHKHYLDEIIEQISEFSKRVILADANLDKVLSAYNKHRDKPIREQAENIIHLFTLTNLGAPAAFKYFDTTIDRKRYTSTKEVLDATLIHQSITGLYETRIDLSQLGGDGGGGSGGGGGTLNIEDEYRLHETSKEPDVSLGSTWLSDFPQAWAETGGMGLAVRQAPLIIPLKATSTPVSIKQYPMSQEARLGIKPHIQRLLDQGILVPCQSPWNTPLLPVKKPGTNDYRPVQDLREVNKRVEDIHPTVPNPYNLLSGLPPSHQWYTVLDLKDAFFCLRLHPTSQPLFAFEWRDPEMGISGQLTWTRLPQGFKNSPTLFNEALHRDLADFRIQHPDLILLQYVDDLLLAATSELDCQQGTRALLQTLGNLGYRASAKKAQICQKQVKYLGYLLKEGQRWLTEARKETVMGQPTPKTPRQLREFLGKAGFCRLFIPGFAEMAAPLYPLTKPGTLFNWGPDQQKAYQEIKQALLTAPALGLPDLTKPFELFVDEKQGYAKGVLTQKLGPWRRPVAYLSKKLDPVAAGWPPCLRMVAAIAVLTKDAGKLTMGQPLVILAPHAVEALVKQPPDRWLSNARMTHYQALLLDTDRVQFGPVVALNPATLLPLPEEGLQHNCLDILAEAHGTRPDLTDQPLPDADHTWYTDGSSLLQEGQRKAGAAVTTETEVIWAKALPAGTSAQRAELIALTQALKMAEGKKLNVYTDSRYAFATAHIHGEIYRRRGWLTSEGKEIKNKDEILALLKALFLPKRLSIIHCPGHQKGHSAEARGNRMADQAARKAAITETPDTSTLLIENSSPSGGSKRTADGSEFEAGKRTADGSEFEKRTADGSEFESPKKKAKVE

SEQ ID NO: 2654 - protein, 2116 aa, synthetic construct
MPAAKRVKLDGGDKKYSIGLDIGTNSVGWAVITDEYKVPSKKFKVLGNTDRHSIKKNLIGALLFDSGETAEATRLKRTARRRYTRRKNRICYLQEIFSNEMAKVDDSFFHRLEESFLVEEDKKHERHPIFGNIVDEVAYHEKYPTIYHLRKKLVDSTDKADLRLIYLALAHMIKFRGHFLIEGDLNPDNSDVDKLFIQLVQTYNQLFEENPINASGVDAKAILSARLSKSRRLENLIAQLPGEKKNGLFGNLIALSLGLTPNFKSNFDLAEDAKLQLSKDTYDDDLDNLLAQIGDQYADLFLAAKNLSDAILLSDILRVNTEITKAPLSASMIKRYDEHHQDLTLLKALVRQQLPEKYKEIFFDQSKNGYAGYIDGGASQEEFYKFIKPILEKMDGTEELLVKLNREDLLRKQRTFDNGSIPHQIHLGELHAILRRQEDFYPFLKDNREKIEKILTFRIPYYVGPLARGNSRFAWMTRKSEETITPWNFEEVVDKGASAQSFIERMTNFDKNLPNEKVLPKHSLLYEYFTVYNELTKVKYVTEGMRKPAFLSGEQKKAIVDLLFKTNRKVTVKQLKEDYFKKIECFDSVEISGVEDRFNASLGTYHDLLKIIKDKDFLDNEENEDILEDIVLTLTLFEDREMIEERLKTYAHLFDDKVMKQLKRRRYTGWGRLSRKLINGIRDKQSGKTILDFLKSDGFANRNFMQLIHDDSLTFKEDIQKAQVSGQGDSLHEHIANLAGSPAIKKGILQTVKVVDELVKVMGRHKPENIVIEMARENQTTQKGQKNSRERMKRIEEGIKELGSQILKEHPVENTQLQNEKLYLYYLQNGRDMYVDQELDINRLSDYDVDHIVPQSFLKDDSIDNKVLTRSDKARGKSDNVPSEEVVKKMKNYWRQLLNAKLITQRKFDNLTKAERGGLSELDKAGFIKRQLVETRQITKHVAQILDSRMNTKYDENDKLIREVKVITLKSKLVSDFRKDFQFYKVREINNYHHAHDAYLNAVVGTALIKKYPKLESEFVYGDYKVYDVRKMIAKSEQEIGKATAKYFFYSNIMNFFKTEITLANGEIRKRPLIETNGETGEIVWDKGRDFATVRKVLSMPQVNIVKKTEVQTGGFSKESILPKRNSDKLIARKKDWDPKKYGGFDSPTVAYSVLVVAKVEKGKSKKLKSVKELLGITIMERSSFEKNPIDFLEAKGYKEVKKDLIIKLPKYSLFELENGRKRMLASAGELQKGNELALPSKYVNFLYLASHYEKLKGSPEDNEQKQLFVEQHKHYLDEIIEQISEFSKRVILADANLDKVLSAYNKHRDKPIREQAENIIHLFTLTNLGAPAAFKYFDTTIDRKRYTSTKEVLDATLIHQSITGLYETRIDLSQLGGDGGEAAAKGGSPAPGGTLNIEDEYRLHETSKEPDVSLGSTWLSDFPQAWAETGGMGLAVRQAPLIIPLKATSTPVSIKQYPMSQEARLGIKPHIQRLLDQGILVPCQSPWNTPLLPVKKPGTNDYRPVQDLREVNKRVEDIHPTVPNPYNLLSGLPPSHQWYTVLDLKDAFFCLRLHPTSQPLFAFEWRDPEMGISGQLTWTRLPQGFKNSPTLFNEALHRDLADFRIQHPDLILLQYVDDLLLAATSELDCQQGTRALLQTLGNLGYRASAKKAQICQKQVKYLGYLLKEGQRWLTEARKETVMGQPTPKTPRQLREFLGKAGFCRLFIPGFAEMAAPLYPLTKPGTLFNWGPDQQKAYQEIKQALLTAPALGLPDLTKPFELFVDEKQGYAKGVLTQKLGPWRRPVAYLSKKLDPVAAGWPPCLRMVAAIAVLTKDAGKLTMGQPLVILAPHAVEALVKQPPDRWLSNARMTHYQALLLDTDRVQFGPVVALNPATLLPLPEEGLQHNCLDILAEAHGTRPDLTDQPLPDADHTWYTDGSSLLQEGQRKAGAAVTTETEVIWAKALPAGTSAQRAELIALTQALKMAEGKKLNVYTDSRYAFATAHIHGEIYRRRGWLTSEGKEIKNKDEILALLKALFLPKRLSIIHCPGHQKGHSAEARGNRMADQAARKAAITETPDTSTLLIENSSPSGGSKRTADGSEFEAGKRTADGSEFEKRTADGSEFESPKKKAKVE

SEQ ID NO: 2655 - protein, 2108 aa, synthetic construct
MPAAKRVKLDGGDKKYSIGLDIGTNSVGWAVITDEYKVPSKKFKVLGNTDRHSIKKNLIGALLFDSGETAEATRLKRTARRRYTRRKNRICYLQEIFSNEMAKVDDSFFHRLEESFLVEEDKKHERHPIFGNIVDEVAYHEKYPTIYHLRKKLVDSTDKADLRLIYLALAHMIKFRGHFLIEGDLNPDNSDVDKLFIQLVQTYNQLFEENPINASGVDAKAILSARLSKSRRLENLIAQLPGEKKNGLFGNLIALSLGLTPNFKSNFDLAEDAKLQLSKDTYDDDLDNLLAQIGDQYADLFLAAKNLSDAILLSDILRVNTEITKAPLSASMIKRYDEHHQDLTLLKALVRQQLPEKYKEIFFDQSKNGYAGYIDGGASQEEFYKFIKPILEKMDGTEELLVKLNREDLLRKQRTFDNGSIPHQIHLGELHAILRRQEDFYPFLKDNREKIEKILTFRIPYYVGPLARGNSRFAWMTRKSEETITPWNFEEVVDKGASAQSFIERMTNFDKNLPNEKVLPKHSLLYEYFTVYNELTKVKYVTEGMRKPAFLSGEQKKAIVDLLFKTNRKVTVKQLKEDYFKKIECFDSVEISGVEDRFNASLGTYHDLLKIIKDKDFLDNEENEDILEDIVLTLTLFEDREMIEERLKTYAHLFDDKVMKQLKRRRYTGWGRLSRKLINGIRDKQSGKTILDFLKSDGFANRNFMQLIHDDSLTFKEDIQKAQVSGQGDSLHEHIANLAGSPAIKKGILQTVKVVDELVKVMGRHKPENIVIEMARENQTTQKGQKNSRERMKRIEEGIKELGSQILKEHPVENTQLQNEKLYLYYLQNGRDMYVDQELDINRLSDYDVDHIVPQSFLKDDSIDNKVLTRSDKARGKSDNVPSEEVVKKMKNYWRQLLNAKLITQRKFDNLTKAERGGLSELDKAGFIKRQLVETRQITKHVAQILDSRMNTKYDENDKLIREVKVITLKSKLVSDFRKDFQFYKVREINNYHHAHDAYLNAVVGTALIKKYPKLESEFVYGDYKVYDVRKMIAKSEQEIGKATAKYFFYSNIMNFFKTEITLANGEIRKRPLIETNGETGEIVWDKGRDFATVRKVLSMPQVNIVKKTEVQTGGFSKESILPKRNSDKLIARKKDWDPKKYGGFDSPTVAYSVLVVAKVEKGKSKKLKSVKELLGITIMERSSFEKNPIDFLEAKGYKEVKKDLIIKLPKYSLFELENGRKRMLASAGELQKGNELALPSKYVNFLYLASHYEKLKGSPEDNEQKQLFVEQHKHYLDEIIEQISEFSKRVILADANLDKVLSAYNKHRDKPIREQAENIIHLFTLTNLGAPAAFKYFDTTIDRKRYTSTKEVLDATLIHQSITGLYETRIDLSQLGGDGGGSSGGTLNIEDEYRLHETSKEPDVSLGSTWLSDFPQAWAETGGMGLAVRQAPLIIPLKATSTPVSIKQYPMSQEARLGIKPHIQRLLDQGILVPCQSPWNTPLLPVKKPGTNDYRPVQDLREVNKRVEDIHPTVPNPYNLLSGLPPSHQWYTVLDLKDAFFCLRLHPTSQPLFAFEWRDPEMGISGQLTWTRLPQGFKNSPTLFNEALHRDLADFRIQHPDLILLQYVDDLLLAATSELDCQQGTRALLQTLGNLGYRASAKKAQICQKQVKYLGYLLKEGQRWLTEARKETVMGQPTPKTPRQLREFLGKAGFCRLFIPGFAEMAAPLYPLTKPGTLFNWGPDQQKAYQEIKQALLTAPALGLPDLTKPFELFVDEKQGYAKGVLTQKLGPWRRPVAYLSKKLDPVAAGWPPCLRMVAAIAVLTKDAGKLTMGQPLVILAPHAVEALVKQPPDRWLSNARMTHYQALLLDTDRVQFGPVVALNPATLLPLPEEGLQHNCLDILAEAHGTRPDLTDQPLPDADHTWYTDGSSLLQEGQRKAGAAVTTETEVIWAKALPAGTSAQRAELIALTQALKMAEGKKLNVYTDSRYAFATAHIHGEIYRRRGWLTSEGKEIKNKDEILALLKALFLPKRLSIIHCPGHQKGHSAEARGNRMADQAARKAAITETPDTSTLLIENSSPSGGSKRTADGSEFEAGKRTADGSEFEKRTADGSEFESPKKKAKVE

SEQ ID NO: 2656 - protein, 2114 aa, synthetic construct
MPAAKRVKLDGGDKKYSIGLDIGTNSVGWAVITDEYKVPSKKFKVLGNTDRHSIKKNLIGALLFDSGETAEATRLKRTARRRYTRRKNRICYLQEIFSNEMAKVDDSFFHRLEESFLVEEDKKHERHPIFGNIVDEVAYHEKYPTIYHLRKKLVDSTDKADLRLIYLALAHMIKFRGHFLIEGDLNPDNSDVDKLFIQLVQTYNQLFEENPINASGVDAKAILSARLSKSRRLENLIAQLPGEKKNGLFGNLIALSLGLTPNFKSNFDLAEDAKLQLSKDTYDDDLDNLLAQIGDQYADLFLAAKNLSDAILLSDILRVNTEITKAPLSASMIKRYDEHHQDLTLLKALVRQQLPEKYKEIFFDQSKNGYAGYIDGGASQEEFYKFIKPILEKMDGTEELLVKLNREDLLRKQRTFDNGSIPHQIHLGELHAILRRQEDFYPFLKDNREKIEKILTFRIPYYVGPLARGNSRFAWMTRKSEETITPWNFEEVVDKGASAQSFIERMTNFDKNLPNEKVLPKHSLLYEYFTVYNELTKVKYVTEGMRKPAFLSGEQKKAIVDLLFKTNRKVTVKQLKEDYFKKIECFDSVEISGVEDRFNASLGTYHDLLKIIKDKDFLDNEENEDILEDIVLTLTLFEDREMIEERLKTYAHLFDDKVMKQLKRRRYTGWGRLSRKLINGIRDKQSGKTILDFLKSDGFANRNFMQLIHDDSLTFKEDIQKAQVSGQGDSLHEHIANLAGSPAIKKGILQTVKVVDELVKVMGRHKPENIVIEMARENQTTQKGQKNSRERMKRIEEGIKELGSQILKEHPVENTQLQNEKLYLYYLQNGRDMYVDQELDINRLSDYDVDHIVPQSFLKDDSIDNKVLTRSDKARGKSDNVPSEEVVKKMKNYWRQLLNAKLITQRKFDNLTKAERGGLSELDKAGFIKRQLVETRQITKHVAQILDSRMNTKYDENDKLIREVKVITLKSKLVSDFRKDFQFYKVREINNYHHAHDAYLNAVVGTALIKKYPKLESEFVYGDYKVYDVRKMIAKSEQEIGKATAKYFFYSNIMNFFKTEITLANGEIRKRPLIETNGETGEIVWDKGRDFATVRKVLSMPQVNIVKKTEVQTGGFSKESILPKRNSDKLIARKKDWDPKKYGGFDSPTVAYSVLVVAKVEKGKSKKLKSVKELLGITIMERSSFEKNPIDFLEAKGYKEVKKDLIIKLPKYSLFELENGRKRMLASAGELQKGNELALPSKYVNFLYLASHYEKLKGSPEDNEQKQLFVEQHKHYLDEIIEQISEFSKRVILADANLDKVLSAYNKHRDKPIREQAENIIHLFTLTNLGAPAAFKYFDTTIDRKRYTSTKEVLDATLIHQSITGLYETRIDLSQLGGDGGPAPAPAPAPGGTLNIEDEYRLHETSKEPDVSLGSTWLSDFPQAWAETGGMGLAVRQAPLIIPLKATSTPVSIKQYPMSQEARLGIKPHIQRLLDQGILVPCQSPWNTPLLPVKKPGTNDYRPVQDLREVNKRVEDIHPTVPNPYNLLSGLPPSHQWYTVLDLKDAFFCLRLHPTSQPLFAFEWRDPEMGISGQLTWTRLPQGFKNSPTLFNEALHRDLADFRIQHPDLILLQYVDDLLLAATSELDCQQGTRALLQTLGNLGYRASAKKAQICQKQVKYLGYLLKEGQRWLTEARKETVMGQPTPKTPRQLREFLGKAGFCRLFIPGFAEMAAPLYPLTKPGTLFNWGPDQQKAYQEIKQALLTAPALGLPDLTKPFELFVDEKQGYAKGVLTQKLGPWRRPVAYLSKKLDPVAAGWPPCLRMVAAIAVLTKDAGKLTMGQPLVILAPHAVEALVKQPPDRWLSNARMTHYQALLLDTDRVQFGPVVALNPATLLPLPEEGLQHNCLDILAEAHGTRPDLTDQPLPDADHTWYTDGSSLLQEGQRKAGAAVTTETEVIWAKALPAGTSAQRAELIALTQALKMAEGKKLNVYTDSRYAFATAHIHGEIYRRRGWLTSEGKEIKNKDEILALLKALFLPKRLSIIHCPGHQKGHSAEARGNRMADQAARKAAITETPDTSTLLIENSSPSGGSKRTADGSEFEAGKRTADGSEFEKRTADGSEFESPKKKAKVE

SEQ ID NO: 2657 - protein, 2113 aa, synthetic construct
MPAAKRVKLDGGDKKYSIGLDIGTNSVGWAVITDEYKVPSKKFKVLGNTDRHSIKKNLIGALLFDSGETAEATRLKRTARRRYTRRKNRICYLQEIFSNEMAKVDDSFFHRLEESFLVEEDKKHERHPIFGNIVDEVAYHEKYPTIYHLRKKLVDSTDKADLRLIYLALAHMIKFRGHFLIEGDLNPDNSDVDKLFIQLVQTYNQLFEENPINASGVDAKAILSARLSKSRRLENLIAQLPGEKKNGLFGNLIALSLGLTPNFKSNFDLAEDAKLQLSKDTYDDDLDNLLAQIGDQYADLFLAAKNLSDAILLSDILRVNTEITKAPLSASMIKRYDEHHQDLTLLKALVRQQLPEKYKEIFFDQSKNGYAGYIDGGASQEEFYKFIKPILEKMDGTEELLVKLNREDLLRKQRTFDNGSIPHQIHLGELHAILRRQEDFYPFLKDNREKIEKILTFRIPYYVGPLARGNSRFAWMTRKSEETITPWNFEEVVDKGASAQSFIERMTNFDKNLPNEKVLPKHSLLYEYFTVYNELTKVKYVTEGMRKPAFLSGEQKKAIVDLLFKTNRKVTVKQLKEDYFKKIECFDSVEISGVEDRFNASLGTYHDLLKIIKDKDFLDNEENEDILEDIVLTLTLFEDREMIEERLKTYAHLFDDKVMKQLKRRRYTGWGRLSRKLINGIRDKQSGKTILDFLKSDGFANRNFMQLIHDDSLTFKEDIQKAQVSGQGDSLHEHIANLAGSPAIKKGILQTVKVVDELVKVMGRHKPENIVIEMARENQTTQKGQKNSRERMKRIEEGIKELGSQILKEHPVENTQLQNEKLYLYYLQNGRDMYVDQELDINRLSDYDVDHIVPQSFLKDDSIDNKVLTRSDKARGKSDNVPSEEVVKKMKNYWRQLLNAKLITQRKFDNLTKAERGGLSELDKAGFIKRQLVETRQITKHVAQILDSRMNTKYDENDKLIREVKVITLKSKLVSDFRKDFQFYKVREINNYHHAHDAYLNAVVGTALIKKYPKLESEFVYGDYKVYDVRKMIAKSEQEIGKATAKYFFYSNIMNFFKTEITLANGEIRKRPLIETNGETGEIVWDKGRDFATVRKVLSMPQVNIVKKTEVQTGGFSKESILPKRNSDKLIARKKDWDPKKYGGFDSPTVAYSVLVVAKVEKGKSKKLKSVKELLGITIMERSSFEKNPIDFLEAKGYKEVKKDLIIKLPKYSLFELENGRKRMLASAGELQKGNELALPSKYVNFLYLASHYEKLKGSPEDNEQKQLFVEQHKHYLDEIIEQISEFSKRVILADANLDKVLSAYNKHRDKPIREQAENIIHLFTLTNLGAPAAFKYFDTTIDRKRYTSTKEVLDATLIHQSITGLYETRIDLSQLGGDGGEAAAKGGSGGTLNIEDEYRLHETSKEPDVSLGSTWLSDFPQAWAETGGMGLAVRQAPLIIPLKATSTPVSIKQYPMSQEARLGIKPHIQRLLDQGILVPCQSPWNTPLLPVKKPGTNDYRPVQDLREVNKRVEDIHPTVPNPYNLLSGLPPSHQWYTVLDLKDAFFCLRLHPTSQPLFAFEWRDPEMGISGQLTWTRLPQGFKNSPTLFNEALHRDLADFRIQHPDLILLQYVDDLLLAATSELDCQQGTRALLQTLGNLGYRASAKKAQICQKQVKYLGYLLKEGQRWLTEARKETVMGQPTPKTPRQLREFLGKAGFCRLFIPGFAEMAAPLYPLTKPGTLFNWGPDQQKAYQEIKQALLTAPALGLPDLTKPFELFVDEKQGYAKGVLTQKLGPWRRPVAYLSKKLDPVAAGWPPCLRMVAAIAVLTKDAGKLTMGQPLVILAPHAVEALVKQPPDRWLSNARMTHYQALLLDTDRVQFGPVVALNPATLLPLPEEGLQHNCLDILAEAHGTRPDLTDQPLPDADHTWYTDGSSLLQEGQRKAGAAVTTETEVIWAKALPAGTSAQRAELIALTQALKMAEGKKLNVYTDSRYAFATAHIHGEIYRRRGWLTSEGKEIKNKDEILALLKALFLPKRLSIIHCPGHQKGHSAEARGNRMADQAARKAAITETPDTSTLLIENSSPSGGSKRTADGSEFEAGKRTADGSEFEKRTADGSEFESPKKKAKVE

SEQ ID NO: 2658 - protein, 2116 aa, synthetic construct
MPAAKRVKLDGGDKKYSIGLDIGTNSVGWAVITDEYKVPSKKFKVLGNTDRHSIKKNLIGALLFDSGETAEATRLKRTARRRYTRRKNRICYLQEIFSNEMAKVDDSFFHRLEESFLVEEDKKHERHPIFGNIVDEVAYHEKYPTIYHLRKKLVDSTDKADLRLIYLALAHMIKFRGHFLIEGDLNPDNSDVDKLFIQLVQTYNQLFEENPINASGVDAKAILSARLSKSRRLENLIAQLPGEKKNGLFGNLIALSLGLTPNFKSNFDLAEDAKLQLSKDTYDDDLDNLLAQIGDQYADLFLAAKNLSDAILLSDILRVNTEITKAPLSASMIKRYDEHHQDLTLLKALVRQQLPEKYKEIFFDQSKNGYAGYIDGGASQEEFYKFIKPILEKMDGTEELLVKLNREDLLRKQRTFDNGSIPHQIHLGELHAILRRQEDFYPFLKDNREKIEKILTFRIPYYVGPLARGNSRFAWMTRKSEETITPWNFEEVVDKGASAQSFIERMTNFDKNLPNEKVLPKHSLLYEYFTVYNELTKVKYVTEGMRKPAFLSGEQKKAIVDLLFKTNRKVTVKQLKEDYFKKIECFDSVEISGVEDRFNASLGTYHDLLKIIKDKDFLDNEENEDILEDIVLTLTLFEDREMIEERLKTYAHLFDDKVMKQLKRRRYTGWGRLSRKLINGIRDKQSGKTILDFLKSDGFANRNFMQLIHDDSLTFKEDIQKAQVSGQGDSLHEHIANLAGSPAIKKGILQTVKVVDELVKVMGRHKPENIVIEMARENQTTQKGQKNSRERMKRIEEGIKELGSQILKEHPVENTQLQNEKLYLYYLQNGRDMYVDQELDINRLSDYDVDHIVPQSFLKDDSIDNKVLTRSDKARGKSDNVPSEEVVKKMKNYWRQLLNAKLITQRKFDNLTKAERGGLSELDKAGFIKRQLVETRQITKHVAQILDSRMNTKYDENDKLIREVKVITLKSKLVSDFRKDFQFYKVREINNYHHAHDAYLNAVVGTALIKKYPKLESEFVYGDYKVYDVRKMIAKSEQEIGKATAKYFFYSNIMNFFKTEITLANGEIRKRPLIETNGETGEIVWDKGRDFATVRKVLSMPQVNIVKKTEVQTGGFSKESILPKRNSDKLIARKKDWDPKKYGGFDSPTVAYSVLVVAKVEKGKSKKLKSVKELLGITIMERSSFEKNPIDFLEAKGYKEVKKDLIIKLPKYSLFELENGRKRMLASAGELQKGNELALPSKYVNFLYLASHYEKLKGSPEDNEQKQLFVEQHKHYLDEIIEQISEFSKRVILADANLDKVLSAYNKHRDKPIREQAENIIHLFTLTNLGAPAAFKYFDTTIDRKRYTSTKEVLDATLIHQSITGLYETRIDLSQLGGDGGEAAAKGSSPAPGGTLNIEDEYRLHETSKEPDVSLGSTWLSDFPQAWAETGGMGLAVRQAPLIIPLKATSTPVSIKQYPMSQEARLGIKPHIQRLLDQGILVPCQSPWNTPLLPVKKPGTNDYRPVQDLREVNKRVEDIHPTVPNPYNLLSGLPPSHQWYTVLDLKDAFFCLRLHPTSQPLFAFEWRDPEMGISGQLTWTRLPQGFKNSPTLFNEALHRDLADFRIQHPDLILLQYVDDLLLAATSELDCQQGTRALLQTLGNLGYRASAKKAQICQKQVKYLGYLLKEGQRWLTEARKETVMGQPTPKTPRQLREFLGKAGFCRLFIPGFAEMAAPLYPLTKPGTLFNWGPDQQKAYQEIKQALLTAPALGLPDLTKPFELFVDEKQGYAKGVLTQKLGPWRRPVAYLSKKLDPVAAGWPPCLRMVAAIAVLTKDAGKLTMGQPLVILAPHAVEALVKQPPDRWLSNARMTHYQALLLDTDRVQFGPVVALNPATLLPLPEEGLQHNCLDILAEAHGTRPDLTDQPLPDADHTWYTDGSSLLQEGQRKAGAAVTTETEVIWAKALPAGTSAQRAELIALTQALKMAEGKKLNVYTDSRYAFATAHIHGEIYRRRGWLTSEGKEIKNKDEILALLKALFLPKRLSIIHCPGHQKGHSAEARGNRMADQAARKAAITETPDTSTLLIENSSPSGGSKRTADGSEFEAGKRTADGSEFEKRTADGSEFESPKKKAKVE

SEQ ID NO: 2659 - protein, 2113 aa, synthetic construct
MPAAKRVKLDGGDKKYSIGLDIGTNSVGWAVITDEYKVPSKKFKVLGNTDRHSIKKNLIGALLFDSGETAEATRLKRTARRRYTRRKNRICYLQEIFSNEMAKVDDSFFHRLEESFLVEEDKKHERHPIFGNIVDEVAYHEKYPTIYHLRKKLVDSTDKADLRLIYLALAHMIKFRGHFLIEGDLNPDNSDVDKLFIQLVQTYNQLFEENPINASGVDAKAILSARLSKSRRLENLIAQLPGEKKNGLFGNLIALSLGLTPNFKSNFDLAEDAKLQLSKDTYDDDLDNLLAQIGDQYADLFLAAKNLSDAILLSDILRVNTEITKAPLSASMIKRYDEHHQDLTLLKALVRQQLPEKYKEIFFDQSKNGYAGYIDGGASQEEFYKFIKPILEKMDGTEELLVKLNREDLLRKQRTFDNGSIPHQIHLGELHAILRRQEDFYPFLKDNREKIEKILTFRIPYYVGPLARGNSRFAWMTRKSEETITPWNFEEVVDKGASAQSFIERMTNFDKNLPNEKVLPKHSLLYEYFTVYNELTKVKYVTEGMRKPAFLSGEQKKAIVDLLFKTNRKVTVKQLKEDYFKKIECFDSVEISGVEDRFNASLGTYHDLLKIIKDKDFLDNEENEDILEDIVLTLTLFEDREMIEERLKTYAHLFDDKVMKQLKRRRYTGWGRLSRKLINGIRDKQSGKTILDFLKSDGFANRNFMQLIHDDSLTFKEDIQKAQVSGQGDSLHEHIANLAGSPAIKKGILQTVKVVDELVKVMGRHKPENIVIEMARENQTTQKGQKNSRERMKRIEEGIKELGSQILKEHPVENTQLQNEKLYLYYLQNGRDMYVDQELDINRLSDYDVDHIVPQSFLKDDSIDNKVLTRSDKARGKSDNVPSEEVVKKMKNYWRQLLNAKLITQRKFDNLTKAERGGLSELDKAGFIKRQLVETRQITKHVAQILDSRMNTKYDENDKLIREVKVITLKSKLVSDFRKDFQFYKVREINNYHHAHDAYLNAVVGTALIKKYPKLESEFVYGDYKVYDVRKMIAKSEQEIGKATAKYFFYSNIMNFFKTEITLANGEIRKRPLIETNGETGEIVWDKGRDFATVRKVLSMPQVNIVKKTEVQTGGFSKESILPKRNSDKLIARKKDWDPKKYGGFDSPTVAYSVLVVAKVEKGKSKKLKSVKELLGITIMERSSFEKNPIDFLEAKGYKEVKKDLIIKLPKYSLFELENGRKRMLASAGELQKGNELALPSKYVNFLYLASHYEKLKGSPEDNEQKQLFVEQHKHYLDEIIEQISEFSKRVILADANLDKVLSAYNKHRDKPIREQAENIIHLFTLTNLGAPAAFKYFDTTIDRKRYTSTKEVLDATLIHQSITGLYETRIDLSQLGGDGGEAAAKGGGGGTLNIEDEYRLHETSKEPDVSLGSTWLSDFPQAWAETGGMGLAVRQAPLIIPLKATSTPVSIKQYPMSQEARLGIKPHIQRLLDQGILVPCQSPWNTPLLPVKKPGTNDYRPVQDLREVNKRVEDIHPTVPNPYNLLSGLPPSHQWYTVLDLKDAFFCLRLHPTSQPLFAFEWRDPEMGISGQLTWTRLPQGFKNSPTLFNEALHRDLADFRIQHPDLILLQYVDDLLLAATSELDCQQGTRALLQTLGNLGYRASAKKAQICQKQVKYLGYLLKEGQRWLTEARKETVMGQPTPKTPRQLREFLGKAGFCRLFIPGFAEMAAPLYPLTKPGTLFNWGPDQQKAYQEIKQALLTAPALGLPDLTKPFELFVDEKQGYAKGVLTQKLGPWRRPVAYLSKKLDPVAAGWPPCLRMVAAIAVLTKDAGKLTMGQPLVILAPHAVEALVKQPPDRWLSNARMTHYQALLLDTDRVQFGPVVALNPATLLPLPEEGLQHNCLDILAEAHGTRPDLTDQPLPDADHTWYTDGSSLLQEGQRKAGAAVTTETEVIWAKALPAGTSAQRAELIALTQALKMAEGKKLNVYTDSRYAFATAHIHGEIYRRRGWLTSEGKEIKNKDEILALLKALFLPKRLSIIHCPGHQKGHSAEARGNRMADQAARKAAITETPDTSTLLIENSSPSGGSKRTADGSEFEAGKRTADGSEFEKRTADGSEFESPKKKAKVE

SEQ ID NO: 2660 - protein, 2116 aa, synthetic construct
MPAAKRVKLDGGDKKYSIGLDIGTNSVGWAVITDEYKVPSKKFKVLGNTDRHSIKKNLIGALLFDSGETAEATRLKRTARRRYTRRKNRICYLQEIFSNEMAKVDDSFFHRLEESFLVEEDKKHERHPIFGNIVDEVAYHEKYPTIYHLRKKLVDSTDKADLRLIYLALAHMIKFRGHFLIEGDLNPDNSDVDKLFIQLVQTYNQLFEENPINASGVDAKAILSARLSKSRRLENLIAQLPGEKKNGLFGNLIALSLGLTPNFKSNFDLAEDAKLQLSKDTYDDDLDNLLAQIGDQYADLFLAAKNLSDAILLSDILRVNTEITKAPLSASMIKRYDEHHQDLTLLKALVRQQLPEKYKEIFFDQSKNGYAGYIDGGASQEEFYKFIKPILEKMDGTEELLVKLNREDLLRKQRTFDNGSIPHQIHLGELHAILRRQEDFYPFLKDNREKIEKILTFRIPYYVGPLARGNSRFAWMTRKSEETITPWNFEEVVDKGASAQSFIERMTNFDKNLPNEKVLPKHSLLYEYFTVYNELTKVKYVTEGMRKPAFLSGEQKKAIVDLLFKTNRKVTVKQLKEDYFKKIECFDSVEISGVEDRFNASLGTYHDLLKIIKDKDFLDNEENEDILEDIVLTLTLFEDREMIEERLKTYAHLFDDKVMKQLKRRRYTGWGRLSRKLINGIRDKQSGKTILDFLKSDGFANRNFMQLIHDDSLTFKEDIQKAQVSGQGDSLHEHIANLAGSPAIKKGILQTVKVVDELVKVMGRHKPENIVIEMARENQTTQKGQKNSRERMKRIEEGIKELGSQILKEHPVENTQLQNEKLYLYYLQNGRDMYVDQELDINRLSDYDVDHIVPQSFLKDDSIDNKVLTRSDKARGKSDNVPSEEVVKKMKNYWRQLLNAKLITQRKFDNLTKAERGGLSELDKAGFIKRQLVETRQITKHVAQILDSRMNTKYDENDKLIREVKVITLKSKLVSDFRKDFQFYKVREINNYHHAHDAYLNAVVGTALIKKYPKLESEFVYGDYKVYDVRKMIAKSEQEIGKATAKYFFYSNIMNFFKTEITLANGEIRKRPLIETNGETGEIVWDKGRDFATVRKVLSMPQVNIVKKTEVQTGGFSKESILPKRNSDKLIARKKDWDPKKYGGFDSPTVAYSVLVVAKVEKGKSKKLKSVKELLGITIMERSSFEKNPIDFLEAKGYKEVKKDLIIKLPKYSLFELENGRKRMLASAGELQKGNELALPSKYVNFLYLASHYEKLKGSPEDNEQKQLFVEQHKHYLDEIIEQISEFSKRVILADANLDKVLSAYNKHRDKPIREQAENIIHLFTLTNLGAPAAFKYFDTTIDRKRYTSTKEVLDATLIHQSITGLYETRIDLSQLGGDGGGGSGSSEAAAKGGTLNIEDEYRLHETSKEPDVSLGSTWLSDFPQAWAETGGMGLAVRQAPLIIPLKATSTPVSIKQYPMSQEARLGIKPHIQRLLDQGILVPCQSPWNTPLLPVKKPGTNDYRPVQDLREVNKRVEDIHPTVPNPYNLLSGLPPSHQWYTVLDLKDAFFCLRLHPTSQPLFAFEWRDPEMGISGQLTWTRLPQGFKNSPTLFNEALHRDLADFRIQHPDLILLQYVDDLLLAATSELDCQQGTRALLQTLGNLGYRASAKKAQICQKQVKYLGYLLKEGQRWLTEARKETVMGQPTPKTPRQLREFLGKAGFCRLFIPGFAEMAAPLYPLTKPGTLFNWGPDQQKAYQEIKQALLTAPALGLPDLTKPFELFVDEKQGYAKGVLTQKLGPWRRPVAYLSKKLDPVAAGWPPCLRMVAAIAVLTKDAGKLTMGQPLVILAPHAVEALVKQPPDRWLSNARMTHYQALLLDTDRVQFGPVVALNPATLLPLPEEGLQHNCLDILAEAHGTRPDLTDQPLPDADHTWYTDGSSLLQEGQRKAGAAVTTETEVIWAKALPAGTSAQRAELIALTQALKMAEGKKLNVYTDSRYAFATAHIHGEIYRRRGWLTSEGKEIKNKDEILALLKALFLPKRLSIIHCPGHQKGHSAEARGNRMADQAARKAAITETPDTSTLLIENSSPSGGSKRTADGSEFEAGKRTADGSEFEKRTADGSEFESPKKKAKVE

SEQ ID NO: 2661 - protein, 2116 aa, synthetic construct
MPAAKRVKLDGGDKKYSIGLDIGTNSVGWAVITDEYKVPSKKFKVLGNTDRHSIKKNLIGALLFDSGETAEATRLKRTARRRYTRRKNRICYLQEIFSNEMAKVDDSFFHRLEESFLVEEDKKHERHPIFGNIVDEVAYHEKYPTIYHLRKKLVDSTDKADLRLIYLALAHMIKFRGHFLIEGDLNPDNSDVDKLFIQLVQTYNQLFEENPINASGVDAKAILSARLSKSRRLENLIAQLPGEKKNGLFGNLIALSLGLTPNFKSNFDLAEDAKLQLSKDTYDDDLDNLLAQIGDQYADLFLAAKNLSDAILLSDILRVNTEITKAPLSASMIKRYDEHHQDLTLLKALVRQQLPEKYKEIFFDQSKNGYAGYIDGGASQEEFYKFIKPILEKMDGTEELLVKLNREDLLRKQRTFDNGSIPHQIHLGELHAILRRQEDFYPFLKDNREKIEKILTFRIPYYVGPLARGNSRFAWMTRKSEETITPWNFEEVVDKGASAQSFIERMTNFDKNLPNEKVLPKHSLLYEYFTVYNELTKVKYVTEGMRKPAFLSGEQKKAIVDLLFKTNRKVTVKQLKEDYFKKIECFDSVEISGVEDRFNASLGTYHDLLKIIKDKDFLDNEENEDILEDIVLTLTLFEDREMIEERLKTYAHLFDDKVMKQLKRRRYTGWGRLSRKLINGIRDKQSGKTILDFLKSDGFANRNFMQLIHDDSLTFKEDIQKAQVSGQGDSLHEHIANLAGSPAIKKGILQTVKVVDELVKVMGRHKPENIVIEMARENQTTQKGQKNSRERMKRIEEGIKELGSQILKEHPVENTQLQNEKLYLYYLQNGRDMYVDQELDINRLSDYDVDHIVPQSFLKDDSIDNKVLTRSDKARGKSDNVPSEEVVKKMKNYWRQLLNAKLITQRKFDNLTKAERGGLSELDKAGFIKRQLVETRQITKHVAQILDSRMNTKYDENDKLIREVKVITLKSKLVSDFRKDFQFYKVREINNYHHAHDAYLNAVVGTALIKKYPKLESEFVYGDYKVYDVRKMIAKSEQEIGKATAKYFFYSNIMNFFKTEITLANGEIRKRPLIETNGETGEIVWDKGRDFATVRKVLSMPQVNIVKKTEVQTGGFSKESILPKRNSDKLIARKKDWDPKKYGGFDSPTVAYSVLVVAKVEKGKSKKLKSVKELLGITIMERSSFEKNPIDFLEAKGYKEVKKDLIIKLPKYSLFELENGRKRMLASAGELQKGNELALPSKYVNFLYLASHYEKLKGSPEDNEQKQLFVEQHKHYLDEIIEQISEFSKRVILADANLDKVLSAYNKHRDKPIREQAENIIHLFTLTNLGAPAAFKYFDTTIDRKRYTSTKEVLDATLIHQSITGLYETRIDLSQLGGDGGGSSGGSEAAAKGGTLNIEDEYRLHETSKEPDVSLGSTWLSDFPQAWAETGGMGLAVRQAPLIIPLKATSTPVSIKQYPMSQEARLGIKPHIQRLLDQGILVPCQSPWNTPLLPVKKPGTNDYRPVQDLREVNKRVEDIHPTVPNPYNLLSGLPPSHQWYTVLDLKDAFFCLRLHPTSQPLFAFEWRDPEMGISGQLTWTRLPQGFKNSPTLFNEALHRDLADFRIQHPDLILLQYVDDLLLAATSELDCQQGTRALLQTLGNLGYRASAKKAQICQKQVKYLGYLLKEGQRWLTEARKETVMGQPTPKTPRQLREFLGKAGFCRLFIPGFAEMAAPLYPLTKPGTLFNWGPDQQKAYQEIKQALLTAPALGLPDLTKPFELFVDEKQGYAKGVLTQKLGPWRRPVAYLSKKLDPVAAGWPPCLRMVAAIAVLTKDAGKLTMGQPLVILAPHAVEALVKQPPDRWLSNARMTHYQALLLDTDRVQFGPVVALNPATLLPLPEEGLQHNCLDILAEAHGTRPDLTDQPLPDADHTWYTDGSSLLQEGQRKAGAAVTTETEVIWAKALPAGTSAQRAELIALTQALKMAEGKKLNVYTDSRYAFATAHIHGEIYRRRGWLTSEGKEIKNKDEILALLKALFLPKRLSIIHCPGHQKGHSAEARGNRMADQAARKAAITETPDTSTLLIENSSPSGGSKRTADGSEFEAGKRTADGSEFEKRTADGSEFESPKKKAKVE

SEQ ID NO: 2662 - protein, 2120 aa, synthetic construct
MPAAKRVKLDGGDKKYSIGLDIGTNSVGWAVITDEYKVPSKKFKVLGNTDRHSIKKNLIGALLFDSGETAEATRLKRTARRRYTRRKNRICYLQEIFSNEMAKVDDSFFHRLEESFLVEEDKKHERHPIFGNIVDEVAYHEKYPTIYHLRKKLVDSTDKADLRLIYLALAHMIKFRGHFLIEGDLNPDNSDVDKLFIQLVQTYNQLFEENPINASGVDAKAILSARLSKSRRLENLIAQLPGEKKNGLFGNLIALSLGLTPNFKSNFDLAEDAKLQLSKDTYDDDLDNLLAQIGDQYADLFLAAKNLSDAILLSDILRVNTEITKAPLSASMIKRYDEHHQDLTLLKALVRQQLPEKYKEIFFDQSKNGYAGYIDGGASQEEFYKFIKPILEKMDGTEELLVKLNREDLLRKQRTFDNGSIPHQIHLGELHAILRRQEDFYPFLKDNREKIEKILTFRIPYYVGPLARGNSRFAWMTRKSEETITPWNFEEVVDKGASAQSFIERMTNFDKNLPNEKVLPKHSLLYEYFTVYNELTKVKYVTEGMRKPAFLSGEQKKAIVDLLFKTNRKVTVKQLKEDYFKKIECFDSVEISGVEDRFNASLGTYHDLLKIIKDKDFLDNEENEDILEDIVLTLTLFEDREMIEERLKTYAHLFDDKVMKQLKRRRYTGWGRLSRKLINGIRDKQSGKTILDFLKSDGFANRNFMQLIHDDSLTFKEDIQKAQVSGQGDSLHEHIANLAGSPAIKKGILQTVKVVDELVKVMGRHKPENIVIEMARENQTTQKGQKNSRERMKRIEEGIKELGSQILKEHPVENTQLQNEKLYLYYLQNGRDMYVDQELDINRLSDYDVDHIVPQSFLKDDSIDNKVLTRSDKARGKSDNVPSEEVVKKMKNYWRQLLNAKLITQRKFDNLTKAERGGLSELDKAGFIKRQLVETRQITKHVAQILDSRMNTKYDENDKLIREVKVITLKSKLVSDFRKDFQFYKVREINNYHHAHDAYLNAVVGTALIKKYPKLESEFVYGDYKVYDVRKMIAKSEQEIGKATAKYFFYSNIMNFFKTEITLANGEIRKRPLIETNGETGEIVWDKGRDFATVRKVLSMPQVNIVKKTEVQTGGFSKESILPKRNSDKLIARKKDWDPKKYGGFDSPTVAYSVLVVAKVEKGKSKKLKSVKELLGITIMERSSFEKNPIDFLEAKGYKEVKKDLIIKLPKYSLFELENGRKRMLASAGELQKGNELALPSKYVNFLYLASHYEKLKGSPEDNEQKQLFVEQHKHYLDEIIEQISEFSKRVILADANLDKVLSAYNKHRDKPIREQAENIIHLFTLTNLGAPAAFKYFDTTIDRKRYTSTKEVLDATLIHQSITGLYETRIDLSQLGGDGGGGGGSGGGGSGGGGSGGTLNIEDEYRLHETSKEPDVSLGSTWLSDFPQAWAETGGMGLAVRQAPLIIPLKATSTPVSIKQYPMSQEARLGIKPHIQRLLDQGILVPCQSPWNTPLLPVKKPGTNDYRPVQDLREVNKRVEDIHPTVPNPYNLLSGLPPSHQWYTVLDLKDAFFCLRLHPTSQPLFAFEWRDPEMGISGQLTWTRLPQGFKNSPTLFNEALHRDLADFRIQHPDLILLQYVDDLLLAATSELDCQQGTRALLQTLGNLGYRASAKKAQICQKQVKYLGYLLKEGQRWLTEARKETVMGQPTPKTPRQLREFLGKAGFCRLFIPGFAEMAAPLYPLTKPGTLFNWGPDQQKAYQEIKQALLTAPALGLPDLTKPFELFVDEKQGYAKGVLTQKLGPWRRPVAYLSKKLDPVAAGWPPCLRMVAAIAVLTKDAGKLTMGQPLVILAPHAVEALVKQPPDRWLSNARMTHYQALLLDTDRVQFGPVVALNPATLLPLPEEGLQHNCLDILAEAHGTRPDLTDQPLPDADHTWYTDGSSLLQEGQRKAGAAVTTETEVIWAKALPAGTSAQRAELIALTQALKMAEGKKLNVYTDSRYAFATAHIHGEIYRRRGWLTSEGKEIKNKDEILALLKALFLPKRLSIIHCPGHQKGHSAEARGNRMADQAARKAAITETPDTSTLLIENSSPSGGSKRTADGSEFEAGKRTADGSEFEKRTADGSEFESPKKKAKVE

SEQ ID NO: 2663 - protein, 2121 aa, synthetic construct
MPAAKRVKLDGGDKKYSIGLDIGTNSVGWAVITDEYKVPSKKFKVLGNTDRHSIKKNLIGALLFDSGETAEATRLKRTARRRYTRRKNRICYLQEIFSNEMAKVDDSFFHRLEESFLVEEDKKHERHPIFGNIVDEVAYHEKYPTIYHLRKKLVDSTDKADLRLIYLALAHMIKFRGHFLIEGDLNPDNSDVDKLFIQLVQTYNQLFEENPINASGVDAKAILSARLSKSRRLENLIAQLPGEKKNGLFGNLIALSLGLTPNFKSNFDLAEDAKLQLSKDTYDDDLDNLLAQIGDQYADLFLAAKNLSDAILLSDILRVNTEITKAPLSASMIKRYDEHHQDLTLLKALVRQQLPEKYKEIFFDQSKNGYAGYIDGGASQEEFYKFIKPILEKMDGTEELLVKLNREDLLRKQRTFDNGSIPHQIHLGELHAILRRQEDFYPFLKDNREKIEKILTFRIPYYVGPLARGNSRFAWMTRKSEETITPWNFEEVVDKGASAQSFIERMTNFDKNLPNEKVLPKHSLLYEYFTVYNELTKVKYVTEGMRKPAFLSGEQKKAIVDLLFKTNRKVTVKQLKEDYFKKIECFDSVEISGVEDRFNASLGTYHDLLKIIKDKDFLDNEENEDILEDIVLTLTLFEDREMIEERLKTYAHLFDDKVMKQLKRRRYTGWGRLSRKLINGIRDKQSGKTILDFLKSDGFANRNFMQLIHDDSLTFKEDIQKAQVSGQGDSLHEHIANLAGSPAIKKGILQTVKVVDELVKVMGRHKPENIVIEMARENQTTQKGQKNSRERMKRIEEGIKELGSQILKEHPVENTQLQNEKLYLYYLQNGRDMYVDQELDINRLSDYDVDHIVPQSFLKDDSIDNKVLTRSDKARGKSDNVPSEEVVKKMKNYWRQLLNAKLITQRKFDNLTKAERGGLSELDKAGFIKRQLVETRQITKHVAQILDSRMNTKYDENDKLIREVKVITLKSKLVSDFRKDFQFYKVREINNYHHAHDAYLNAVVGTALIKKYPKLESEFVYGDYKVYDVRKMIAKSEQEIGKATAKYFFYSNIMNFFKTEITLANGEIRKRPLIETNGETGEIVWDKGRDFATVRKVLSMPQVNIVKKTEVQTGGFSKESILPKRNSDKLIARKKDWDPKKYGGFDSPTVAYSVLVVAKVEKGKSKKLKSVKELLGITIMERSSFEKNPIDFLEAKGYKEVKKDLIIKLPKYSLFELENGRKRMLASAGELQKGNELALPSKYVNFLYLASHYEKLKGSPEDNEQKQLFVEQHKHYLDEIIEQISEFSKRVILADANLDKVLSAYNKHRDKPIREQAENIIHLFTLTNLGAPAAFKYFDTTIDRKRYTSTKEVLDATLIHQSITGLYETRIDLSQLGGDGGSGSETPGTSESATPESGGTLNIEDEYRLHETSKEPDVSLGSTWLSDFPQAWAETGGMGLAVRQAPLIIPLKATSTPVSIKQYPMSQEARLGIKPHIQRLLDQGILVPCQSPWNTPLLPVKKPGTNDYRPVQDLREVNKRVEDIHPTVPNPYNLLSGLPPSHQWYTVLDLKDAFFCLRLHPTSQPLFAFEWRDPEMGISGQLTWTRLPQGFKNSPTLFNEALHRDLADFRIQHPDLILLQYVDDLLLAATSELDCQQGTRALLQTLGNLGYRASAKKAQICQKQVKYLGYLLKEGQRWLTEARKETVMGQPTPKTPRQLREFLGKAGFCRLFIPGFAEMAAPLYPLTKPGTLFNWGPDQQKAYQEIKQALLTAPALGLPDLTKPFELFVDEKQGYAKGVLTQKLGPWRRPVAYLSKKLDPVAAGWPPCLRMVAAIAVLTKDAGKLTMGQPLVILAPHAVEALVKQPPDRWLSNARMTHYQALLLDTDRVQFGPVVALNPATLLPLPEEGLQHNCLDILAEAHGTRPDLTDQPLPDADHTWYTDGSSLLQEGQRKAGAAVTTETEVIWAKALPAGTSAQRAELIALTQALKMAEGKKLNVYTDSRYAFATAHIHGEIYRRRGWLTSEGKEIKNKDEILALLKALFLPKRLSIIHCPGHQKGHSAEARGNRMADQAARKAAITETPDTSTLLIENSSPSGGSKRTADGSEFEAGKRTADGSEFEKRTADGSEFESPKKKAKVE

SEQ ID NO: 2664 - protein, 2114 aa, synthetic construct
MPAAKRVKLDGGDKKYSIGLDIGTNSVGWAVITDEYKVPSKKFKVLGNTDRHSIKKNLIGALLFDSGETAEATRLKRTARRRYTRRKNRICYLQEIFSNEMAKVDDSFFHRLEESFLVEEDKKHERHPIFGNIVDEVAYHEKYPTIYHLRKKLVDSTDKADLRLIYLALAHMIKFRGHFLIEGDLNPDNSDVDKLFIQLVQTYNQLFEENPINASGVDAKAILSARLSKSRRLENLIAQLPGEKKNGLFGNLIALSLGLTPNFKSNFDLAEDAKLQLSKDTYDDDLDNLLAQIGDQYADLFLAAKNLSDAILLSDILRVNTEITKAPLSASMIKRYDEHHQDLTLLKALVRQQLPEKYKEIFFDQSKNGYAGYIDGGASQEEFYKFIKPILEKMDGTEELLVKLNREDLLRKQRTFDNGSIPHQIHLGELHAILRRQEDFYPFLKDNREKIEKILTFRIPYYVGPLARGNSRFAWMTRKSEETITPWNFEEVVDKGASAQSFIERMTNFDKNLPNEKVLPKHSLLYEYFTVYNELTKVKYVTEGMRKPAFLSGEQKKAIVDLLFKTNRKVTVKQLKEDYFKKIECFDSVEISGVEDRFNASLGTYHDLLKIIKDKDFLDNEENEDILEDIVLTLTLFEDREMIEERLKTYAHLFDDKVMKQLKRRRYTGWGRLSRKLINGIRDKQSGKTILDFLKSDGFANRNFMQLIHDDSLTFKEDIQKAQVSGQGDSLHEHIANLAGSPAIKKGILQTVKVVDELVKVMGRHKPENIVIEMARENQTTQKGQKNSRERMKRIEEGIKELGSQILKEHPVENTQLQNEKLYLYYLQNGRDMYVDQELDINRLSDYDVDHIVPQSFLKDDSIDNKVLTRSDKARGKSDNVPSEEVVKKMKNYWRQLLNAKLITQRKFDNLTKAERGGLSELDKAGFIKRQLVETRQITKHVAQILDSRMNTKYDENDKLIREVKVITLKSKLVSDFRKDFQFYKVREINNYHHAHDAYLNAVVGTALIKKYPKLESEFVYGDYKVYDVRKMIAKSEQEIGKATAKYFFYSNIMNFFKTEITLANGEIRKRPLIETNGETGEIVWDKGRDFATVRKVLSMPQVNIVKKTEVQTGGFSKESILPKRNSDKLIARKKDWDPKKYGGFDSPTVAYSVLVVAKVEKGKSKKLKSVKELLGITIMERSSFEKNPIDFLEAKGYKEVKKDLIIKLPKYSLFELENGRKRMLASAGELQKGNELALPSKYVNFLYLASHYEKLKGSPEDNEQKQLFVEQHKHYLDEIIEQISEFSKRVILADANLDKVLSAYNKHRDKPIREQAENIIHLFTLTNLGAPAAFKYFDTTIDRKRYTSTKEVLDATLIHQSITGLYETRIDLSQLGGDGGGGGGSSPAPGGTLNIEDEYRLHETSKEPDVSLGSTWLSDFPQAWAETGGMGLAVRQAPLIIPLKATSTPVSIKQYPMSQEARLGIKPHIQRLLDQGILVPCQSPWNTPLLPVKKPGTNDYRPVQDLREVNKRVEDIHPTVPNPYNLLSGLPPSHQWYTVLDLKDAFFCLRLHPTSQPLFAFEWRDPEMGISGQLTWTRLPQGFKNSPTLFNEALHRDLADFRIQHPDLILLQYVDDLLLAATSELDCQQGTRALLQTLGNLGYRASAKKAQICQKQVKYLGYLLKEGQRWLTEARKETVMGQPTPKTPRQLREFLGKAGFCRLFIPGFAEMAAPLYPLTKPGTLFNWGPDQQKAYQEIKQALLTAPALGLPDLTKPFELFVDEKQGYAKGVLTQKLGPWRRPVAYLSKKLDPVAAGWPPCLRMVAAIAVLTKDAGKLTMGQPLVILAPHAVEALVKQPPDRWLSNARMTHYQALLLDTDRVQFGPVVALNPATLLPLPEEGLQHNCLDILAEAHGTRPDLTDQPLPDADHTWYTDGSSLLQEGQRKAGAAVTTETEVIWAKALPAGTSAQRAELIALTQALKMAEGKKLNVYTDSRYAFATAHIHGEIYRRRGWLTSEGKEIKNKDEILALLKALFLPKRLSIIHCPGHQKGHSAEARGNRMADQAARKAAITETPDTSTLLIENSSPSGGSKRTADGSEFEAGKRTADGSEFEKRTADGSEFESPKKKAKVE

SEQ ID NO: 2665 - protein, 2117 aa, synthetic construct
MPAAKRVKLDGGDKKYSIGLDIGTNSVGWAVITDEYKVPSKKFKVLGNTDRHSIKKNLIGALLFDSGETAEATRLKRTARRRYTRRKNRICYLQEIFSNEMAKVDDSFFHRLEESFLVEEDKKHERHPIFGNIVDEVAYHEKYPTIYHLRKKLVDSTDKADLRLIYLALAHMIKFRGHFLIEGDLNPDNSDVDKLFIQLVQTYNQLFEENPINASGVDAKAILSARLSKSRRLENLIAQLPGEKKNGLFGNLIALSLGLTPNFKSNFDLAEDAKLQLSKDTYDDDLDNLLAQIGDQYADLFLAAKNLSDAILLSDILRVNTEITKAPLSASMIKRYDEHHQDLTLLKALVRQQLPEKYKEIFFDQSKNGYAGYIDGGASQEEFYKFIKPILEKMDGTEELLVKLNREDLLRKQRTFDNGSIPHQIHLGELHAILRRQEDFYPFLKDNREKIEKILTFRIPYYVGPLARGNSRFAWMTRKSEETITPWNFEEVVDKGASAQSFIERMTNFDKNLPNEKVLPKHSLLYEYFTVYNELTKVKYVTEGMRKPAFLSGEQKKAIVDLLFKTNRKVTVKQLKEDYFKKIECFDSVEISGVEDRFNASLGTYHDLLKIIKDKDFLDNEENEDILEDIVLTLTLFEDREMIEERLKTYAHLFDDKVMKQLKRRRYTGWGRLSRKLINGIRDKQSGKTILDFLKSDGFANRNFMQLIHDDSLTFKEDIQKAQVSGQGDSLHEHIANLAGSPAIKKGILQTVKVVDELVKVMGRHKPENIVIEMARENQTTQKGQKNSRERMKRIEEGIKELGSQILKEHPVENTQLQNEKLYLYYLQNGRDMYVDQELDINRLSDYDVDHIVPQSFLKDDSIDNKVLTRSDKARGKSDNVPSEEVVKKMKNYWRQLLNAKLITQRKFDNLTKAERGGLSELDKAGFIKRQLVETRQITKHVAQILDSRMNTKYDENDKLIREVKVITLKSKLVSDFRKDFQFYKVREINNYHHAHDAYLNAVVGTALIKKYPKLESEFVYGDYKVYDVRKMIAKSEQEIGKATAKYFFYSNIMNFFKTEITLANGEIRKRPLIETNGETGEIVWDKGRDFATVRKVLSMPQVNIVKKTEVQTGGFSKESILPKRNSDKLIARKKDWDPKKYGGFDSPTVAYSVLVVAKVEKGKSKKLKSVKELLGITIMERSSFEKNPIDFLEAKGYKEVKKDLIIKLPKYSLFELENGRKRMLASAGELQKGNELALPSKYVNFLYLASHYEKLKGSPEDNEQKQLFVEQHKHYLDEIIEQISEFSKRVILADANLDKVLSAYNKHRDKPIREQAENIIHLFTLTNLGAPAAFKYFDTTIDRKRYTSTKEVLDATLIHQSITGLYETRIDLSQLGGDGGGSSGSSGSSGSSGGTLNIEDEYRLHETSKEPDVSLGSTWLSDFPQAWAETGGMGLAVRQAPLIIPLKATSTPVSIKQYPMSQEARLGIKPHIQRLLDQGILVPCQSPWNTPLLPVKKPGTNDYRPVQDLREVNKRVEDIHPTVPNPYNLLSGLPPSHQWYTVLDLKDAFFCLRLHPTSQPLFAFEWRDPEMGISGQLTWTRLPQGFKNSPTLFNEALHRDLADFRIQHPDLILLQYVDDLLLAATSELDCQQGTRALLQTLGNLGYRASAKKAQICQKQVKYLGYLLKEGQRWLTEARKETVMGQPTPKTPRQLREFLGKAGFCRLFIPGFAEMAAPLYPLTKPGTLFNWGPDQQKAYQEIKQALLTAPALGLPDLTKPFELFVDEKQGYAKGVLTQKLGPWRRPVAYLSKKLDPVAAGWPPCLRMVAAIAVLTKDAGKLTMGQPLVILAPHAVEALVKQPPDRWLSNARMTHYQALLLDTDRVQFGPVVALNPATLLPLPEEGLQHNCLDILAEAHGTRPDLTDQPLPDADHTWYTDGSSLLQEGQRKAGAAVTTETEVIWAKALPAGTSAQRAELIALTQALKMAEGKKLNVYTDSRYAFATAHIHGEIYRRRGWLTSEGKEIKNKDEILALLKALFLPKRLSIIHCPGHQKGHSAEARGNRMADQAARKAAITETPDTSTLLIENSSPSGGSKRTADGSEFEAGKRTADGSEFEKRTADGSEFESPKKKAKVE

SEQ ID NO: 2666 - protein, 2116 aa, synthetic construct
MPAAKRVKLDGGDKKYSIGLDIGTNSVGWAVITDEYKVPSKKFKVLGNTDRHSIKKNLIGALLFDSGETAEATRLKRTARRRYTRRKNRICYLQEIFSNEMAKVDDSFFHRLEESFLVEEDKKHERHPIFGNIVDEVAYHEKYPTIYHLRKKLVDSTDKADLRLIYLALAHMIKFRGHFLIEGDLNPDNSDVDKLFIQLVQTYNQLFEENPINASGVDAKAILSARLSKSRRLENLIAQLPGEKKNGLFGNLIALSLGLTPNFKSNFDLAEDAKLQLSKDTYDDDLDNLLAQIGDQYADLFLAAKNLSDAILLSDILRVNTEITKAPLSASMIKRYDEHHQDLTLLKALVRQQLPEKYKEIFFDQSKNGYAGYIDGGASQEEFYKFIKPILEKMDGTEELLVKLNREDLLRKQRTFDNGSIPHQIHLGELHAILRRQEDFYPFLKDNREKIEKILTFRIPYYVGPLARGNSRFAWMTRKSEETITPWNFEEVVDKGASAQSFIERMTNFDKNLPNEKVLPKHSLLYEYFTVYNELTKVKYVTEGMRKPAFLSGEQKKAIVDLLFKTNRKVTVKQLKEDYFKKIECFDSVEISGVEDRFNASLGTYHDLLKIIKDKDFLDNEENEDILEDIVLTLTLFEDREMIEERLKTYAHLFDDKVMKQLKRRRYTGWGRLSRKLINGIRDKQSGKTILDFLKSDGFANRNFMQLIHDDSLTFKEDIQKAQVSGQGDSLHEHIANLAGSPAIKKGILQTVKVVDELVKVMGRHKPENIVIEMARENQTTQKGQKNSRERMKRIEEGIKELGSQILKEHPVENTQLQNEKLYLYYLQNGRDMYVDQELDINRLSDYDVDHIVPQSFLKDDSIDNKVLTRSDKARGKSDNVPSEEVVKKMKNYWRQLLNAKLITQRKFDNLTKAERGGLSELDKAGFIKRQLVETRQITKHVAQILDSRMNTKYDENDKLIREVKVITLKSKLVSDFRKDFQFYKVREINNYHHAHDAYLNAVVGTALIKKYPKLESEFVYGDYKVYDVRKMIAKSEQEIGKATAKYFFYSNIMNFFKTEITLANGEIRKRPLIETNGETGEIVWDKGRDFATVRKVLSMPQVNIVKKTEVQTGGFSKESILPKRNSDKLIARKKDWDPKKYGGFDSPTVAYSVLVVAKVEKGKSKKLKSVKELLGITIMERSSFEKNPIDFLEAKGYKEVKKDLIIKLPKYSLFELENGRKRMLASAGELQKGNELALPSKYVNFLYLASHYEKLKGSPEDNEQKQLFVEQHKHYLDEIIEQISEFSKRVILADANLDKVLSAYNKHRDKPIREQAENIIHLFTLTNLGAPAAFKYFDTTIDRKRYTSTKEVLDATLIHQSITGLYETRIDLSQLGGDGGEAAAKGGSGSSGGTLNIEDEYRLHETSKEPDVSLGSTWLSDFPQAWAETGGMGLAVRQAPLIIPLKATSTPVSIKQYPMSQEARLGIKPHIQRLLDQGILVPCQSPWNTPLLPVKKPGTNDYRPVQDLREVNKRVEDIHPTVPNPYNLLSGLPPSHQWYTVLDLKDAFFCLRLHPTSQPLFAFEWRDPEMGISGQLTWTRLPQGFKNSPTLFNEALHRDLADFRIQHPDLILLQYVDDLLLAATSELDCQQGTRALLQTLGNLGYRASAKKAQICQKQVKYLGYLLKEGQRWLTEARKETVMGQPTPKTPRQLREFLGKAGFCRLFIPGFAEMAAPLYPLTKPGTLFNWGPDQQKAYQEIKQALLTAPALGLPDLTKPFELFVDEKQGYAKGVLTQKLGPWRRPVAYLSKKLDPVAAGWPPCLRMVAAIAVLTKDAGKLTMGQPLVILAPHAVEALVKQPPDRWLSNARMTHYQALLLDTDRVQFGPVVALNPATLLPLPEEGLQHNCLDILAEAHGTRPDLTDQPLPDADHTWYTDGSSLLQEGQRKAGAAVTTETEVIWAKALPAGTSAQRAELIALTQALKMAEGKKLNVYTDSRYAFATAHIHGEIYRRRGWLTSEGKEIKNKDEILALLKALFLPKRLSIIHCPGHQKGHSAEARGNRMADQAARKAAITETPDTSTLLIENSSPSGGSKRTADGSEFEAGKRTADGSEFEKRTADGSEFESPKKKAKVE

SEQ ID NO: 2667 - protein, 2114 aa, synthetic construct
MPAAKRVKLDGGDKKYSIGLDIGTNSVGWAVITDEYKVPSKKFKVLGNTDRHSIKKNLIGALLFDSGETAEATRLKRTARRRYTRRKNRICYLQEIFSNEMAKVDDSFFHRLEESFLVEEDKKHERHPIFGNIVDEVAYHEKYPTIYHLRKKLVDSTDKADLRLIYLALAHMIKFRGHFLIEGDLNPDNSDVDKLFIQLVQTYNQLFEENPINASGVDAKAILSARLSKSRRLENLIAQLPGEKKNGLFGNLIALSLGLTPNFKSNFDLAEDAKLQLSKDTYDDDLDNLLAQIGDQYADLFLAAKNLSDAILLSDILRVNTEITKAPLSASMIKRYDEHHQDLTLLKALVRQQLPEKYKEIFFDQSKNGYAGYIDGGASQEEFYKFIKPILEKMDGTEELLVKLNREDLLRKQRTFDNGSIPHQIHLGELHAILRRQEDFYPFLKDNREKIEKILTFRIPYYVGPLARGNSRFAWMTRKSEETITPWNFEEVVDKGASAQSFIERMTNFDKNLPNEKVLPKHSLLYEYFTVYNELTKVKYVTEGMRKPAFLSGEQKKAIVDLLFKTNRKVTVKQLKEDYFKKIECFDSVEISGVEDRFNASLGTYHDLLKIIKDKDFLDNEENEDILEDIVLTLTLFEDREMIEERLKTYAHLFDDKVMKQLKRRRYTGWGRLSRKLINGIRDKQSGKTILDFLKSDGFANRNFMQLIHDDSLTFKEDIQKAQVSGQGDSLHEHIANLAGSPAIKKGILQTVKVVDELVKVMGRHKPENIVIEMARENQTTQKGQKNSRERMKRIEEGIKELGSQILKEHPVENTQLQNEKLYLYYLQNGRDMYVDQELDINRLSDYDVDHIVPQSFLKDDSIDNKVLTRSDKARGKSDNVPSEEVVKKMKNYWRQLLNAKLITQRKFDNLTKAERGGLSELDKAGFIKRQLVETRQITKHVAQILDSRMNTKYDENDKLIREVKVITLKSKLVSDFRKDFQFYKVREINNYHHAHDAYLNAVVGTALIKKYPKLESEFVYGDYKVYDVRKMIAKSEQEIGKATAKYFFYSNIMNFFKTEITLANGEIRKRPLIETNGETGEIVWDKGRDFATVRKVLSMPQVNIVKKTEVQTGGFSKESILPKRNSDKLIARKKDWDPKKYGGFDSPTVAYSVLVVAKVEKGKSKKLKSVKELLGITIMERSSFEKNPIDFLEAKGYKEVKKDLIIKLPKYSLFELENGRKRMLASAGELQKGNELALPSKYVNFLYLASHYEKLKGSPEDNEQKQLFVEQHKHYLDEIIEQISEFSKRVILADANLDKVLSAYNKHRDKPIREQAENIIHLFTLTNLGAPAAFKYFDTTIDRKRYTSTKEVLDATLIHQSITGLYETRIDLSQLGGDGGGGSPAPGGGGGTLNIEDEYRLHETSKEPDVSLGSTWLSDFPQAWAETGGMGLAVRQAPLIIPLKATSTPVSIKQYPMSQEARLGIKPHIQRLLDQGILVPCQSPWNTPLLPVKKPGTNDYRPVQDLREVNKRVEDIHPTVPNPYNLLSGLPPSHQWYTVLDLKDAFFCLRLHPTSQPLFAFEWRDPEMGISGQLTWTRLPQGFKNSPTLFNEALHRDLADFRIQHPDLILLQYVDDLLLAATSELDCQQGTRALLQTLGNLGYRASAKKAQICQKQVKYLGYLLKEGQRWLTEARKETVMGQPTPKTPRQLREFLGKAGFCRLFIPGFAEMAAPLYPLTKPGTLFNWGPDQQKAYQEIKQALLTAPALGLPDLTKPFELFVDEKQGYAKGVLTQKLGPWRRPVAYLSKKLDPVAAGWPPCLRMVAAIAVLTKDAGKLTMGQPLVILAPHAVEALVKQPPDRWLSNARMTHYQALLLDTDRVQFGPVVALNPATLLPLPEEGLQHNCLDILAEAHGTRPDLTDQPLPDADHTWYTDGSSLLQEGQRKAGAAVTTETEVIWAKALPAGTSAQRAELIALTQALKMAEGKKLNVYTDSRYAFATAHIHGEIYRRRGWLTSEGKEIKNKDEILALLKALFLPKRLSIIHCPGHQKGHSAEARGNRMADQAARKAAITETPDTSTLLIENSSPSGGSKRTADGSEFEAGKRTADGSEFEKRTADGSEFESPKKKAKVE

SEQ ID NO: 2668 - protein, 2116 aa, synthetic construct
MPAAKRVKLDGGDKKYSIGLDIGTNSVGWAVITDEYKVPSKKFKVLGNTDRHSIKKNLIGALLFDSGETAEATRLKRTARRRYTRRKNRICYLQEIFSNEMAKVDDSFFHRLEESFLVEEDKKHERHPIFGNIVDEVAYHEKYPTIYHLRKKLVDSTDKADLRLIYLALAHMIKFRGHFLIEGDLNPDNSDVDKLFIQLVQTYNQLFEENPINASGVDAKAILSARLSKSRRLENLIAQLPGEKKNGLFGNLIALSLGLTPNFKSNFDLAEDAKLQLSKDTYDDDLDNLLAQIGDQYADLFLAAKNLSDAILLSDILRVNTEITKAPLSASMIKRYDEHHQDLTLLKALVRQQLPEKYKEIFFDQSKNGYAGYIDGGASQEEFYKFIKPILEKMDGTEELLVKLNREDLLRKQRTFDNGSIPHQIHLGELHAILRRQEDFYPFLKDNREKIEKILTFRIPYYVGPLARGNSRFAWMTRKSEETITPWNFEEVVDKGASAQSFIERMTNFDKNLPNEKVLPKHSLLYEYFTVYNELTKVKYVTEGMRKPAFLSGEQKKAIVDLLFKTNRKVTVKQLKEDYFKKIECFDSVEISGVEDRFNASLGTYHDLLKIIKDKDFLDNEENEDILEDIVLTLTLFEDREMIEERLKTYAHLFDDKVMKQLKRRRYTGWGRLSRKLINGIRDKQSGKTILDFLKSDGFANRNFMQLIHDDSLTFKEDIQKAQVSGQGDSLHEHIANLAGSPAIKKGILQTVKVVDELVKVMGRHKPENIVIEMARENQTTQKGQKNSRERMKRIEEGIKELGSQILKEHPVENTQLQNEKLYLYYLQNGRDMYVDQELDINRLSDYDVDHIVPQSFLKDDSIDNKVLTRSDKARGKSDNVPSEEVVKKMKNYWRQLLNAKLITQRKFDNLTKAERGGLSELDKAGFIKRQLVETRQITKHVAQILDSRMNTKYDENDKLIREVKVITLKSKLVSDFRKDFQFYKVREINNYHHAHDAYLNAVVGTALIKKYPKLESEFVYGDYKVYDVRKMIAKSEQEIGKATAKYFFYSNIMNFFKTEITLANGEIRKRPLIETNGETGEIVWDKGRDFATVRKVLSMPQVNIVKKTEVQTGGFSKESILPKRNSDKLIARKKDWDPKKYGGFDSPTVAYSVLVVAKVEKGKSKKLKSVKELLGITIMERSSFEKNPIDFLEAKGYKEVKKDLIIKLPKYSLFELENGRKRMLASAGELQKGNELALPSKYVNFLYLASHYEKLKGSPEDNEQKQLFVEQHKHYLDEIIEQISEFSKRVILADANLDKVLSAYNKHRDKPIREQAENIIHLFTLTNLGAPAAFKYFDTTIDRKRYTSTKEVLDATLIHQSITGLYETRIDLSQLGGDGGPAPEAAAKGGGGGTLNIEDEYRLHETSKEPDVSLGSTWLSDFPQAWAETGGMGLAVRQAPLIIPLKATSTPVSIKQYPMSQEARLGIKPHIQRLLDQGILVPCQSPWNTPLLPVKKPGTNDYRPVQDLREVNKRVEDIHPTVPNPYNLLSGLPPSHQWYTVLDLKDAFFCLRLHPTSQPLFAFEWRDPEMGISGQLTWTRLPQGFKNSPTLFNEALHRDLADFRIQHPDLILLQYVDDLLLAATSELDCQQGTRALLQTLGNLGYRASAKKAQICQKQVKYLGYLLKEGQRWLTEARKETVMGQPTPKTPRQLREFLGKAGFCRLFIPGFAEMAAPLYPLTKPGTLFNWGPDQQKAYQEIKQALLTAPALGLPDLTKPFELFVDEKQGYAKGVLTQKLGPWRRPVAYLSKKLDPVAAGWPPCLRMVAAIAVLTKDAGKLTMGQPLVILAPHAVEALVKQPPDRWLSNARMTHYQALLLDTDRVQFGPVVALNPATLLPLPEEGLQHNCLDILAEAHGTRPDLTDQPLPDADHTWYTDGSSLLQEGQRKAGAAVTTETEVIWAKALPAGTSAQRAELIALTQALKMAEGKKLNVYTDSRYAFATAHIHGEIYRRRGWLTSEGKEIKNKDEILALLKALFLPKRLSIIHCPGHQKGHSAEARGNRMADQAARKAAITETPDTSTLLIENSSPSGGSKRTADGSEFEAGKRTADGSEFEKRTADGSEFESPKKKAKVE

SEQ ID NO: 2669 - protein, 2120 aa, synthetic construct
MPAAKRVKLDGGDKKYSIGLDIGTNSVGWAVITDEYKVPSKKFKVLGNTDRHSIKKNLIGALLFDSGETAEATRLKRTARRRYTRRKNRICYLQEIFSNEMAKVDDSFFHRLEESFLVEEDKKHERHPIFGNIVDEVAYHEKYPTIYHLRKKLVDSTDKADLRLIYLALAHMIKFRGHFLIEGDLNPDNSDVDKLFIQLVQTYNQLFEENPINASGVDAKAILSARLSKSRRLENLIAQLPGEKKNGLFGNLIALSLGLTPNFKSNFDLAEDAKLQLSKDTYDDDLDNLLAQIGDQYADLFLAAKNLSDAILLSDILRVNTEITKAPLSASMIKRYDEHHQDLTLLKALVRQQLPEKYKEIFFDQSKNGYAGYIDGGASQEEFYKFIKPILEKMDGTEELLVKLNREDLLRKQRTFDNGSIPHQIHLGELHAILRRQEDFYPFLKDNREKIEKILTFRIPYYVGPLARGNSRFAWMTRKSEETITPWNFEEVVDKGASAQSFIERMTNFDKNLPNEKVLPKHSLLYEYFTVYNELTKVKYVTEGMRKPAFLSGEQKKAIVDLLFKTNRKVTVKQLKEDYFKKIECFDSVEISGVEDRFNASLGTYHDLLKIIKDKDFLDNEENEDILEDIVLTLTLFEDREMIEERLKTYAHLFDDKVMKQLKRRRYTGWGRLSRKLINGIRDKQSGKTILDFLKSDGFANRNFMQLIHDDSLTFKEDIQKAQVSGQGDSLHEHIANLAGSPAIKKGILQTVKVVDELVKVMGRHKPENIVIEMARENQTTQKGQKNSRERMKRIEEGIKELGSQILKEHPVENTQLQNEKLYLYYLQNGRDMYVDQELDINRLSDYDVDHIVPQSFLKDDSIDNKVLTRSDKARGKSDNVPSEEVVKKMKNYWRQLLNAKLITQRKFDNLTKAERGGLSELDKAGFIKRQLVETRQITKHVAQILDSRMNTKYDENDKLIREVKVITLKSKLVSDFRKDFQFYKVREINNYHHAHDAYLNAVVGTALIKKYPKLESEFVYGDYKVYDVRKMIAKSEQEIGKATAKYFFYSNIMNFFKTEITLANGEIRKRPLIETNGETGEIVWDKGRDFATVRKVLSMPQVNIVKKTEVQTGGFSKESILPKRNSDKLIARKKDWDPKKYGGFDSPTVAYSVLVVAKVEKGKSKKLKSVKELLGITIMERSSFEKNPIDFLEAKGYKEVKKDLIIKLPKYSLFELENGRKRMLASAGELQKGNELALPSKYVNFLYLASHYEKLKGSPEDNEQKQLFVEQHKHYLDEIIEQISEFSKRVILADANLDKVLSAYNKHRDKPIREQAENIIHLFTLTNLGAPAAFKYFDTTIDRKRYTSTKEVLDATLIHQSITGLYETRIDLSQLGGDGGGSSGSSGSSGSSGSSGGTLNIEDEYRLHETSKEPDVSLGSTWLSDFPQAWAETGGMGLAVRQAPLIIPLKATSTPVSIKQYPMSQEARLGIKPHIQRLLDQGILVPCQSPWNTPLLPVKKPGTNDYRPVQDLREVNKRVEDIHPTVPNPYNLLSGLPPSHQWYTVLDLKDAFFCLRLHPTSQPLFAFEWRDPEMGISGQLTWTRLPQGFKNSPTLFNEALHRDLADFRIQHPDLILLQYVDDLLLAATSELDCQQGTRALLQTLGNLGYRASAKKAQICQKQVKYLGYLLKEGQRWLTEARKETVMGQPTPKTPRQLREFLGKAGFCRLFIPGFAEMAAPLYPLTKPGTLFNWGPDQQKAYQEIKQALLTAPALGLPDLTKPFELFVDEKQGYAKGVLTQKLGPWRRPVAYLSKKLDPVAAGWPPCLRMVAAIAVLTKDAGKLTMGQPLVILAPHAVEALVKQPPDRWLSNARMTHYQALLLDTDRVQFGPVVALNPATLLPLPEEGLQHNCLDILAEAHGTRPDLTDQPLPDADHTWYTDGSSLLQEGQRKAGAAVTTETEVIWAKALPAGTSAQRAELIALTQALKMAEGKKLNVYTDSRYAFATAHIHGEIYRRRGWLTSEGKEIKNKDEILALLKALFLPKRLSIIHCPGHQKGHSAEARGNRMADQAARKAAITETPDTSTLLIENSSPSGGSKRTADGSEFEAGKRTADGSEFEKRTADGSEFESPKKKAKVE

SEQ ID NO: 2670 - protein, 2114 aa, synthetic construct
MPAAKRVKLDGGDKKYSIGLDIGTNSVGWAVITDEYKVPSKKFKVLGNTDRHSIKKNLIGALLFDSGETAEATRLKRTARRRYTRRKNRICYLQEIFSNEMAKVDDSFFHRLEESFLVEEDKKHERHPIFGNIVDEVAYHEKYPTIYHLRKKLVDSTDKADLRLIYLALAHMIKFRGHFLIEGDLNPDNSDVDKLFIQLVQTYNQLFEENPINASGVDAKAILSARLSKSRRLENLIAQLPGEKKNGLFGNLIALSLGLTPNFKSNFDLAEDAKLQLSKDTYDDDLDNLLAQIGDQYADLFLAAKNLSDAILLSDILRVNTEITKAPLSASMIKRYDEHHQDLTLLKALVRQQLPEKYKEIFFDQSKNGYAGYIDGGASQEEFYKFIKPILEKMDGTEELLVKLNREDLLRKQRTFDNGSIPHQIHLGELHAILRRQEDFYPFLKDNREKIEKILTFRIPYYVGPLARGNSRFAWMTRKSEETITPWNFEEVVDKGASAQSFIERMTNFDKNLPNEKVLPKHSLLYEYFTVYNELTKVKYVTEGMRKPAFLSGEQKKAIVDLLFKTNRKVTVKQLKEDYFKKIECFDSVEISGVEDRFNASLGTYHDLLKIIKDKDFLDNEENEDILEDIVLTLTLFEDREMIEERLKTYAHLFDDKVMKQLKRRRYTGWGRLSRKLINGIRDKQSGKTILDFLKSDGFANRNFMQLIHDDSLTFKEDIQKAQVSGQGDSLHEHIANLAGSPAIKKGILQTVKVVDELVKVMGRHKPENIVIEMARENQTTQKGQKNSRERMKRIEEGIKELGSQILKEHPVENTQLQNEKLYLYYLQNGRDMYVDQELDINRLSDYDVDHIVPQSFLKDDSIDNKVLTRSDKARGKSDNVPSEEVVKKMKNYWRQLLNAKLITQRKFDNLTKAERGGLSELDKAGFIKRQLVETRQITKHVAQILDSRMNTKYDENDKLIREVKVITLKSKLVSDFRKDFQFYKVREINNYHHAHDAYLNAVVGTALIKKYPKLESEFVYGDYKVYDVRKMIAKSEQEIGKATAKYFFYSNIMNFFKTEITLANGEIRKRPLIETNGETGEIVWDKGRDFATVRKVLSMPQVNIVKKTEVQTGGFSKESILPKRNSDKLIARKKDWDPKKYGGFDSPTVAYSVLVVAKVEKGKSKKLKSVKELLGITIMERSSFEKNPIDFLEAKGYKEVKKDLIIKLPKYSLFELENGRKRMLASAGELQKGNELALPSKYVNFLYLASHYEKLKGSPEDNEQKQLFVEQHKHYLDEIIEQISEFSKRVILADANLDKVLSAYNKHRDKPIREQAENIIHLFTLTNLGAPAAFKYFDTTIDRKRYTSTKEVLDATLIHQSITGLYETRIDLSQLGGDGGGGGGGSGSSGGTLNIEDEYRLHETSKEPDVSLGSTWLSDFPQAWAETGGMGLAVRQAPLIIPLKATSTPVSIKQYPMSQEARLGIKPHIQRLLDQGILVPCQSPWNTPLLPVKKPGTNDYRPVQDLREVNKRVEDIHPTVPNPYNLLSGLPPSHQWYTVLDLKDAFFCLRLHPTSQPLFAFEWRDPEMGISGQLTWTRLPQGFKNSPTLFNEALHRDLADFRIQHPDLILLQYVDDLLLAATSELDCQQGTRALLQTLGNLGYRASAKKAQICQKQVKYLGYLLKEGQRWLTEARKETVMGQPTPKTPRQLREFLGKAGFCRLFIPGFAEMAAPLYPLTKPGTLFNWGPDQQKAYQEIKQALLTAPALGLPDLTKPFELFVDEKQGYAKGVLTQKLGPWRRPVAYLSKKLDPVAAGWPPCLRMVAAIAVLTKDAGKLTMGQPLVILAPHAVEALVKQPPDRWLSNARMTHYQALLLDTDRVQFGPVVALNPATLLPLPEEGLQHNCLDILAEAHGTRPDLTDQPLPDADHTWYTDGSSLLQEGQRKAGAAVTTETEVIWAKALPAGTSAQRAELIALTQALKMAEGKKLNVYTDSRYAFATAHIHGEIYRRRGWLTSEGKEIKNKDEILALLKALFLPKRLSIIHCPGHQKGHSAEARGNRMADQAARKAAITETPDTSTLLIENSSPSGGSKRTADGSEFEAGKRTADGSEFEKRTADGSEFESPKKKAKVE

SEQ ID NO: 2671 - protein, 2111 aa, synthetic construct
MPAAKRVKLDGGDKKYSIGLDIGTNSVGWAVITDEYKVPSKKFKVLGNTDRHSIKKNLIGALLFDSGETAEATRLKRTARRRYTRRKNRICYLQEIFSNEMAKVDDSFFHRLEESFLVEEDKKHERHPIFGNIVDEVAYHEKYPTIYHLRKKLVDSTDKADLRLIYLALAHMIKFRGHFLIEGDLNPDNSDVDKLFIQLVQTYNQLFEENPINASGVDAKAILSARLSKSRRLENLIAQLPGEKKNGLFGNLIALSLGLTPNFKSNFDLAEDAKLQLSKDTYDDDLDNLLAQIGDQYADLFLAAKNLSDAILLSDILRVNTEITKAPLSASMIKRYDEHHQDLTLLKALVRQQLPEKYKEIFFDQSKNGYAGYIDGGASQEEFYKFIKPILEKMDGTEELLVKLNREDLLRKQRTFDNGSIPHQIHLGELHAILRRQEDFYPFLKDNREKIEKILTFRIPYYVGPLARGNSRFAWMTRKSEETITPWNFEEVVDKGASAQSFIERMTNFDKNLPNEKVLPKHSLLYEYFTVYNELTKVKYVTEGMRKPAFLSGEQKKAIVDLLFKTNRKVTVKQLKEDYFKKIECFDSVEISGVEDRFNASLGTYHDLLKIIKDKDFLDNEENEDILEDIVLTLTLFEDREMIEERLKTYAHLFDDKVMKQLKRRRYTGWGRLSRKLINGIRDKQSGKTILDFLKSDGFANRNFMQLIHDDSLTFKEDIQKAQVSGQGDSLHEHIANLAGSPAIKKGILQTVKVVDELVKVMGRHKPENIVIEMARENQTTQKGQKNSRERMKRIEEGIKELGSQILKEHPVENTQLQNEKLYLYYLQNGRDMYVDQELDINRLSDYDVDHIVPQSFLKDDSIDNKVLTRSDKARGKSDNVPSEEVVKKMKNYWRQLLNAKLITQRKFDNLTKAERGGLSELDKAGFIKRQLVETRQITKHVAQILDSRMNTKYDENDKLIREVKVITLKSKLVSDFRKDFQFYKVREINNYHHAHDAYLNAVVGTALIKKYPKLESEFVYGDYKVYDVRKMIAKSEQEIGKATAKYFFYSNIMNFFKTEITLANGEIRKRPLIETNGETGEIVWDKGRDFATVRKVLSMPQVNIVKKTEVQTGGFSKESILPKRNSDKLIARKKDWDPKKYGGFDSPTVAYSVLVVAKVEKGKSKKLKSVKELLGITIMERSSFEKNPIDFLEAKGYKEVKKDLIIKLPKYSLFELENGRKRMLASAGELQKGNELALPSKYVNFLYLASHYEKLKGSPEDNEQKQLFVEQHKHYLDEIIEQISEFSKRVILADANLDKVLSAYNKHRDKPIREQAENIIHLFTLTNLGAPAAFKYFDTTIDRKRYTSTKEVLDATLIHQSITGLYETRIDLSQLGGDGGGGSPAPGGTLNIEDEYRLHETSKEPDVSLGSTWLSDFPQAWAETGGMGLAVRQAPLIIPLKATSTPVSIKQYPMSQEARLGIKPHIQRLLDQGILVPCQSPWNTPLLPVKKPGTNDYRPVQDLREVNKRVEDIHPTVPNPYNLLSGLPPSHQWYTVLDLKDAFFCLRLHPTSQPLFAFEWRDPEMGISGQLTWTRLPQGFKNSPTLFNEALHRDLADFRIQHPDLILLQYVDDLLLAATSELDCQQGTRALLQTLGNLGYRASAKKAQICQKQVKYLGYLLKEGQRWLTEARKETVMGQPTPKTPRQLREFLGKAGFCRLFIPGFAEMAAPLYPLTKPGTLFNWGPDQQKAYQEIKQALLTAPALGLPDLTKPFELFVDEKQGYAKGVLTQKLGPWRRPVAYLSKKLDPVAAGWPPCLRMVAAIAVLTKDAGKLTMGQPLVILAPHAVEALVKQPPDRWLSNARMTHYQALLLDTDRVQFGPVVALNPATLLPLPEEGLQHNCLDILAEAHGTRPDLTDQPLPDADHTWYTDGSSLLQEGQRKAGAAVTTETEVIWAKALPAGTSAQRAELIALTQALKMAEGKKLNVYTDSRYAFATAHIHGEIYRRRGWLTSEGKEIKNKDEILALLKALFLPKRLSIIHCPGHQKGHSAEARGNRMADQAARKAAITETPDTSTLLIENSSPSGGSKRTADGSEFEAGKRTADGSEFEKRTADGSEFESPKKKAKVE

SEQ ID NO: 2672 - protein, 2111 aa, synthetic construct
MPAAKRVKLDGGDKKYSIGLDIGTNSVGWAVITDEYKVPSKKFKVLGNTDRHSIKKNLIGALLFDSGETAEATRLKRTARRRYTRRKNRICYLQEIFSNEMAKVDDSFFHRLEESFLVEEDKKHERHPIFGNIVDEVAYHEKYPTIYHLRKKLVDSTDKADLRLIYLALAHMIKFRGHFLIEGDLNPDNSDVDKLFIQLVQTYNQLFEENPINASGVDAKAILSARLSKSRRLENLIAQLPGEKKNGLFGNLIALSLGLTPNFKSNFDLAEDAKLQLSKDTYDDDLDNLLAQIGDQYADLFLAAKNLSDAILLSDILRVNTEITKAPLSASMIKRYDEHHQDLTLLKALVRQQLPEKYKEIFFDQSKNGYAGYIDGGASQEEFYKFIKPILEKMDGTEELLVKLNREDLLRKQRTFDNGSIPHQIHLGELHAILRRQEDFYPFLKDNREKIEKILTFRIPYYVGPLARGNSRFAWMTRKSEETITPWNFEEVVDKGASAQSFIERMTNFDKNLPNEKVLPKHSLLYEYFTVYNELTKVKYVTEGMRKPAFLSGEQKKAIVDLLFKTNRKVTVKQLKEDYFKKIECFDSVEISGVEDRFNASLGTYHDLLKIIKDKDFLDNEENEDILEDIVLTLTLFEDREMIEERLKTYAHLFDDKVMKQLKRRRYTGWGRLSRKLINGIRDKQSGKTILDFLKSDGFANRNFMQLIHDDSLTFKEDIQKAQVSGQGDSLHEHIANLAGSPAIKKGILQTVKVVDELVKVMGRHKPENIVIEMARENQTTQKGQKNSRERMKRIEEGIKELGSQILKEHPVENTQLQNEKLYLYYLQNGRDMYVDQELDINRLSDYDVDHIVPQSFLKDDSIDNKVLTRSDKARGKSDNVPSEEVVKKMKNYWRQLLNAKLITQRKFDNLTKAERGGLSELDKAGFIKRQLVETRQITKHVAQILDSRMNTKYDENDKLIREVKVITLKSKLVSDFRKDFQFYKVREINNYHHAHDAYLNAVVGTALIKKYPKLESEFVYGDYKVYDVRKMIAKSEQEIGKATAKYFFYSNIMNFFKTEITLANGEIRKRPLIETNGETGEIVWDKGRDFATVRKVLSMPQVNIVKKTEVQTGGFSKESILPKRNSDKLIARKKDWDPKKYGGFDSPTVAYSVLVVAKVEKGKSKKLKSVKELLGITIMERSSFEKNPIDFLEAKGYKEVKKDLIIKLPKYSLFELENGRKRMLASAGELQKGNELALPSKYVNFLYLASHYEKLKGSPEDNEQKQLFVEQHKHYLDEIIEQISEFSKRVILADANLDKVLSAYNKHRDKPIREQAENIIHLFTLTNLGAPAAFKYFDTTIDRKRYTSTKEVLDATLIHQSITGLYETRIDLSQLGGDGGGGGPAPGGTLNIEDEYRLHETSKEPDVSLGSTWLSDFPQAWAETGGMGLAVRQAPLIIPLKATSTPVSIKQYPMSQEARLGIKPHIQRLLDQGILVPCQSPWNTPLLPVKKPGTNDYRPVQDLREVNKRVEDIHPTVPNPYNLLSGLPPSHQWYTVLDLKDAFFCLRLHPTSQPLFAFEWRDPEMGISGQLTWTRLPQGFKNSPTLFNEALHRDLADFRIQHPDLILLQYVDDLLLAATSELDCQQGTRALLQTLGNLGYRASAKKAQICQKQVKYLGYLLKEGQRWLTEARKETVMGQPTPKTPRQLREFLGKAGFCRLFIPGFAEMAAPLYPLTKPGTLFNWGPDQQKAYQEIKQALLTAPALGLPDLTKPFELFVDEKQGYAKGVLTQKLGPWRRPVAYLSKKLDPVAAGWPPCLRMVAAIAVLTKDAGKLTMGQPLVILAPHAVEALVKQPPDRWLSNARMTHYQALLLDTDRVQFGPVVALNPATLLPLPEEGLQHNCLDILAEAHGTRPDLTDQPLPDADHTWYTDGSSLLQEGQRKAGAAVTTETEVIWAKALPAGTSAQRAELIALTQALKMAEGKKLNVYTDSRYAFATAHIHGEIYRRRGWLTSEGKEIKNKDEILALLKALFLPKRLSIIHCPGHQKGHSAEARGNRMADQAARKAAITETPDTSTLLIENSSPSGGSKRTADGSEFEAGKRTADGSEFEKRTADGSEFESPKKKAKVE

SEQ ID NO: 2673 - protein, 2116 aa, synthetic construct
MPAAKRVKLDGGDKKYSIGLDIGTNSVGWAVITDEYKVPSKKFKVLGNTDRHSIKKNLIGALLFDSGETAEATRLKRTARRRYTRRKNRICYLQEIFSNEMAKVDDSFFHRLEESFLVEEDKKHERHPIFGNIVDEVAYHEKYPTIYHLRKKLVDSTDKADLRLIYLALAHMIKFRGHFLIEGDLNPDNSDVDKLFIQLVQTYNQLFEENPINASGVDAKAILSARLSKSRRLENLIAQLPGEKKNGLFGNLIALSLGLTPNFKSNFDLAEDAKLQLSKDTYDDDLDNLLAQIGDQYADLFLAAKNLSDAILLSDILRVNTEITKAPLSASMIKRYDEHHQDLTLLKALVRQQLPEKYKEIFFDQSKNGYAGYIDGGASQEEFYKFIKPILEKMDGTEELLVKLNREDLLRKQRTFDNGSIPHQIHLGELHAILRRQEDFYPFLKDNREKIEKILTFRIPYYVGPLARGNSRFAWMTRKSEETITPWNFEEVVDKGASAQSFIERMTNFDKNLPNEKVLPKHSLLYEYFTVYNELTKVKYVTEGMRKPAFLSGEQKKAIVDLLFKTNRKVTVKQLKEDYFKKIECFDSVEISGVEDRFNASLGTYHDLLKIIKDKDFLDNEENEDILEDIVLTLTLFEDREMIEERLKTYAHLFDDKVMKQLKRRRYTGWGRLSRKLINGIRDKQSGKTILDFLKSDGFANRNFMQLIHDDSLTFKEDIQKAQVSGQGDSLHEHIANLAGSPAIKKGILQTVKVVDELVKVMGRHKPENIVIEMARENQTTQKGQKNSRERMKRIEEGIKELGSQILKEHPVENTQLQNEKLYLYYLQNGRDMYVDQELDINRLSDYDVDHIVPQSFLKDDSIDNKVLTRSDKARGKSDNVPSEEVVKKMKNYWRQLLNAKLITQRKFDNLTKAERGGLSELDKAGFIKRQLVETRQITKHVAQILDSRMNTKYDENDKLIREVKVITLKSKLVSDFRKDFQFYKVREINNYHHAHDAYLNAVVGTALIKKYPKLESEFVYGDYKVYDVRKMIAKSEQEIGKATAKYFFYSNIMNFFKTEITLANGEIRKRPLIETNGETGEIVWDKGRDFATVRKVLSMPQVNIVKKTEVQTGGFSKESILPKRNSDKLIARKKDWDPKKYGGFDSPTVAYSVLVVAKVEKGKSKKLKSVKELLGITIMERSSFEKNPIDFLEAKGYKEVKKDLIIKLPKYSLFELENGRKRMLASAGELQKGNELALPSKYVNFLYLASHYEKLKGSPEDNEQKQLFVEQHKHYLDEIIEQISEFSKRVILADANLDKVLSAYNKHRDKPIREQAENIIHLFTLTNLGAPAAFKYFDTTIDRKRYTSTKEVLDATLIHQSITGLYETRIDLSQLGGDGGGGSEAAAKGSSGGTLNIEDEYRLHETSKEPDVSLGSTWLSDFPQAWAETGGMGLAVRQAPLIIPLKATSTPVSIKQYPMSQEARLGIKPHIQRLLDQGILVPCQSPWNTPLLPVKKPGTNDYRPVQDLREVNKRVEDIHPTVPNPYNLLSGLPPSHQWYTVLDLKDAFFCLRLHPTSQPLFAFEWRDPEMGISGQLTWTRLPQGFKNSPTLFNEALHRDLADFRIQHPDLILLQYVDDLLLAATSELDCQQGTRALLQTLGNLGYRASAKKAQICQKQVKYLGYLLKEGQRWLTEARKETVMGQPTPKTPRQLREFLGKAGFCRLFIPGFAEMAAPLYPLTKPGTLFNWGPDQQKAYQEIKQALLTAPALGLPDLTKPFELFVDEKQGYAKGVLTQKLGPWRRPVAYLSKKLDPVAAGWPPCLRMVAAIAVLTKDAGKLTMGQPLVILAPHAVEALVKQPPDRWLSNARMTHYQALLLDTDRVQFGPVVALNPATLLPLPEEGLQHNCLDILAEAHGTRPDLTDQPLPDADHTWYTDGSSLLQEGQRKAGAAVTTETEVIWAKALPAGTSAQRAELIALTQALKMAEGKKLNVYTDSRYAFATAHIHGEIYRRRGWLTSEGKEIKNKDEILALLKALFLPKRLSIIHCPGHQKGHSAEARGNRMADQAARKAAITETPDTSTLLIENSSPSGGSKRTADGSEFEAGKRTADGSEFEKRTADGSEFESPKKKAKVE

SEQ ID NO: 2674 - protein, 2116 aa, synthetic construct
MPAAKRVKLDGGDKKYSIGLDIGTNSVGWAVITDEYKVPSKKFKVLGNTDRHSIKKNLIGALLFDSGETAEATRLKRTARRRYTRRKNRICYLQEIFSNEMAKVDDSFFHRLEESFLVEEDKKHERHPIFGNIVDEVAYHEKYPTIYHLRKKLVDSTDKADLRLIYLALAHMIKFRGHFLIEGDLNPDNSDVDKLFIQLVQTYNQLFEENPINASGVDAKAILSARLSKSRRLENLIAQLPGEKKNGLFGNLIALSLGLTPNFKSNFDLAEDAKLQLSKDTYDDDLDNLLAQIGDQYADLFLAAKNLSDAILLSDILRVNTEITKAPLSASMIKRYDEHHQDLTLLKALVRQQLPEKYKEIFFDQSKNGYAGYIDGGASQEEFYKFIKPILEKMDGTEELLVKLNREDLLRKQRTFDNGSIPHQIHLGELHAILRRQEDFYPFLKDNREKIEKILTFRIPYYVGPLARGNSRFAWMTRKSEETITPWNFEEVVDKGASAQSFIERMTNFDKNLPNEKVLPKHSLLYEYFTVYNELTKVKYVTEGMRKPAFLSGEQKKAIVDLLFKTNRKVTVKQLKEDYFKKIECFDSVEISGVEDRFNASLGTYHDLLKIIKDKDFLDNEENEDILEDIVLTLTLFEDREMIEERLKTYAHLFDDKVMKQLKRRRYTGWGRLSRKLINGIRDKQSGKTILDFLKSDGFANRNFMQLIHDDSLTFKEDIQKAQVSGQGDSLHEHIANLAGSPAIKKGILQTVKVVDELVKVMGRHKPENIVIEMARENQTTQKGQKNSRERMKRIEEGIKELGSQILKEHPVENTQLQNEKLYLYYLQNGRDMYVDQELDINRLSDYDVDHIVPQSFLKDDSIDNKVLTRSDKARGKSDNVPSEEVVKKMKNYWRQLLNAKLITQRKFDNLTKAERGGLSELDKAGFIKRQLVETRQITKHVAQILDSRMNTKYDENDKLIREVKVITLKSKLVSDFRKDFQFYKVREINNYHHAHDAYLNAVVGTALIKKYPKLESEFVYGDYKVYDVRKMIAKSEQEIGKATAKYFFYSNIMNFFKTEITLANGEIRKRPLIETNGETGEIVWDKGRDFATVRKVLSMPQVNIVKKTEVQTGGFSKESILPKRNSDKLIARKKDWDPKKYGGFDSPTVAYSVLVVAKVEKGKSKKLKSVKELLGITIMERSSFEKNPIDFLEAKGYKEVKKDLIIKLPKYSLFELENGRKRMLASAGELQKGNELALPSKYVNFLYLASHYEKLKGSPEDNEQKQLFVEQHKHYLDEIIEQISEFSKRVILADANLDKVLSAYNKHRDKPIREQAENIIHLFTLTNLGAPAAFKYFDTTIDRKRYTSTKEVLDATLIHQSITGLYETRIDLSQLGGDGGEAAAKPAPGGSGGTLNIEDEYRLHETSKEPDVSLGSTWLSDFPQAWAETGGMGLAVRQAPLIIPLKATSTPVSIKQYPMSQEARLGIKPHIQRLLDQGILVPCQSPWNTPLLPVKKPGTNDYRPVQDLREVNKRVEDIHPTVPNPYNLLSGLPPSHQWYTVLDLKDAFFCLRLHPTSQPLFAFEWRDPEMGISGQLTWTRLPQGFKNSPTLFNEALHRDLADFRIQHPDLILLQYVDDLLLAATSELDCQQGTRALLQTLGNLGYRASAKKAQICQKQVKYLGYLLKEGQRWLTEARKETVMGQPTPKTPRQLREFLGKAGFCRLFIPGFAEMAAPLYPLTKPGTLFNWGPDQQKAYQEIKQALLTAPALGLPDLTKPFELFVDEKQGYAKGVLTQKLGPWRRPVAYLSKKLDPVAAGWPPCLRMVAAIAVLTKDAGKLTMGQPLVILAPHAVEALVKQPPDRWLSNARMTHYQALLLDTDRVQFGPVVALNPATLLPLPEEGLQHNCLDILAEAHGTRPDLTDQPLPDADHTWYTDGSSLLQEGQRKAGAAVTTETEVIWAKALPAGTSAQRAELIALTQALKMAEGKKLNVYTDSRYAFATAHIHGEIYRRRGWLTSEGKEIKNKDEILALLKALFLPKRLSIIHCPGHQKGHSAEARGNRMADQAARKAAITETPDTSTLLIENSSPSGGSKRTADGSEFEAGKRTADGSEFEKRTADGSEFESPKKKAKVE

SEQ ID NO: 2675 - protein, 2114 aa, synthetic construct
MPAAKRVKLDGGDKKYSIGLDIGTNSVGWAVITDEYKVPSKKFKVLGNTDRHSIKKNLIGALLFDSGETAEATRLKRTARRRYTRRKNRICYLQEIFSNEMAKVDDSFFHRLEESFLVEEDKKHERHPIFGNIVDEVAYHEKYPTIYHLRKKLVDSTDKADLRLIYLALAHMIKFRGHFLIEGDLNPDNSDVDKLFIQLVQTYNQLFEENPINASGVDAKAILSARLSKSRRLENLIAQLPGEKKNGLFGNLIALSLGLTPNFKSNFDLAEDAKLQLSKDTYDDDLDNLLAQIGDQYADLFLAAKNLSDAILLSDILRVNTEITKAPLSASMIKRYDEHHQDLTLLKALVRQQLPEKYKEIFFDQSKNGYAGYIDGGASQEEFYKFIKPILEKMDGTEELLVKLNREDLLRKQRTFDNGSIPHQIHLGELHAILRRQEDFYPFLKDNREKIEKILTFRIPYYVGPLARGNSRFAWMTRKSEETITPWNFEEVVDKGASAQSFIERMTNFDKNLPNEKVLPKHSLLYEYFTVYNELTKVKYVTEGMRKPAFLSGEQKKAIVDLLFKTNRKVTVKQLKEDYFKKIECFDSVEISGVEDRFNASLGTYHDLLKIIKDKDFLDNEENEDILEDIVLTLTLFEDREMIEERLKTYAHLFDDKVMKQLKRRRYTGWGRLSRKLINGIRDKQSGKTILDFLKSDGFANRNFMQLIHDDSLTFKEDIQKAQVSGQGDSLHEHIANLAGSPAIKKGILQTVKVVDELVKVMGRHKPENIVIEMARENQTTQKGQKNSRERMKRIEEGIKELGSQILKEHPVENTQLQNEKLYLYYLQNGRDMYVDQELDINRLSDYDVDHIVPQSFLKDDSIDNKVLTRSDKARGKSDNVPSEEVVKKMKNYWRQLLNAKLITQRKFDNLTKAERGGLSELDKAGFIKRQLVETRQITKHVAQILDSRMNTKYDENDKLIREVKVITLKSKLVSDFRKDFQFYKVREINNYHHAHDAYLNAVVGTALIKKYPKLESEFVYGDYKVYDVRKMIAKSEQEIGKATAKYFFYSNIMNFFKTEITLANGEIRKRPLIETNGETGEIVWDKGRDFATVRKVLSMPQVNIVKKTEVQTGGFSKESILPKRNSDKLIARKKDWDPKKYGGFDSPTVAYSVLVVAKVEKGKSKKLKSVKELLGITIMERSSFEKNPIDFLEAKGYKEVKKDLIIKLPKYSLFELENGRKRMLASAGELQKGNELALPSKYVNFLYLASHYEKLKGSPEDNEQKQLFVEQHKHYLDEIIEQISEFSKRVILADANLDKVLSAYNKHRDKPIREQAENIIHLFTLTNLGAPAAFKYFDTTIDRKRYTSTKEVLDATLIHQSITGLYETRIDLSQLGGDGGGGSGSSGGGGGTLNIEDEYRLHETSKEPDVSLGSTWLSDFPQAWAETGGMGLAVRQAPLIIPLKATSTPVSIKQYPMSQEARLGIKPHIQRLLDQGILVPCQSPWNTPLLPVKKPGTNDYRPVQDLREVNKRVEDIHPTVPNPYNLLSGLPPSHQWYTVLDLKDAFFCLRLHPTSQPLFAFEWRDPEMGISGQLTWTRLPQGFKNSPTLFNEALHRDLADFRIQHPDLILLQYVDDLLLAATSELDCQQGTRALLQTLGNLGYRASAKKAQICQKQVKYLGYLLKEGQRWLTEARKETVMGQPTPKTPRQLREFLGKAGFCRLFIPGFAEMAAPLYPLTKPGTLFNWGPDQQKAYQEIKQALLTAPALGLPDLTKPFELFVDEKQGYAKGVLTQKLGPWRRPVAYLSKKLDPVAAGWPPCLRMVAAIAVLTKDAGKLTMGQPLVILAPHAVEALVKQPPDRWLSNARMTHYQALLLDTDRVQFGPVVALNPATLLPLPEEGLQHNCLDILAEAHGTRPDLTDQPLPDADHTWYTDGSSLLQEGQRKAGAAVTTETEVIWAKALPAGTSAQRAELIALTQALKMAEGKKLNVYTDSRYAFATAHIHGEIYRRRGWLTSEGKEIKNKDEILALLKALFLPKRLSIIHCPGHQKGHSAEARGNRMADQAARKAAITETPDTSTLLIENSSPSGGSKRTADGSEFEAGKRTADGSEFEKRTADGSEFESPKKKAKVE

SEQ ID NO: 2676 - protein, 2111 aa, synthetic construct
MPAAKRVKLDGGDKKYSIGLDIGTNSVGWAVITDEYKVPSKKFKVLGNTDRHSIKKNLIGALLFDSGETAEATRLKRTARRRYTRRKNRICYLQEIFSNEMAKVDDSFFHRLEESFLVEEDKKHERHPIFGNIVDEVAYHEKYPTIYHLRKKLVDSTDKADLRLIYLALAHMIKFRGHFLIEGDLNPDNSDVDKLFIQLVQTYNQLFEENPINASGVDAKAILSARLSKSRRLENLIAQLPGEKKNGLFGNLIALSLGLTPNFKSNFDLAEDAKLQLSKDTYDDDLDNLLAQIGDQYADLFLAAKNLSDAILLSDILRVNTEITKAPLSASMIKRYDEHHQDLTLLKALVRQQLPEKYKEIFFDQSKNGYAGYIDGGASQEEFYKFIKPILEKMDGTEELLVKLNREDLLRKQRTFDNGSIPHQIHLGELHAILRRQEDFYPFLKDNREKIEKILTFRIPYYVGPLARGNSRFAWMTRKSEETITPWNFEEVVDKGASAQSFIERMTNFDKNLPNEKVLPKHSLLYEYFTVYNELTKVKYVTEGMRKPAFLSGEQKKAIVDLLFKTNRKVTVKQLKEDYFKKIECFDSVEISGVEDRFNASLGTYHDLLKIIKDKDFLDNEENEDILEDIVLTLTLFEDREMIEERLKTYAHLFDDKVMKQLKRRRYTGWGRLSRKLINGIRDKQSGKTILDFLKSDGFANRNFMQLIHDDSLTFKEDIQKAQVSGQGDSLHEHIANLAGSPAIKKGILQTVKVVDELVKVMGRHKPENIVIEMARENQTTQKGQKNSRERMKRIEEGIKELGSQILKEHPVENTQLQNEKLYLYYLQNGRDMYVDQELDINRLSDYDVDHIVPQSFLKDDSIDNKVLTRSDKARGKSDNVPSEEVVKKMKNYWRQLLNAKLITQRKFDNLTKAERGGLSELDKAGFIKRQLVETRQITKHVAQILDSRMNTKYDENDKLIREVKVITLKSKLVSDFRKDFQFYKVREINNYHHAHDAYLNAVVGTALIKKYPKLESEFVYGDYKVYDVRKMIAKSEQEIGKATAKYFFYSNIMNFFKTEITLANGEIRKRPLIETNGETGEIVWDKGRDFATVRKVLSMPQVNIVKKTEVQTGGFSKESILPKRNSDKLIARKKDWDPKKYGGFDSPTVAYSVLVVAKVEKGKSKKLKSVKELLGITIMERSSFEKNPIDFLEAKGYKEVKKDLIIKLPKYSLFELENGRKRMLASAGELQKGNELALPSKYVNFLYLASHYEKLKGSPEDNEQKQLFVEQHKHYLDEIIEQISEFSKRVILADANLDKVLSAYNKHRDKPIREQAENIIHLFTLTNLGAPAAFKYFDTTIDRKRYTSTKEVLDATLIHQSITGLYETRIDLSQLGGDGGGSSGGGGGTLNIEDEYRLHETSKEPDVSLGSTWLSDFPQAWAETGGMGLAVRQAPLIIPLKATSTPVSIKQYPMSQEARLGIKPHIQRLLDQGILVPCQSPWNTPLLPVKKPGTNDYRPVQDLREVNKRVEDIHPTVPNPYNLLSGLPPSHQWYTVLDLKDAFFCLRLHPTSQPLFAFEWRDPEMGISGQLTWTRLPQGFKNSPTLFNEALHRDLADFRIQHPDLILLQYVDDLLLAATSELDCQQGTRALLQTLGNLGYRASAKKAQICQKQVKYLGYLLKEGQRWLTEARKETVMGQPTPKTPRQLREFLGKAGFCRLFIPGFAEMAAPLYPLTKPGTLFNWGPDQQKAYQEIKQALLTAPALGLPDLTKPFELFVDEKQGYAKGVLTQKLGPWRRPVAYLSKKLDPVAAGWPPCLRMVAAIAVLTKDAGKLTMGQPLVILAPHAVEALVKQPPDRWLSNARMTHYQALLLDTDRVQFGPVVALNPATLLPLPEEGLQHNCLDILAEAHGTRPDLTDQPLPDADHTWYTDGSSLLQEGQRKAGAAVTTETEVIWAKALPAGTSAQRAELIALTQALKMAEGKKLNVYTDSRYAFATAHIHGEIYRRRGWLTSEGKEIKNKDEILALLKALFLPKRLSIIHCPGHQKGHSAEARGNRMADQAARKAAITETPDTSTLLIENSSPSGGSKRTADGSEFEAGKRTADGSEFEKRTADGSEFESPKKKAKVE

SEQ ID NO: 2677 - protein, 2116 aa, synthetic construct
MPAAKRVKLDGGDKKYSIGLDIGTNSVGWAVITDEYKVPSKKFKVLGNTDRHSIKKNLIGALLFDSGETAEATRLKRTARRRYTRRKNRICYLQEIFSNEMAKVDDSFFHRLEESFLVEEDKKHERHPIFGNIVDEVAYHEKYPTIYHLRKKLVDSTDKADLRLIYLALAHMIKFRGHFLIEGDLNPDNSDVDKLFIQLVQTYNQLFEENPINASGVDAKAILSARLSKSRRLENLIAQLPGEKKNGLFGNLIALSLGLTPNFKSNFDLAEDAKLQLSKDTYDDDLDNLLAQIGDQYADLFLAAKNLSDAILLSDILRVNTEITKAPLSASMIKRYDEHHQDLTLLKALVRQQLPEKYKEIFFDQSKNGYAGYIDGGASQEEFYKFIKPILEKMDGTEELLVKLNREDLLRKQRTFDNGSIPHQIHLGELHAILRRQEDFYPFLKDNREKIEKILTFRIPYYVGPLARGNSRFAWMTRKSEETITPWNFEEVVDKGASAQSFIERMTNFDKNLPNEKVLPKHSLLYEYFTVYNELTKVKYVTEGMRKPAFLSGEQKKAIVDLLFKTNRKVTVKQLKEDYFKKIECFDSVEISGVEDRFNASLGTYHDLLKIIKDKDFLDNEENEDILEDIVLTLTLFEDREMIEERLKTYAHLFDDKVMKQLKRRRYTGWGRLSRKLINGIRDKQSGKTILDFLKSDGFANRNFMQLIHDDSLTFKEDIQKAQVSGQGDSLHEHIANLAGSPAIKKGILQTVKVVDELVKVMGRHKPENIVIEMARENQTTQKGQKNSRERMKRIEEGIKELGSQILKEHPVENTQLQNEKLYLYYLQNGRDMYVDQELDINRLSDYDVDHIVPQSFLKDDSIDNKVLTRSDKARGKSDNVPSEEVVKKMKNYWRQLLNAKLITQRKFDNLTKAERGGLSELDKAGFIKRQLVETRQITKHVAQILDSRMNTKYDENDKLIREVKVITLKSKLVSDFRKDFQFYKVREINNYHHAHDAYLNAVVGTALIKKYPKLESEFVYGDYKVYDVRKMIAKSEQEIGKATAKYFFYSNIMNFFKTEITLANGEIRKRPLIETNGETGEIVWDKGRDFATVRKVLSMPQVNIVKKTEVQTGGFSKESILPKRNSDKLIARKKDWDPKKYGGFDSPTVAYSVLVVAKVEKGKSKKLKSVKELLGITIMERSSFEKNPIDFLEAKGYKEVKKDLIIKLPKYSLFELENGRKRMLASAGELQKGNELALPSKYVNFLYLASHYEKLKGSPEDNEQKQLFVEQHKHYLDEIIEQISEFSKRVILADANLDKVLSAYNKHRDKPIREQAENIIHLFTLTNLGAPAAFKYFDTTIDRKRYTSTKEVLDATLIHQSITGLYETRIDLSQLGGDGGGGGEAAAKGSSGGTLNIEDEYRLHETSKEPDVSLGSTWLSDFPQAWAETGGMGLAVRQAPLIIPLKATSTPVSIKQYPMSQEARLGIKPHIQRLLDQGILVPCQSPWNTPLLPVKKPGTNDYRPVQDLREVNKRVEDIHPTVPNPYNLLSGLPPSHQWYTVLDLKDAFFCLRLHPTSQPLFAFEWRDPEMGISGQLTWTRLPQGFKNSPTLFNEALHRDLADFRIQHPDLILLQYVDDLLLAATSELDCQQGTRALLQTLGNLGYRASAKKAQICQKQVKYLGYLLKEGQRWLTEARKETVMGQPTPKTPRQLREFLGKAGFCRLFIPGFAEMAAPLYPLTKPGTLFNWGPDQQKAYQEIKQALLTAPALGLPDLTKPFELFVDEKQGYAKGVLTQKLGPWRRPVAYLSKKLDPVAAGWPPCLRMVAAIAVLTKDAGKLTMGQPLVILAPHAVEALVKQPPDRWLSNARMTHYQALLLDTDRVQFGPVVALNPATLLPLPEEGLQHNCLDILAEAHGTRPDLTDQPLPDADHTWYTDGSSLLQEGQRKAGAAVTTETEVIWAKALPAGTSAQRAELIALTQALKMAEGKKLNVYTDSRYAFATAHIHGEIYRRRGWLTSEGKEIKNKDEILALLKALFLPKRLSIIHCPGHQKGHSAEARGNRMADQAARKAAITETPDTSTLLIENSSPSGGSKRTADGSEFEAGKRTADGSEFEKRTADGSEFESPKKKAKVE

SEQ ID NO: 2678 - protein, 2130 aa, synthetic construct
MPAAKRVKLDGGDKKYSIGLDIGTNSVGWAVITDEYKVPSKKFKVLGNTDRHSIKKNLIGALLFDSGETAEATRLKRTARRRYTRRKNRICYLQEIFSNEMAKVDDSFFHRLEESFLVEEDKKHERHPIFGNIVDEVAYHEKYPTIYHLRKKLVDSTDKADLRLIYLALAHMIKFRGHFLIEGDLNPDNSDVDKLFIQLVQTYNQLFEENPINASGVDAKAILSARLSKSRRLENLIAQLPGEKKNGLFGNLIALSLGLTPNFKSNFDLAEDAKLQLSKDTYDDDLDNLLAQIGDQYADLFLAAKNLSDAILLSDILRVNTEITKAPLSASMIKRYDEHHQDLTLLKALVRQQLPEKYKEIFFDQSKNGYAGYIDGGASQEEFYKFIKPILEKMDGTEELLVKLNREDLLRKQRTFDNGSIPHQIHLGELHAILRRQEDFYPFLKDNREKIEKILTFRIPYYVGPLARGNSRFAWMTRKSEETITPWNFEEVVDKGASAQSFIERMTNFDKNLPNEKVLPKHSLLYEYFTVYNELTKVKYVTEGMRKPAFLSGEQKKAIVDLLFKTNRKVTVKQLKEDYFKKIECFDSVEISGVEDRFNASLGTYHDLLKIIKDKDFLDNEENEDILEDIVLTLTLFEDREMIEERLKTYAHLFDDKVMKQLKRRRYTGWGRLSRKLINGIRDKQSGKTILDFLKSDGFANRNFMQLIHDDSLTFKEDIQKAQVSGQGDSLHEHIANLAGSPAIKKGILQTVKVVDELVKVMGRHKPENIVIEMARENQTTQKGQKNSRERMKRIEEGIKELGSQILKEHPVENTQLQNEKLYLYYLQNGRDMYVDQELDINRLSDYDVDHIVPQSFLKDDSIDNKVLTRSDKARGKSDNVPSEEVVKKMKNYWRQLLNAKLITQRKFDNLTKAERGGLSELDKAGFIKRQLVETRQITKHVAQILDSRMNTKYDENDKLIREVKVITLKSKLVSDFRKDFQFYKVREINNYHHAHDAYLNAVVGTALIKKYPKLESEFVYGDYKVYDVRKMIAKSEQEIGKATAKYFFYSNIMNFFKTEITLANGEIRKRPLIETNGETGEIVWDKGRDFATVRKVLSMPQVNIVKKTEVQTGGFSKESILPKRNSDKLIARKKDWDPKKYGGFDSPTVAYSVLVVAKVEKGKSKKLKSVKELLGITIMERSSFEKNPIDFLEAKGYKEVKKDLIIKLPKYSLFELENGRKRMLASAGELQKGNELALPSKYVNFLYLASHYEKLKGSPEDNEQKQLFVEQHKHYLDEIIEQISEFSKRVILADANLDKVLSAYNKHRDKPIREQAENIIHLFTLTNLGAPAAFKYFDTTIDRKRYTSTKEVLDATLIHQSITGLYETRIDLSQLGGDGGEAAAKEAAAKEAAAKEAAAKEAAAKGGTLNIEDEYRLHETSKEPDVSLGSTWLSDFPQAWAETGGMGLAVRQAPLIIPLKATSTPVSIKQYPMSQEARLGIKPHIQRLLDQGILVPCQSPWNTPLLPVKKPGTNDYRPVQDLREVNKRVEDIHPTVPNPYNLLSGLPPSHQWYTVLDLKDAFFCLRLHPTSQPLFAFEWRDPEMGISGQLTWTRLPQGFKNSPTLFNEALHRDLADFRIQHPDLILLQYVDDLLLAATSELDCQQGTRALLQTLGNLGYRASAKKAQICQKQVKYLGYLLKEGQRWLTEARKETVMGQPTPKTPRQLREFLGKAGFCRLFIPGFAEMAAPLYPLTKPGTLFNWGPDQQKAYQEIKQALLTAPALGLPDLTKPFELFVDEKQGYAKGVLTQKLGPWRRPVAYLSKKLDPVAAGWPPCLRMVAAIAVLTKDAGKLTMGQPLVILAPHAVEALVKQPPDRWLSNARMTHYQALLLDTDRVQFGPVVALNPATLLPLPEEGLQHNCLDILAEAHGTRPDLTDQPLPDADHTWYTDGSSLLQEGQRKAGAAVTTETEVIWAKALPAGTSAQRAELIALTQALKMAEGKKLNVYTDSRYAFATAHIHGEIYRRRGWLTSEGKEIKNKDEILALLKALFLPKRLSIIHCPGHQKGHSAEARGNRMADQAARKAAITETPDTSTLLIENSSPSGGSKRTADGSEFEAGKRTADGSEFEKRTADGSEFESPKKKAKVE

SEQ ID NO: 2679 - protein, 2114 aa, synthetic construct
MPAAKRVKLDGGDKKYSIGLDIGTNSVGWAVITDEYKVPSKKFKVLGNTDRHSIKKNLIGALLFDSGETAEATRLKRTARRRYTRRKNRICYLQEIFSNEMAKVDDSFFHRLEESFLVEEDKKHERHPIFGNIVDEVAYHEKYPTIYHLRKKLVDSTDKADLRLIYLALAHMIKFRGHFLIEGDLNPDNSDVDKLFIQLVQTYNQLFEENPINASGVDAKAILSARLSKSRRLENLIAQLPGEKKNGLFGNLIALSLGLTPNFKSNFDLAEDAKLQLSKDTYDDDLDNLLAQIGDQYADLFLAAKNLSDAILLSDILRVNTEITKAPLSASMIKRYDEHHQDLTLLKALVRQQLPEKYKEIFFDQSKNGYAGYIDGGASQEEFYKFIKPILEKMDGTEELLVKLNREDLLRKQRTFDNGSIPHQIHLGELHAILRRQEDFYPFLKDNREKIEKILTFRIPYYVGPLARGNSRFAWMTRKSEETITPWNFEEVVDKGASAQSFIERMTNFDKNLPNEKVLPKHSLLYEYFTVYNELTKVKYVTEGMRKPAFLSGEQKKAIVDLLFKTNRKVTVKQLKEDYFKKIECFDSVEISGVEDRFNASLGTYHDLLKIIKDKDFLDNEENEDILEDIVLTLTLFEDREMIEERLKTYAHLFDDKVMKQLKRRRYTGWGRLSRKLINGIRDKQSGKTILDFLKSDGFANRNFMQLIHDDSLTFKEDIQKAQVSGQGDSLHEHIANLAGSPAIKKGILQTVKVVDELVKVMGRHKPENIVIEMARENQTTQKGQKNSRERMKRIEEGIKELGSQILKEHPVENTQLQNEKLYLYYLQNGRDMYVDQELDINRLSDYDVDHIVPQSFLKDDSIDNKVLTRSDKARGKSDNVPSEEVVKKMKNYWRQLLNAKLITQRKFDNLTKAERGGLSELDKAGFIKRQLVETRQITKHVAQILDSRMNTKYDENDKLIREVKVITLKSKLVSDFRKDFQFYKVREINNYHHAHDAYLNAVVGTALIKKYPKLESEFVYGDYKVYDVRKMIAKSEQEIGKATAKYFFYSNIMNFFKTEITLANGEIRKRPLIETNGETGEIVWDKGRDFATVRKVLSMPQVNIVKKTEVQTGGFSKESILPKRNSDKLIARKKDWDPKKYGGFDSPTVAYSVLVVAKVEKGKSKKLKSVKELLGITIMERSSFEKNPIDFLEAKGYKEVKKDLIIKLPKYSLFELENGRKRMLASAGELQKGNELALPSKYVNFLYLASHYEKLKGSPEDNEQKQLFVEQHKHYLDEIIEQISEFSKRVILADANLDKVLSAYNKHRDKPIREQAENIIHLFTLTNLGAPAAFKYFDTTIDRKRYTSTKEVLDATLIHQSITGLYETRIDLSQLGGDGGGGSGSSPAPGGTLNIEDEYRLHETSKEPDVSLGSTWLSDFPQAWAETGGMGLAVRQAPLIIPLKATSTPVSIKQYPMSQEARLGIKPHIQRLLDQGILVPCQSPWNTPLLPVKKPGTNDYRPVQDLREVNKRVEDIHPTVPNPYNLLSGLPPSHQWYTVLDLKDAFFCLRLHPTSQPLFAFEWRDPEMGISGQLTWTRLPQGFKNSPTLFNEALHRDLADFRIQHPDLILLQYVDDLLLAATSELDCQQGTRALLQTLGNLGYRASAKKAQICQKQVKYLGYLLKEGQRWLTEARKETVMGQPTPKTPRQLREFLGKAGFCRLFIPGFAEMAAPLYPLTKPGTLFNWGPDQQKAYQEIKQALLTAPALGLPDLTKPFELFVDEKQGYAKGVLTQKLGPWRRPVAYLSKKLDPVAAGWPPCLRMVAAIAVLTKDAGKLTMGQPLVILAPHAVEALVKQPPDRWLSNARMTHYQALLLDTDRVQFGPVVALNPATLLPLPEEGLQHNCLDILAEAHGTRPDLTDQPLPDADHTWYTDGSSLLQEGQRKAGAAVTTETEVIWAKALPAGTSAQRAELIALTQALKMAEGKKLNVYTDSRYAFATAHIHGEIYRRRGWLTSEGKEIKNKDEILALLKALFLPKRLSIIHCPGHQKGHSAEARGNRMADQAARKAAITETPDTSTLLIENSSPSGGSKRTADGSEFEAGKRTADGSEFEKRTADGSEFESPKKKAKVE

SEQ ID NO: 2680 - protein, 2120 aa, synthetic construct
MPAAKRVKLDGGDKKYSIGLDIGTNSVGWAVITDEYKVPSKKFKVLGNTDRHSIKKNLIGALLFDSGETAEATRLKRTARRRYTRRKNRICYLQEIFSNEMAKVDDSFFHRLEESFLVEEDKKHERHPIFGNIVDEVAYHEKYPTIYHLRKKLVDSTDKADLRLIYLALAHMIKFRGHFLIEGDLNPDNSDVDKLFIQLVQTYNQLFEENPINASGVDAKAILSARLSKSRRLENLIAQLPGEKKNGLFGNLIALSLGLTPNFKSNFDLAEDAKLQLSKDTYDDDLDNLLAQIGDQYADLFLAAKNLSDAILLSDILRVNTEITKAPLSASMIKRYDEHHQDLTLLKALVRQQLPEKYKEIFFDQSKNGYAGYIDGGASQEEFYKFIKPILEKMDGTEELLVKLNREDLLRKQRTFDNGSIPHQIHLGELHAILRRQEDFYPFLKDNREKIEKILTFRIPYYVGPLARGNSRFAWMTRKSEETITPWNFEEVVDKGASAQSFIERMTNFDKNLPNEKVLPKHSLLYEYFTVYNELTKVKYVTEGMRKPAFLSGEQKKAIVDLLFKTNRKVTVKQLKEDYFKKIECFDSVEISGVEDRFNASLGTYHDLLKIIKDKDFLDNEENEDILEDIVLTLTLFEDREMIEERLKTYAHLFDDKVMKQLKRRRYTGWGRLSRKLINGIRDKQSGKTILDFLKSDGFANRNFMQLIHDDSLTFKEDIQKAQVSGQGDSLHEHIANLAGSPAIKKGILQTVKVVDELVKVMGRHKPENIVIEMARENQTTQKGQKNSRERMKRIEEGIKELGSQILKEHPVENTQLQNEKLYLYYLQNGRDMYVDQELDINRLSDYDVDHIVPQSFLKDDSIDNKVLTRSDKARGKSDNVPSEEVVKKMKNYWRQLLNAKLITQRKFDNLTKAERGGLSELDKAGFIKRQLVETRQITKHVAQILDSRMNTKYDENDKLIREVKVITLKSKLVSDFRKDFQFYKVREINNYHHAHDAYLNAVVGTALIKKYPKLESEFVYGDYKVYDVRKMIAKSEQEIGKATAKYFFYSNIMNFFKTEITLANGEIRKRPLIETNGETGEIVWDKGRDFATVRKVLSMPQVNIVKKTEVQTGGFSKESILPKRNSDKLIARKKDWDPKKYGGFDSPTVAYSVLVVAKVEKGKSKKLKSVKELLGITIMERSSFEKNPIDFLEAKGYKEVKKDLIIKLPKYSLFELENGRKRMLASAGELQKGNELALPSKYVNFLYLASHYEKLKGSPEDNEQKQLFVEQHKHYLDEIIEQISEFSKRVILADANLDKVLSAYNKHRDKPIREQAENIIHLFTLTNLGAPAAFKYFDTTIDRKRYTSTKEVLDATLIHQSITGLYETRIDLSQLGGDGGGGSGGSGGSGGSGGSGGTLNIEDEYRLHETSKEPDVSLGSTWLSDFPQAWAETGGMGLAVRQAPLIIPLKATSTPVSIKQYPMSQEARLGIKPHIQRLLDQGILVPCQSPWNTPLLPVKKPGTNDYRPVQDLREVNKRVEDIHPTVPNPYNLLSGLPPSHQWYTVLDLKDAFFCLRLHPTSQPLFAFEWRDPEMGISGQLTWTRLPQGFKNSPTLFNEALHRDLADFRIQHPDLILLQYVDDLLLAATSELDCQQGTRALLQTLGNLGYRASAKKAQICQKQVKYLGYLLKEGQRWLTEARKETVMGQPTPKTPRQLREFLGKAGFCRLFIPGFAEMAAPLYPLTKPGTLFNWGPDQQKAYQEIKQALLTAPALGLPDLTKPFELFVDEKQGYAKGVLTQKLGPWRRPVAYLSKKLDPVAAGWPPCLRMVAAIAVLTKDAGKLTMGQPLVILAPHAVEALVKQPPDRWLSNARMTHYQALLLDTDRVQFGPVVALNPATLLPLPEEGLQHNCLDILAEAHGTRPDLTDQPLPDADHTWYTDGSSLLQEGQRKAGAAVTTETEVIWAKALPAGTSAQRAELIALTQALKMAEGKKLNVYTDSRYAFATAHIHGEIYRRRGWLTSEGKEIKNKDEILALLKALFLPKRLSIIHCPGHQKGHSAEARGNRMADQAARKAAITETPDTSTLLIENSSPSGGSKRTADGSEFEAGKRTADGSEFEKRTADGSEFESPKKKAKVE

SEQ ID NO: 2681 - protein, 2116 aa, synthetic construct
MPAAKRVKLDGGDKKYSIGLDIGTNSVGWAVITDEYKVPSKKFKVLGNTDRHSIKKNLIGALLFDSGETAEATRLKRTARRRYTRRKNRICYLQEIFSNEMAKVDDSFFHRLEESFLVEEDKKHERHPIFGNIVDEVAYHEKYPTIYHLRKKLVDSTDKADLRLIYLALAHMIKFRGHFLIEGDLNPDNSDVDKLFIQLVQTYNQLFEENPINASGVDAKAILSARLSKSRRLENLIAQLPGEKKNGLFGNLIALSLGLTPNFKSNFDLAEDAKLQLSKDTYDDDLDNLLAQIGDQYADLFLAAKNLSDAILLSDILRVNTEITKAPLSASMIKRYDEHHQDLTLLKALVRQQLPEKYKEIFFDQSKNGYAGYIDGGASQEEFYKFIKPILEKMDGTEELLVKLNREDLLRKQRTFDNGSIPHQIHLGELHAILRRQEDFYPFLKDNREKIEKILTFRIPYYVGPLARGNSRFAWMTRKSEETITPWNFEEVVDKGASAQSFIERMTNFDKNLPNEKVLPKHSLLYEYFTVYNELTKVKYVTEGMRKPAFLSGEQKKAIVDLLFKTNRKVTVKQLKEDYFKKIECFDSVEISGVEDRFNASLGTYHDLLKIIKDKDFLDNEENEDILEDIVLTLTLFEDREMIEERLKTYAHLFDDKVMKQLKRRRYTGWGRLSRKLINGIRDKQSGKTILDFLKSDGFANRNFMQLIHDDSLTFKEDIQKAQVSGQGDSLHEHIANLAGSPAIKKGILQTVKVVDELVKVMGRHKPENIVIEMARENQTTQKGQKNSRERMKRIEEGIKELGSQILKEHPVENTQLQNEKLYLYYLQNGRDMYVDQELDINRLSDYDVDHIVPQSFLKDDSIDNKVLTRSDKARGKSDNVPSEEVVKKMKNYWRQLLNAKLITQRKFDNLTKAERGGLSELDKAGFIKRQLVETRQITKHVAQILDSRMNTKYDENDKLIREVKVITLKSKLVSDFRKDFQFYKVREINNYHHAHDAYLNAVVGTALIKKYPKLESEFVYGDYKVYDVRKMIAKSEQEIGKATAKYFFYSNIMNFFKTEITLANGEIRKRPLIETNGETGEIVWDKGRDFATVRKVLSMPQVNIVKKTEVQTGGFSKESILPKRNSDKLIARKKDWDPKKYGGFDSPTVAYSVLVVAKVEKGKSKKLKSVKELLGITIMERSSFEKNPIDFLEAKGYKEVKKDLIIKLPKYSLFELENGRKRMLASAGELQKGNELALPSKYVNFLYLASHYEKLKGSPEDNEQKQLFVEQHKHYLDEIIEQISEFSKRVILADANLDKVLSAYNKHRDKPIREQAENIIHLFTLTNLGAPAAFKYFDTTIDRKRYTSTKEVLDATLIHQSITGLYETRIDLSQLGGDGGEAAAKPAPGGGGGTLNIEDEYRLHETSKEPDVSLGSTWLSDFPQAWAETGGMGLAVRQAPLIIPLKATSTPVSIKQYPMSQEARLGIKPHIQRLLDQGILVPCQSPWNTPLLPVKKPGTNDYRPVQDLREVNKRVEDIHPTVPNPYNLLSGLPPSHQWYTVLDLKDAFFCLRLHPTSQPLFAFEWRDPEMGISGQLTWTRLPQGFKNSPTLFNEALHRDLADFRIQHPDLILLQYVDDLLLAATSELDCQQGTRALLQTLGNLGYRASAKKAQICQKQVKYLGYLLKEGQRWLTEARKETVMGQPTPKTPRQLREFLGKAGFCRLFIPGFAEMAAPLYPLTKPGTLFNWGPDQQKAYQEIKQALLTAPALGLPDLTKPFELFVDEKQGYAKGVLTQKLGPWRRPVAYLSKKLDPVAAGWPPCLRMVAAIAVLTKDAGKLTMGQPLVILAPHAVEALVKQPPDRWLSNARMTHYQALLLDTDRVQFGPVVALNPATLLPLPEEGLQHNCLDILAEAHGTRPDLTDQPLPDADHTWYTDGSSLLQEGQRKAGAAVTTETEVIWAKALPAGTSAQRAELIALTQALKMAEGKKLNVYTDSRYAFATAHIHGEIYRRRGWLTSEGKEIKNKDEILALLKALFLPKRLSIIHCPGHQKGHSAEARGNRMADQAARKAAITETPDTSTLLIENSSPSGGSKRTADGSEFEAGKRTADGSEFEKRTADGSEFESPKKKAKVE

SEQ ID NO: 2682 - protein, 2111 aa, synthetic construct
MPAAKRVKLDGGDKKYSIGLDIGTNSVGWAVITDEYKVPSKKFKVLGNTDRHSIKKNLIGALLFDSGETAEATRLKRTARRRYTRRKNRICYLQEIFSNEMAKVDDSFFHRLEESFLVEEDKKHERHPIFGNIVDEVAYHEKYPTIYHLRKKLVDSTDKADLRLIYLALAHMIKFRGHFLIEGDLNPDNSDVDKLFIQLVQTYNQLFEENPINASGVDAKAILSARLSKSRRLENLIAQLPGEKKNGLFGNLIALSLGLTPNFKSNFDLAEDAKLQLSKDTYDDDLDNLLAQIGDQYADLFLAAKNLSDAILLSDILRVNTEITKAPLSASMIKRYDEHHQDLTLLKALVRQQLPEKYKEIFFDQSKNGYAGYIDGGASQEEFYKFIKPILEKMDGTEELLVKLNREDLLRKQRTFDNGSIPHQIHLGELHAILRRQEDFYPFLKDNREKIEKILTFRIPYYVGPLARGNSRFAWMTRKSEETITPWNFEEVVDKGASAQSFIERMTNFDKNLPNEKVLPKHSLLYEYFTVYNELTKVKYVTEGMRKPAFLSGEQKKAIVDLLFKTNRKVTVKQLKEDYFKKIECFDSVEISGVEDRFNASLGTYHDLLKIIKDKDFLDNEENEDILEDIVLTLTLFEDREMIEERLKTYAHLFDDKVMKQLKRRRYTGWGRLSRKLINGIRDKQSGKTILDFLKSDGFANRNFMQLIHDDSLTFKEDIQKAQVSGQGDSLHEHIANLAGSPAIKKGILQTVKVVDELVKVMGRHKPENIVIEMARENQTTQKGQKNSRERMKRIEEGIKELGSQILKEHPVENTQLQNEKLYLYYLQNGRDMYVDQELDINRLSDYDVDHIVPQSFLKDDSIDNKVLTRSDKARGKSDNVPSEEVVKKMKNYWRQLLNAKLITQRKFDNLTKAERGGLSELDKAGFIKRQLVETRQITKHVAQILDSRMNTKYDENDKLIREVKVITLKSKLVSDFRKDFQFYKVREINNYHHAHDAYLNAVVGTALIKKYPKLESEFVYGDYKVYDVRKMIAKSEQEIGKATAKYFFYSNIMNFFKTEITLANGEIRKRPLIETNGETGEIVWDKGRDFATVRKVLSMPQVNIVKKTEVQTGGFSKESILPKRNSDKLIARKKDWDPKKYGGFDSPTVAYSVLVVAKVEKGKSKKLKSVKELLGITIMERSSFEKNPIDFLEAKGYKEVKKDLIIKLPKYSLFELENGRKRMLASAGELQKGNELALPSKYVNFLYLASHYEKLKGSPEDNEQKQLFVEQHKHYLDEIIEQISEFSKRVILADANLDKVLSAYNKHRDKPIREQAENIIHLFTLTNLGAPAAFKYFDTTIDRKRYTSTKEVLDATLIHQSITGLYETRIDLSQLGGDGGGSSGGSGGTLNIEDEYRLHETSKEPDVSLGSTWLSDFPQAWAETGGMGLAVRQAPLIIPLKATSTPVSIKQYPMSQEARLGIKPHIQRLLDQGILVPCQSPWNTPLLPVKKPGTNDYRPVQDLREVNKRVEDIHPTVPNPYNLLSGLPPSHQWYTVLDLKDAFFCLRLHPTSQPLFAFEWRDPEMGISGQLTWTRLPQGFKNSPTLFNEALHRDLADFRIQHPDLILLQYVDDLLLAATSELDCQQGTRALLQTLGNLGYRASAKKAQICQKQVKYLGYLLKEGQRWLTEARKETVMGQPTPKTPRQLREFLGKAGFCRLFIPGFAEMAAPLYPLTKPGTLFNWGPDQQKAYQEIKQALLTAPALGLPDLTKPFELFVDEKQGYAKGVLTQKLGPWRRPVAYLSKKLDPVAAGWPPCLRMVAAIAVLTKDAGKLTMGQPLVILAPHAVEALVKQPPDRWLSNARMTHYQALLLDTDRVQFGPVVALNPATLLPLPEEGLQHNCLDILAEAHGTRPDLTDQPLPDADHTWYTDGSSLLQEGQRKAGAAVTTETEVIWAKALPAGTSAQRAELIALTQALKMAEGKKLNVYTDSRYAFATAHIHGEIYRRRGWLTSEGKEIKNKDEILALLKALFLPKRLSIIHCPGHQKGHSAEARGNRMADQAARKAAITETPDTSTLLIENSSPSGGSKRTADGSEFEAGKRTADGSEFEKRTADGSEFESPKKKAKVE

SEQ ID NO: 2683 - protein, 2116 aa, synthetic construct
MPAAKRVKLDGGDKKYSIGLDIGTNSVGWAVITDEYKVPSKKFKVLGNTDRHSIKKNLIGALLFDSGETAEATRLKRTARRRYTRRKNRICYLQEIFSNEMAKVDDSFFHRLEESFLVEEDKKHERHPIFGNIVDEVAYHEKYPTIYHLRKKLVDSTDKADLRLIYLALAHMIKFRGHFLIEGDLNPDNSDVDKLFIQLVQTYNQLFEENPINASGVDAKAILSARLSKSRRLENLIAQLPGEKKNGLFGNLIALSLGLTPNFKSNFDLAEDAKLQLSKDTYDDDLDNLLAQIGDQYADLFLAAKNLSDAILLSDILRVNTEITKAPLSASMIKRYDEHHQDLTLLKALVRQQLPEKYKEIFFDQSKNGYAGYIDGGASQEEFYKFIKPILEKMDGTEELLVKLNREDLLRKQRTFDNGSIPHQIHLGELHAILRRQEDFYPFLKDNREKIEKILTFRIPYYVGPLARGNSRFAWMTRKSEETITPWNFEEVVDKGASAQSFIERMTNFDKNLPNEKVLPKHSLLYEYFTVYNELTKVKYVTEGMRKPAFLSGEQKKAIVDLLFKTNRKVTVKQLKEDYFKKIECFDSVEISGVEDRFNASLGTYHDLLKIIKDKDFLDNEENEDILEDIVLTLTLFEDREMIEERLKTYAHLFDDKVMKQLKRRRYTGWGRLSRKLINGIRDKQSGKTILDFLKSDGFANRNFMQLIHDDSLTFKEDIQKAQVSGQGDSLHEHIANLAGSPAIKKGILQTVKVVDELVKVMGRHKPENIVIEMARENQTTQKGQKNSRERMKRIEEGIKELGSQILKEHPVENTQLQNEKLYLYYLQNGRDMYVDQELDINRLSDYDVDHIVPQSFLKDDSIDNKVLTRSDKARGKSDNVPSEEVVKKMKNYWRQLLNAKLITQRKFDNLTKAERGGLSELDKAGFIKRQLVETRQITKHVAQILDSRMNTKYDENDKLIREVKVITLKSKLVSDFRKDFQFYKVREINNYHHAHDAYLNAVVGTALIKKYPKLESEFVYGDYKVYDVRKMIAKSEQEIGKATAKYFFYSNIMNFFKTEITLANGEIRKRPLIETNGETGEIVWDKGRDFATVRKVLSMPQVNIVKKTEVQTGGFSKESILPKRNSDKLIARKKDWDPKKYGGFDSPTVAYSVLVVAKVEKGKSKKLKSVKELLGITIMERSSFEKNPIDFLEAKGYKEVKKDLIIKLPKYSLFELENGRKRMLASAGELQKGNELALPSKYVNFLYLASHYEKLKGSPEDNEQKQLFVEQHKHYLDEIIEQISEFSKRVILADANLDKVLSAYNKHRDKPIREQAENIIHLFTLTNLGAPAAFKYFDTTIDRKRYTSTKEVLDATLIHQSITGLYETRIDLSQLGGDGGEAAAKGSSGGSGGTLNIEDEYRLHETSKEPDVSLGSTWLSDFPQAWAETGGMGLAVRQAPLIIPLKATSTPVSIKQYPMSQEARLGIKPHIQRLLDQGILVPCQSPWNTPLLPVKKPGTNDYRPVQDLREVNKRVEDIHPTVPNPYNLLSGLPPSHQWYTVLDLKDAFFCLRLHPTSQPLFAFEWRDPEMGISGQLTWTRLPQGFKNSPTLFNEALHRDLADFRIQHPDLILLQYVDDLLLAATSELDCQQGTRALLQTLGNLGYRASAKKAQICQKQVKYLGYLLKEGQRWLTEARKETVMGQPTPKTPRQLREFLGKAGFCRLFIPGFAEMAAPLYPLTKPGTLFNWGPDQQKAYQEIKQALLTAPALGLPDLTKPFELFVDEKQGYAKGVLTQKLGPWRRPVAYLSKKLDPVAAGWPPCLRMVAAIAVLTKDAGKLTMGQPLVILAPHAVEALVKQPPDRWLSNARMTHYQALLLDTDRVQFGPVVALNPATLLPLPEEGLQHNCLDILAEAHGTRPDLTDQPLPDADHTWYTDGSSLLQEGQRKAGAAVTTETEVIWAKALPAGTSAQRAELIALTQALKMAEGKKLNVYTDSRYAFATAHIHGEIYRRRGWLTSEGKEIKNKDEILALLKALFLPKRLSIIHCPGHQKGHSAEARGNRMADQAARKAAITETPDTSTLLIENSSPSGGSKRTADGSEFEAGKRTADGSEFEKRTADGSEFESPKKKAKVE

SEQ ID NO: 2684 - protein, 2114 aa, synthetic construct
MPAAKRVKLDGGDKKYSIGLDIGTNSVGWAVITDEYKVPSKKFKVLGNTDRHSIKKNLIGALLFDSGETAEATRLKRTARRRYTRRKNRICYLQEIFSNEMAKVDDSFFHRLEESFLVEEDKKHERHPIFGNIVDEVAYHEKYPTIYHLRKKLVDSTDKADLRLIYLALAHMIKFRGHFLIEGDLNPDNSDVDKLFIQLVQTYNQLFEENPINASGVDAKAILSARLSKSRRLENLIAQLPGEKKNGLFGNLIALSLGLTPNFKSNFDLAEDAKLQLSKDTYDDDLDNLLAQIGDQYADLFLAAKNLSDAILLSDILRVNTEITKAPLSASMIKRYDEHHQDLTLLKALVRQQLPEKYKEIFFDQSKNGYAGYIDGGASQEEFYKFIKPILEKMDGTEELLVKLNREDLLRKQRTFDNGSIPHQIHLGELHAILRRQEDFYPFLKDNREKIEKILTFRIPYYVGPLARGNSRFAWMTRKSEETITPWNFEEVVDKGASAQSFIERMTNFDKNLPNEKVLPKHSLLYEYFTVYNELTKVKYVTEGMRKPAFLSGEQKKAIVDLLFKTNRKVTVKQLKEDYFKKIECFDSVEISGVEDRFNASLGTYHDLLKIIKDKDFLDNEENEDILEDIVLTLTLFEDREMIEERLKTYAHLFDDKVMKQLKRRRYTGWGRLSRKLINGIRDKQSGKTILDFLKSDGFANRNFMQLIHDDSLTFKEDIQKAQVSGQGDSLHEHIANLAGSPAIKKGILQTVKVVDELVKVMGRHKPENIVIEMARENQTTQKGQKNSRERMKRIEEGIKELGSQILKEHPVENTQLQNEKLYLYYLQNGRDMYVDQELDINRLSDYDVDHIVPQSFLKDDSIDNKVLTRSDKARGKSDNVPSEEVVKKMKNYWRQLLNAKLITQRKFDNLTKAERGGLSELDKAGFIKRQLVETRQITKHVAQILDSRMNTKYDENDKLIREVKVITLKSKLVSDFRKDFQFYKVREINNYHHAHDAYLNAVVGTALIKKYPKLESEFVYGDYKVYDVRKMIAKSEQEIGKATAKYFFYSNIMNFFKTEITLANGEIRKRPLIETNGETGEIVWDKGRDFATVRKVLSMPQVNIVKKTEVQTGGFSKESILPKRNSDKLIARKKDWDPKKYGGFDSPTVAYSVLVVAKVEKGKSKKLKSVKELLGITIMERSSFEKNPIDFLEAKGYKEVKKDLIIKLPKYSLFELENGRKRMLASAGELQKGNELALPSKYVNFLYLASHYEKLKGSPEDNEQKQLFVEQHKHYLDEIIEQISEFSKRVILADANLDKVLSAYNKHRDKPIREQAENIIHLFTLTNLGAPAAFKYFDTTIDRKRYTSTKEVLDATLIHQSITGLYETRIDLSQLGGDGGGGSPAPGSSGGTLNIEDEYRLHETSKEPDVSLGSTWLSDFPQAWAETGGMGLAVRQAPLIIPLKATSTPVSIKQYPMSQEARLGIKPHIQRLLDQGILVPCQSPWNTPLLPVKKPGTNDYRPVQDLREVNKRVEDIHPTVPNPYNLLSGLPPSHQWYTVLDLKDAFFCLRLHPTSQPLFAFEWRDPEMGISGQLTWTRLPQGFKNSPTLFNEALHRDLADFRIQHPDLILLQYVDDLLLAATSELDCQQGTRALLQTLGNLGYRASAKKAQICQKQVKYLGYLLKEGQRWLTEARKETVMGQPTPKTPRQLREFLGKAGFCRLFIPGFAEMAAPLYPLTKPGTLFNWGPDQQKAYQEIKQALLTAPALGLPDLTKPFELFVDEKQGYAKGVLTQKLGPWRRPVAYLSKKLDPVAAGWPPCLRMVAAIAVLTKDAGKLTMGQPLVILAPHAVEALVKQPPDRWLSNARMTHYQALLLDTDRVQFGPVVALNPATLLPLPEEGLQHNCLDILAEAHGTRPDLTDQPLPDADHTWYTDGSSLLQEGQRKAGAAVTTETEVIWAKALPAGTSAQRAELIALTQALKMAEGKKLNVYTDSRYAFATAHIHGEIYRRRGWLTSEGKEIKNKDEILALLKALFLPKRLSIIHCPGHQKGHSAEARGNRMADQAARKAAITETPDTSTLLIENSSPSGGSKRTADGSEFEAGKRTADGSEFEKRTADGSEFESPKKKAKVE

SEQ ID NO: 2685 - protein, 2114 aa, synthetic construct
MPAAKRVKLDGGDKKYSIGLDIGTNSVGWAVITDEYKVPSKKFKVLGNTDRHSIKKNLIGALLFDSGETAEATRLKRTARRRYTRRKNRICYLQEIFSNEMAKVDDSFFHRLEESFLVEEDKKHERHPIFGNIVDEVAYHEKYPTIYHLRKKLVDSTDKADLRLIYLALAHMIKFRGHFLIEGDLNPDNSDVDKLFIQLVQTYNQLFEENPINASGVDAKAILSARLSKSRRLENLIAQLPGEKKNGLFGNLIALSLGLTPNFKSNFDLAEDAKLQLSKDTYDDDLDNLLAQIGDQYADLFLAAKNLSDAILLSDILRVNTEITKAPLSASMIKRYDEHHQDLTLLKALVRQQLPEKYKEIFFDQSKNGYAGYIDGGASQEEFYKFIKPILEKMDGTEELLVKLNREDLLRKQRTFDNGSIPHQIHLGELHAILRRQEDFYPFLKDNREKIEKILTFRIPYYVGPLARGNSRFAWMTRKSEETITPWNFEEVVDKGASAQSFIERMTNFDKNLPNEKVLPKHSLLYEYFTVYNELTKVKYVTEGMRKPAFLSGEQKKAIVDLLFKTNRKVTVKQLKEDYFKKIECFDSVEISGVEDRFNASLGTYHDLLKIIKDKDFLDNEENEDILEDIVLTLTLFEDREMIEERLKTYAHLFDDKVMKQLKRRRYTGWGRLSRKLINGIRDKQSGKTILDFLKSDGFANRNFMQLIHDDSLTFKEDIQKAQVSGQGDSLHEHIANLAGSPAIKKGILQTVKVVDELVKVMGRHKPENIVIEMARENQTTQKGQKNSRERMKRIEEGIKELGSQILKEHPVENTQLQNEKLYLYYLQNGRDMYVDQELDINRLSDYDVDHIVPQSFLKDDSIDNKVLTRSDKARGKSDNVPSEEVVKKMKNYWRQLLNAKLITQRKFDNLTKAERGGLSELDKAGFIKRQLVETRQITKHVAQILDSRMNTKYDENDKLIREVKVITLKSKLVSDFRKDFQFYKVREINNYHHAHDAYLNAVVGTALIKKYPKLESEFVYGDYKVYDVRKMIAKSEQEIGKATAKYFFYSNIMNFFKTEITLANGEIRKRPLIETNGETGEIVWDKGRDFATVRKVLSMPQVNIVKKTEVQTGGFSKESILPKRNSDKLIARKKDWDPKKYGGFDSPTVAYSVLVVAKVEKGKSKKLKSVKELLGITIMERSSFEKNPIDFLEAKGYKEVKKDLIIKLPKYSLFELENGRKRMLASAGELQKGNELALPSKYVNFLYLASHYEKLKGSPEDNEQKQLFVEQHKHYLDEIIEQISEFSKRVILADANLDKVLSAYNKHRDKPIREQAENIIHLFTLTNLGAPAAFKYFDTTIDRKRYTSTKEVLDATLIHQSITGLYETRIDLSQLGGDGGPAPGSSGGSGGTLNIEDEYRLHETSKEPDVSLGSTWLSDFPQAWAETGGMGLAVRQAPLIIPLKATSTPVSIKQYPMSQEARLGIKPHIQRLLDQGILVPCQSPWNTPLLPVKKPGTNDYRPVQDLREVNKRVEDIHPTVPNPYNLLSGLPPSHQWYTVLDLKDAFFCLRLHPTSQPLFAFEWRDPEMGISGQLTWTRLPQGFKNSPTLFNEALHRDLADFRIQHPDLILLQYVDDLLLAATSELDCQQGTRALLQTLGNLGYRASAKKAQICQKQVKYLGYLLKEGQRWLTEARKETVMGQPTPKTPRQLREFLGKAGFCRLFIPGFAEMAAPLYPLTKPGTLFNWGPDQQKAYQEIKQALLTAPALGLPDLTKPFELFVDEKQGYAKGVLTQKLGPWRRPVAYLSKKLDPVAAGWPPCLRMVAAIAVLTKDAGKLTMGQPLVILAPHAVEALVKQPPDRWLSNARMTHYQALLLDTDRVQFGPVVALNPATLLPLPEEGLQHNCLDILAEAHGTRPDLTDQPLPDADHTWYTDGSSLLQEGQRKAGAAVTTETEVIWAKALPAGTSAQRAELIALTQALKMAEGKKLNVYTDSRYAFATAHIHGEIYRRRGWLTSEGKEIKNKDEILALLKALFLPKRLSIIHCPGHQKGHSAEARGNRMADQAARKAAITETPDTSTLLIENSSPSGGSKRTADGSEFEAGKRTADGSEFEKRTADGSEFESPKKKAKVE

SEQ ID NO: 2686 - protein, 2116 aa, synthetic construct
MPAAKRVKLDGGDKKYSIGLDIGTNSVGWAVITDEYKVPSKKFKVLGNTDRHSIKKNLIGALLFDSGETAEATRLKRTARRRYTRRKNRICYLQEIFSNEMAKVDDSFFHRLEESFLVEEDKKHERHPIFGNIVDEVAYHEKYPTIYHLRKKLVDSTDKADLRLIYLALAHMIKFRGHFLIEGDLNPDNSDVDKLFIQLVQTYNQLFEENPINASGVDAKAILSARLSKSRRLENLIAQLPGEKKNGLFGNLIALSLGLTPNFKSNFDLAEDAKLQLSKDTYDDDLDNLLAQIGDQYADLFLAAKNLSDAILLSDILRVNTEITKAPLSASMIKRYDEHHQDLTLLKALVRQQLPEKYKEIFFDQSKNGYAGYIDGGASQEEFYKFIKPILEKMDGTEELLVKLNREDLLRKQRTFDNGSIPHQIHLGELHAILRRQEDFYPFLKDNREKIEKILTFRIPYYVGPLARGNSRFAWMTRKSEETITPWNFEEVVDKGASAQSFIERMTNFDKNLPNEKVLPKHSLLYEYFTVYNELTKVKYVTEGMRKPAFLSGEQKKAIVDLLFKTNRKVTVKQLKEDYFKKIECFDSVEISGVEDRFNASLGTYHDLLKIIKDKDFLDNEENEDILEDIVLTLTLFEDREMIEERLKTYAHLFDDKVMKQLKRRRYTGWGRLSRKLINGIRDKQSGKTILDFLKSDGFANRNFMQLIHDDSLTFKEDIQKAQVSGQGDSLHEHIANLAGSPAIKKGILQTVKVVDELVKVMGRHKPENIVIEMARENQTTQKGQKNSRERMKRIEEGIKELGSQILKEHPVENTQLQNEKLYLYYLQNGRDMYVDQELDINRLSDYDVDHIVPQSFLKDDSIDNKVLTRSDKARGKSDNVPSEEVVKKMKNYWRQLLNAKLITQRKFDNLTKAERGGLSELDKAGFIKRQLVETRQITKHVAQILDSRMNTKYDENDKLIREVKVITLKSKLVSDFRKDFQFYKVREINNYHHAHDAYLNAVVGTALIKKYPKLESEFVYGDYKVYDVRKMIAKSEQEIGKATAKYFFYSNIMNFFKTEITLANGEIRKRPLIETNGETGEIVWDKGRDFATVRKVLSMPQVNIVKKTEVQTGGFSKESILPKRNSDKLIARKKDWDPKKYGGFDSPTVAYSVLVVAKVEKGKSKKLKSVKELLGITIMERSSFEKNPIDFLEAKGYKEVKKDLIIKLPKYSLFELENGRKRMLASAGELQKGNELALPSKYVNFLYLASHYEKLKGSPEDNEQKQLFVEQHKHYLDEIIEQISEFSKRVILADANLDKVLSAYNKHRDKPIREQAENIIHLFTLTNLGAPAAFKYFDTTIDRKRYTSTKEVLDATLIHQSITGLYETRIDLSQLGGDGGEAAAKGSSGGGGGTLNIEDEYRLHETSKEPDVSLGSTWLSDFPQAWAETGGMGLAVRQAPLIIPLKATSTPVSIKQYPMSQEARLGIKPHIQRLLDQGILVPCQSPWNTPLLPVKKPGTNDYRPVQDLREVNKRVEDIHPTVPNPYNLLSGLPPSHQWYTVLDLKDAFFCLRLHPTSQPLFAFEWRDPEMGISGQLTWTRLPQGFKNSPTLFNEALHRDLADFRIQHPDLILLQYVDDLLLAATSELDCQQGTRALLQTLGNLGYRASAKKAQICQKQVKYLGYLLKEGQRWLTEARKETVMGQPTPKTPRQLREFLGKAGFCRLFIPGFAEMAAPLYPLTKPGTLFNWGPDQQKAYQEIKQALLTAPALGLPDLTKPFELFVDEKQGYAKGVLTQKLGPWRRPVAYLSKKLDPVAAGWPPCLRMVAAIAVLTKDAGKLTMGQPLVILAPHAVEALVKQPPDRWLSNARMTHYQALLLDTDRVQFGPVVALNPATLLPLPEEGLQHNCLDILAEAHGTRPDLTDQPLPDADHTWYTDGSSLLQEGQRKAGAAVTTETEVIWAKALPAGTSAQRAELIALTQALKMAEGKKLNVYTDSRYAFATAHIHGEIYRRRGWLTSEGKEIKNKDEILALLKALFLPKRLSIIHCPGHQKGHSAEARGNRMADQAARKAAITETPDTSTLLIENSSPSGGSKRTADGSEFEAGKRTADGSEFEKRTADGSEFESPKKKAKVE

SEQ ID NO: 2687 - protein, 2117 aa, synthetic construct
MPAAKRVKLDGGDKKYSIGLDIGTNSVGWAVITDEYKVPSKKFKVLGNTDRHSIKKNLIGALLFDSGETAEATRLKRTARRRYTRRKNRICYLQEIFSNEMAKVDDSFFHRLEESFLVEEDKKHERHPIFGNIVDEVAYHEKYPTIYHLRKKLVDSTDKADLRLIYLALAHMIKFRGHFLIEGDLNPDNSDVDKLFIQLVQTYNQLFEENPINASGVDAKAILSARLSKSRRLENLIAQLPGEKKNGLFGNLIALSLGLTPNFKSNFDLAEDAKLQLSKDTYDDDLDNLLAQIGDQYADLFLAAKNLSDAILLSDILRVNTEITKAPLSASMIKRYDEHHQDLTLLKALVRQQLPEKYKEIFFDQSKNGYAGYIDGGASQEEFYKFIKPILEKMDGTEELLVKLNREDLLRKQRTFDNGSIPHQIHLGELHAILRRQEDFYPFLKDNREKIEKILTFRIPYYVGPLARGNSRFAWMTRKSEETITPWNFEEVVDKGASAQSFIERMTNFDKNLPNEKVLPKHSLLYEYFTVYNELTKVKYVTEGMRKPAFLSGEQKKAIVDLLFKTNRKVTVKQLKEDYFKKIECFDSVEISGVEDRFNASLGTYHDLLKIIKDKDFLDNEENEDILEDIVLTLTLFEDREMIEERLKTYAHLFDDKVMKQLKRRRYTGWGRLSRKLINGIRDKQSGKTILDFLKSDGFANRNFMQLIHDDSLTFKEDIQKAQVSGQGDSLHEHIANLAGSPAIKKGILQTVKVVDELVKVMGRHKPENIVIEMARENQTTQKGQKNSRERMKRIEEGIKELGSQILKEHPVENTQLQNEKLYLYYLQNGRDMYVDQELDINRLSDYDVDHIVPQSFLKDDSIDNKVLTRSDKARGKSDNVPSEEVVKKMKNYWRQLLNAKLITQRKFDNLTKAERGGLSELDKAGFIKRQLVETRQITKHVAQILDSRMNTKYDENDKLIREVKVITLKSKLVSDFRKDFQFYKVREINNYHHAHDAYLNAVVGTALIKKYPKLESEFVYGDYKVYDVRKMIAKSEQEIGKATAKYFFYSNIMNFFKTEITLANGEIRKRPLIETNGETGEIVWDKGRDFATVRKVLSMPQVNIVKKTEVQTGGFSKESILPKRNSDKLIARKKDWDPKKYGGFDSPTVAYSVLVVAKVEKGKSKKLKSVKELLGITIMERSSFEKNPIDFLEAKGYKEVKKDLIIKLPKYSLFELENGRKRMLASAGELQKGNELALPSKYVNFLYLASHYEKLKGSPEDNEQKQLFVEQHKHYLDEIIEQISEFSKRVILADANLDKVLSAYNKHRDKPIREQAENIIHLFTLTNLGAPAAFKYFDTTIDRKRYTSTKEVLDATLIHQSITGLYETRIDLSQLGGDGGGGSGGSGGSGGSGGTLNIEDEYRLHETSKEPDVSLGSTWLSDFPQAWAETGGMGLAVRQAPLIIPLKATSTPVSIKQYPMSQEARLGIKPHIQRLLDQGILVPCQSPWNTPLLPVKKPGTNDYRPVQDLREVNKRVEDIHPTVPNPYNLLSGLPPSHQWYTVLDLKDAFFCLRLHPTSQPLFAFEWRDPEMGISGQLTWTRLPQGFKNSPTLFNEALHRDLADFRIQHPDLILLQYVDDLLLAATSELDCQQGTRALLQTLGNLGYRASAKKAQICQKQVKYLGYLLKEGQRWLTEARKETVMGQPTPKTPRQLREFLGKAGFCRLFIPGFAEMAAPLYPLTKPGTLFNWGPDQQKAYQEIKQALLTAPALGLPDLTKPFELFVDEKQGYAKGVLTQKLGPWRRPVAYLSKKLDPVAAGWPPCLRMVAAIAVLTKDAGKLTMGQPLVILAPHAVEALVKQPPDRWLSNARMTHYQALLLDTDRVQFGPVVALNPATLLPLPEEGLQHNCLDILAEAHGTRPDLTDQPLPDADHTWYTDGSSLLQEGQRKAGAAVTTETEVIWAKALPAGTSAQRAELIALTQALKMAEGKKLNVYTDSRYAFATAHIHGEIYRRRGWLTSEGKEIKNKDEILALLKALFLPKRLSIIHCPGHQKGHSAEARGNRMADQAARKAAITETPDTSTLLIENSSPSGGSKRTADGSEFEAGKRTADGSEFEKRTADGSEFESPKKKAKVE

SEQ ID NO: 2688 - protein, 2116 aa, synthetic construct
MPAAKRVKLDGGDKKYSIGLDIGTNSVGWAVITDEYKVPSKKFKVLGNTDRHSIKKNLIGALLFDSGETAEATRLKRTARRRYTRRKNRICYLQEIFSNEMAKVDDSFFHRLEESFLVEEDKKHERHPIFGNIVDEVAYHEKYPTIYHLRKKLVDSTDKADLRLIYLALAHMIKFRGHFLIEGDLNPDNSDVDKLFIQLVQTYNQLFEENPINASGVDAKAILSARLSKSRRLENLIAQLPGEKKNGLFGNLIALSLGLTPNFKSNFDLAEDAKLQLSKDTYDDDLDNLLAQIGDQYADLFLAAKNLSDAILLSDILRVNTEITKAPLSASMIKRYDEHHQDLTLLKALVRQQLPEKYKEIFFDQSKNGYAGYIDGGASQEEFYKFIKPILEKMDGTEELLVKLNREDLLRKQRTFDNGSIPHQIHLGELHAILRRQEDFYPFLKDNREKIEKILTFRIPYYVGPLARGNSRFAWMTRKSEETITPWNFEEVVDKGASAQSFIERMTNFDKNLPNEKVLPKHSLLYEYFTVYNELTKVKYVTEGMRKPAFLSGEQKKAIVDLLFKTNRKVTVKQLKEDYFKKIECFDSVEISGVEDRFNASLGTYHDLLKIIKDKDFLDNEENEDILEDIVLTLTLFEDREMIEERLKTYAHLFDDKVMKQLKRRRYTGWGRLSRKLINGIRDKQSGKTILDFLKSDGFANRNFMQLIHDDSLTFKEDIQKAQVSGQGDSLHEHIANLAGSPAIKKGILQTVKVVDELVKVMGRHKPENIVIEMARENQTTQKGQKNSRERMKRIEEGIKELGSQILKEHPVENTQLQNEKLYLYYLQNGRDMYVDQELDINRLSDYDVDHIVPQSFLKDDSIDNKVLTRSDKARGKSDNVPSEEVVKKMKNYWRQLLNAKLITQRKFDNLTKAERGGLSELDKAGFIKRQLVETRQITKHVAQILDSRMNTKYDENDKLIREVKVITLKSKLVSDFRKDFQFYKVREINNYHHAHDAYLNAVVGTALIKKYPKLESEFVYGDYKVYDVRKMIAKSEQEIGKATAKYFFYSNIMNFFKTEITLANGEIRKRPLIETNGETGEIVWDKGRDFATVRKVLSMPQVNIVKKTEVQTGGFSKESILPKRNSDKLIARKKDWDPKKYGGFDSPTVAYSVLVVAKVEKGKSKKLKSVKELLGITIMERSSFEKNPIDFLEAKGYKEVKKDLIIKLPKYSLFELENGRKRMLASAGELQKGNELALPSKYVNFLYLASHYEKLKGSPEDNEQKQLFVEQHKHYLDEIIEQISEFSKRVILADANLDKVLSAYNKHRDKPIREQAENIIHLFTLTNLGAPAAFKYFDTTIDRKRYTSTKEVLDATLIHQSITGLYETRIDLSQLGGDGGGGGGSSEAAAKGGTLNIEDEYRLHETSKEPDVSLGSTWLSDFPQAWAETGGMGLAVRQAPLIIPLKATSTPVSIKQYPMSQEARLGIKPHIQRLLDQGILVPCQSPWNTPLLPVKKPGTNDYRPVQDLREVNKRVEDIHPTVPNPYNLLSGLPPSHQWYTVLDLKDAFFCLRLHPTSQPLFAFEWRDPEMGISGQLTWTRLPQGFKNSPTLFNEALHRDLADFRIQHPDLILLQYVDDLLLAATSELDCQQGTRALLQTLGNLGYRASAKKAQICQKQVKYLGYLLKEGQRWLTEARKETVMGQPTPKTPRQLREFLGKAGFCRLFIPGFAEMAAPLYPLTKPGTLFNWGPDQQKAYQEIKQALLTAPALGLPDLTKPFELFVDEKQGYAKGVLTQKLGPWRRPVAYLSKKLDPVAAGWPPCLRMVAAIAVLTKDAGKLTMGQPLVILAPHAVEALVKQPPDRWLSNARMTHYQALLLDTDRVQFGPVVALNPATLLPLPEEGLQHNCLDILAEAHGTRPDLTDQPLPDADHTWYTDGSSLLQEGQRKAGAAVTTETEVIWAKALPAGTSAQRAELIALTQALKMAEGKKLNVYTDSRYAFATAHIHGEIYRRRGWLTSEGKEIKNKDEILALLKALFLPKRLSIIHCPGHQKGHSAEARGNRMADQAARKAAITETPDTSTLLIENSSPSGGSKRTADGSEFEAGKRTADGSEFEKRTADGSEFESPKKKAKVE

SEQ ID NO: 2689 - protein, 2114 aa, synthetic construct
MPAAKRVKLDGGDKKYSIGLDIGTNSVGWAVITDEYKVPSKKFKVLGNTDRHSIKKNLIGALLFDSGETAEATRLKRTARRRYTRRKNRICYLQEIFSNEMAKVDDSFFHRLEESFLVEEDKKHERHPIFGNIVDEVAYHEKYPTIYHLRKKLVDSTDKADLRLIYLALAHMIKFRGHFLIEGDLNPDNSDVDKLFIQLVQTYNQLFEENPINASGVDAKAILSARLSKSRRLENLIAQLPGEKKNGLFGNLIALSLGLTPNFKSNFDLAEDAKLQLSKDTYDDDLDNLLAQIGDQYADLFLAAKNLSDAILLSDILRVNTEITKAPLSASMIKRYDEHHQDLTLLKALVRQQLPEKYKEIFFDQSKNGYAGYIDGGASQEEFYKFIKPILEKMDGTEELLVKLNREDLLRKQRTFDNGSIPHQIHLGELHAILRRQEDFYPFLKDNREKIEKILTFRIPYYVGPLARGNSRFAWMTRKSEETITPWNFEEVVDKGASAQSFIERMTNFDKNLPNEKVLPKHSLLYEYFTVYNELTKVKYVTEGMRKPAFLSGEQKKAIVDLLFKTNRKVTVKQLKEDYFKKIECFDSVEISGVEDRFNASLGTYHDLLKIIKDKDFLDNEENEDILEDIVLTLTLFEDREMIEERLKTYAHLFDDKVMKQLKRRRYTGWGRLSRKLINGIRDKQSGKTILDFLKSDGFANRNFMQLIHDDSLTFKEDIQKAQVSGQGDSLHEHIANLAGSPAIKKGILQTVKVVDELVKVMGRHKPENIVIEMARENQTTQKGQKNSRERMKRIEEGIKELGSQILKEHPVENTQLQNEKLYLYYLQNGRDMYVDQELDINRLSDYDVDHIVPQSFLKDDSIDNKVLTRSDKARGKSDNVPSEEVVKKMKNYWRQLLNAKLITQRKFDNLTKAERGGLSELDKAGFIKRQLVETRQITKHVAQILDSRMNTKYDENDKLIREVKVITLKSKLVSDFRKDFQFYKVREINNYHHAHDAYLNAVVGTALIKKYPKLESEFVYGDYKVYDVRKMIAKSEQEIGKATAKYFFYSNIMNFFKTEITLANGEIRKRPLIETNGETGEIVWDKGRDFATVRKVLSMPQVNIVKKTEVQTGGFSKESILPKRNSDKLIARKKDWDPKKYGGFDSPTVAYSVLVVAKVEKGKSKKLKSVKELLGITIMERSSFEKNPIDFLEAKGYKEVKKDLIIKLPKYSLFELENGRKRMLASAGELQKGNELALPSKYVNFLYLASHYEKLKGSPEDNEQKQLFVEQHKHYLDEIIEQISEFSKRVILADANLDKVLSAYNKHRDKPIREQAENIIHLFTLTNLGAPAAFKYFDTTIDRKRYTSTKEVLDATLIHQSITGLYETRIDLSQLGGDGGGSSPAPGGSGGTLNIEDEYRLHETSKEPDVSLGSTWLSDFPQAWAETGGMGLAVRQAPLIIPLKATSTPVSIKQYPMSQEARLGIKPHIQRLLDQGILVPCQSPWNTPLLPVKKPGTNDYRPVQDLREVNKRVEDIHPTVPNPYNLLSGLPPSHQWYTVLDLKDAFFCLRLHPTSQPLFAFEWRDPEMGISGQLTWTRLPQGFKNSPTLFNEALHRDLADFRIQHPDLILLQYVDDLLLAATSELDCQQGTRALLQTLGNLGYRASAKKAQICQKQVKYLGYLLKEGQRWLTEARKETVMGQPTPKTPRQLREFLGKAGFCRLFIPGFAEMAAPLYPLTKPGTLFNWGPDQQKAYQEIKQALLTAPALGLPDLTKPFELFVDEKQGYAKGVLTQKLGPWRRPVAYLSKKLDPVAAGWPPCLRMVAAIAVLTKDAGKLTMGQPLVILAPHAVEALVKQPPDRWLSNARMTHYQALLLDTDRVQFGPVVALNPATLLPLPEEGLQHNCLDILAEAHGTRPDLTDQPLPDADHTWYTDGSSLLQEGQRKAGAAVTTETEVIWAKALPAGTSAQRAELIALTQALKMAEGKKLNVYTDSRYAFATAHIHGEIYRRRGWLTSEGKEIKNKDEILALLKALFLPKRLSIIHCPGHQKGHSAEARGNRMADQAARKAAITETPDTSTLLIENSSPSGGSKRTADGSEFEAGKRTADGSEFEKRTADGSEFESPKKKAKVE

SEQ ID NO: 2690 - protein, 2116 aa, synthetic construct
MPAAKRVKLDGGDKKYSIGLDIGTNSVGWAVITDEYKVPSKKFKVLGNTDRHSIKKNLIGALLFDSGETAEATRLKRTARRRYTRRKNRICYLQEIFSNEMAKVDDSFFHRLEESFLVEEDKKHERHPIFGNIVDEVAYHEKYPTIYHLRKKLVDSTDKADLRLIYLALAHMIKFRGHFLIEGDLNPDNSDVDKLFIQLVQTYNQLFEENPINASGVDAKAILSARLSKSRRLENLIAQLPGEKKNGLFGNLIALSLGLTPNFKSNFDLAEDAKLQLSKDTYDDDLDNLLAQIGDQYADLFLAAKNLSDAILLSDILRVNTEITKAPLSASMIKRYDEHHQDLTLLKALVRQQLPEKYKEIFFDQSKNGYAGYIDGGASQEEFYKFIKPILEKMDGTEELLVKLNREDLLRKQRTFDNGSIPHQIHLGELHAILRRQEDFYPFLKDNREKIEKILTFRIPYYVGPLARGNSRFAWMTRKSEETITPWNFEEVVDKGASAQSFIERMTNFDKNLPNEKVLPKHSLLYEYFTVYNELTKVKYVTEGMRKPAFLSGEQKKAIVDLLFKTNRKVTVKQLKEDYFKKIECFDSVEISGVEDRFNASLGTYHDLLKIIKDKDFLDNEENEDILEDIVLTLTLFEDREMIEERLKTYAHLFDDKVMKQLKRRRYTGWGRLSRKLINGIRDKQSGKTILDFLKSDGFANRNFMQLIHDDSLTFKEDIQKAQVSGQGDSLHEHIANLAGSPAIKKGILQTVKVVDELVKVMGRHKPENIVIEMARENQTTQKGQKNSRERMKRIEEGIKELGSQILKEHPVENTQLQNEKLYLYYLQNGRDMYVDQELDINRLSDYDVDHIVPQSFLKDDSIDNKVLTRSDKARGKSDNVPSEEVVKKMKNYWRQLLNAKLITQRKFDNLTKAERGGLSELDKAGFIKRQLVETRQITKHVAQILDSRMNTKYDENDKLIREVKVITLKSKLVSDFRKDFQFYKVREINNYHHAHDAYLNAVVGTALIKKYPKLESEFVYGDYKVYDVRKMIAKSEQEIGKATAKYFFYSNIMNFFKTEITLANGEIRKRPLIETNGETGEIVWDKGRDFATVRKVLSMPQVNIVKKTEVQTGGFSKESILPKRNSDKLIARKKDWDPKKYGGFDSPTVAYSVLVVAKVEKGKSKKLKSVKELLGITIMERSSFEKNPIDFLEAKGYKEVKKDLIIKLPKYSLFELENGRKRMLASAGELQKGNELALPSKYVNFLYLASHYEKLKGSPEDNEQKQLFVEQHKHYLDEIIEQISEFSKRVILADANLDKVLSAYNKHRDKPIREQAENIIHLFTLTNLGAPAAFKYFDTTIDRKRYTSTKEVLDATLIHQSITGLYETRIDLSQLGGDGGGGSEAAAKPAPGGTLNIEDEYRLHETSKEPDVSLGSTWLSDFPQAWAETGGMGLAVRQAPLIIPLKATSTPVSIKQYPMSQEARLGIKPHIQRLLDQGILVPCQSPWNTPLLPVKKPGTNDYRPVQDLREVNKRVEDIHPTVPNPYNLLSGLPPSHQWYTVLDLKDAFFCLRLHPTSQPLFAFEWRDPEMGISGQLTWTRLPQGFKNSPTLFNEALHRDLADFRIQHPDLILLQYVDDLLLAATSELDCQQGTRALLQTLGNLGYRASAKKAQICQKQVKYLGYLLKEGQRWLTEARKETVMGQPTPKTPRQLREFLGKAGFCRLFIPGFAEMAAPLYPLTKPGTLFNWGPDQQKAYQEIKQALLTAPALGLPDLTKPFELFVDEKQGYAKGVLTQKLGPWRRPVAYLSKKLDPVAAGWPPCLRMVAAIAVLTKDAGKLTMGQPLVILAPHAVEALVKQPPDRWLSNARMTHYQALLLDTDRVQFGPVVALNPATLLPLPEEGLQHNCLDILAEAHGTRPDLTDQPLPDADHTWYTDGSSLLQEGQRKAGAAVTTETEVIWAKALPAGTSAQRAELIALTQALKMAEGKKLNVYTDSRYAFATAHIHGEIYRRRGWLTSEGKEIKNKDEILALLKALFLPKRLSIIHCPGHQKGHSAEARGNRMADQAARKAAITETPDTSTLLIENSSPSGGSKRTADGSEFEAGKRTADGSEFEKRTADGSEFESPKKKAKVE

SEQ ID NO: 2691 - protein, 2110 aa, synthetic construct
MPAAKRVKLDGGDKKYSIGLDIGTNSVGWAVITDEYKVPSKKFKVLGNTDRHSIKKNLIGALLFDSGETAEATRLKRTARRRYTRRKNRICYLQEIFSNEMAKVDDSFFHRLEESFLVEEDKKHERHPIFGNIVDEVAYHEKYPTIYHLRKKLVDSTDKADLRLIYLALAHMIKFRGHFLIEGDLNPDNSDVDKLFIQLVQTYNQLFEENPINASGVDAKAILSARLSKSRRLENLIAQLPGEKKNGLFGNLIALSLGLTPNFKSNFDLAEDAKLQLSKDTYDDDLDNLLAQIGDQYADLFLAAKNLSDAILLSDILRVNTEITKAPLSASMIKRYDEHHQDLTLLKALVRQQLPEKYKEIFFDQSKNGYAGYIDGGASQEEFYKFIKPILEKMDGTEELLVKLNREDLLRKQRTFDNGSIPHQIHLGELHAILRRQEDFYPFLKDNREKIEKILTFRIPYYVGPLARGNSRFAWMTRKSEETITPWNFEEVVDKGASAQSFIERMTNFDKNLPNEKVLPKHSLLYEYFTVYNELTKVKYVTEGMRKPAFLSGEQKKAIVDLLFKTNRKVTVKQLKEDYFKKIECFDSVEISGVEDRFNASLGTYHDLLKIIKDKDFLDNEENEDILEDIVLTLTLFEDREMIEERLKTYAHLFDDKVMKQLKRRRYTGWGRLSRKLINGIRDKQSGKTILDFLKSDGFANRNFMQLIHDDSLTFKEDIQKAQVSGQGDSLHEHIANLAGSPAIKKGILQTVKVVDELVKVMGRHKPENIVIEMARENQTTQKGQKNSRERMKRIEEGIKELGSQILKEHPVENTQLQNEKLYLYYLQNGRDMYVDQELDINRLSDYDVDHIVPQSFLKDDSIDNKVLTRSDKARGKSDNVPSEEVVKKMKNYWRQLLNAKLITQRKFDNLTKAERGGLSELDKAGFIKRQLVETRQITKHVAQILDSRMNTKYDENDKLIREVKVITLKSKLVSDFRKDFQFYKVREINNYHHAHDAYLNAVVGTALIKKYPKLESEFVYGDYKVYDVRKMIAKSEQEIGKATAKYFFYSNIMNFFKTEITLANGEIRKRPLIETNGETGEIVWDKGRDFATVRKVLSMPQVNIVKKTEVQTGGFSKESILPKRNSDKLIARKKDWDPKKYGGFDSPTVAYSVLVVAKVEKGKSKKLKSVKELLGITIMERSSFEKNPIDFLEAKGYKEVKKDLIIKLPKYSLFELENGRKRMLASAGELQKGNELALPSKYVNFLYLASHYEKLKGSPEDNEQKQLFVEQHKHYLDEIIEQISEFSKRVILADANLDKVLSAYNKHRDKPIREQAENIIHLFTLTNLGAPAAFKYFDTTIDRKRYTSTKEVLDATLIHQSITGLYETRIDLSQLGGDGGGGGGSGGTLNIEDEYRLHETSKEPDVSLGSTWLSDFPQAWAETGGMGLAVRQAPLIIPLKATSTPVSIKQYPMSQEARLGIKPHIQRLLDQGILVPCQSPWNTPLLPVKKPGTNDYRPVQDLREVNKRVEDIHPTVPNPYNLLSGLPPSHQWYTVLDLKDAFFCLRLHPTSQPLFAFEWRDPEMGISGQLTWTRLPQGFKNSPTLFNEALHRDLADFRIQHPDLILLQYVDDLLLAATSELDCQQGTRALLQTLGNLGYRASAKKAQICQKQVKYLGYLLKEGQRWLTEARKETVMGQPTPKTPRQLREFLGKAGFCRLFIPGFAEMAAPLYPLTKPGTLFNWGPDQQKAYQEIKQALLTAPALGLPDLTKPFELFVDEKQGYAKGVLTQKLGPWRRPVAYLSKKLDPVAAGWPPCLRMVAAIAVLTKDAGKLTMGQPLVILAPHAVEALVKQPPDRWLSNARMTHYQALLLDTDRVQFGPVVALNPATLLPLPEEGLQHNCLDILAEAHGTRPDLTDQPLPDADHTWYTDGSSLLQEGQRKAGAAVTTETEVIWAKALPAGTSAQRAELIALTQALKMAEGKKLNVYTDSRYAFATAHIHGEIYRRRGWLTSEGKEIKNKDEILALLKALFLPKRLSIIHCPGHQKGHSAEARGNRMADQAARKAAITETPDTSTLLIENSSPSGGSKRTADGSEFEAGKRTADGSEFEKRTADGSEFESPKKKAKVE

SEQ ID NO: 2692 - protein, 2116 aa, synthetic construct
MPAAKRVKLDGGDKKYSIGLDIGTNSVGWAVITDEYKVPSKKFKVLGNTDRHSIKKNLIGALLFDSGETAEATRLKRTARRRYTRRKNRICYLQEIFSNEMAKVDDSFFHRLEESFLVEEDKKHERHPIFGNIVDEVAYHEKYPTIYHLRKKLVDSTDKADLRLIYLALAHMIKFRGHFLIEGDLNPDNSDVDKLFIQLVQTYNQLFEENPINASGVDAKAILSARLSKSRRLENLIAQLPGEKKNGLFGNLIALSLGLTPNFKSNFDLAEDAKLQLSKDTYDDDLDNLLAQIGDQYADLFLAAKNLSDAILLSDILRVNTEITKAPLSASMIKRYDEHHQDLTLLKALVRQQLPEKYKEIFFDQSKNGYAGYIDGGASQEEFYKFIKPILEKMDGTEELLVKLNREDLLRKQRTFDNGSIPHQIHLGELHAILRRQEDFYPFLKDNREKIEKILTFRIPYYVGPLARGNSRFAWMTRKSEETITPWNFEEVVDKGASAQSFIERMTNFDKNLPNEKVLPKHSLLYEYFTVYNELTKVKYVTEGMRKPAFLSGEQKKAIVDLLFKTNRKVTVKQLKEDYFKKIECFDSVEISGVEDRFNASLGTYHDLLKIIKDKDFLDNEENEDILEDIVLTLTLFEDREMIEERLKTYAHLFDDKVMKQLKRRRYTGWGRLSRKLINGIRDKQSGKTILDFLKSDGFANRNFMQLIHDDSLTFKEDIQKAQVSGQGDSLHEHIANLAGSPAIKKGILQTVKVVDELVKVMGRHKPENIVIEMARENQTTQKGQKNSRERMKRIEEGIKELGSQILKEHPVENTQLQNEKLYLYYLQNGRDMYVDQELDINRLSDYDVDHIVPQSFLKDDSIDNKVLTRSDKARGKSDNVPSEEVVKKMKNYWRQLLNAKLITQRKFDNLTKAERGGLSELDKAGFIKRQLVETRQITKHVAQILDSRMNTKYDENDKLIREVKVITLKSKLVSDFRKDFQFYKVREINNYHHAHDAYLNAVVGTALIKKYPKLESEFVYGDYKVYDVRKMIAKSEQEIGKATAKYFFYSNIMNFFKTEITLANGEIRKRPLIETNGETGEIVWDKGRDFATVRKVLSMPQVNIVKKTEVQTGGFSKESILPKRNSDKLIARKKDWDPKKYGGFDSPTVAYSVLVVAKVEKGKSKKLKSVKELLGITIMERSSFEKNPIDFLEAKGYKEVKKDLIIKLPKYSLFELENGRKRMLASAGELQKGNELALPSKYVNFLYLASHYEKLKGSPEDNEQKQLFVEQHKHYLDEIIEQISEFSKRVILADANLDKVLSAYNKHRDKPIREQAENIIHLFTLTNLGAPAAFKYFDTTIDRKRYTSTKEVLDATLIHQSITGLYETRIDLSQLGGDGGGGSGGGEAAAKGGTLNIEDEYRLHETSKEPDVSLGSTWLSDFPQAWAETGGMGLAVRQAPLIIPLKATSTPVSIKQYPMSQEARLGIKPHIQRLLDQGILVPCQSPWNTPLLPVKKPGTNDYRPVQDLREVNKRVEDIHPTVPNPYNLLSGLPPSHQWYTVLDLKDAFFCLRLHPTSQPLFAFEWRDPEMGISGQLTWTRLPQGFKNSPTLFNEALHRDLADFRIQHPDLILLQYVDDLLLAATSELDCQQGTRALLQTLGNLGYRASAKKAQICQKQVKYLGYLLKEGQRWLTEARKETVMGQPTPKTPRQLREFLGKAGFCRLFIPGFAEMAAPLYPLTKPGTLFNWGPDQQKAYQEIKQALLTAPALGLPDLTKPFELFVDEKQGYAKGVLTQKLGPWRRPVAYLSKKLDPVAAGWPPCLRMVAAIAVLTKDAGKLTMGQPLVILAPHAVEALVKQPPDRWLSNARMTHYQALLLDTDRVQFGPVVALNPATLLPLPEEGLQHNCLDILAEAHGTRPDLTDQPLPDADHTWYTDGSSLLQEGQRKAGAAVTTETEVIWAKALPAGTSAQRAELIALTQALKMAEGKKLNVYTDSRYAFATAHIHGEIYRRRGWLTSEGKEIKNKDEILALLKALFLPKRLSIIHCPGHQKGHSAEARGNRMADQAARKAAITETPDTSTLLIENSSPSGGSKRTADGSEFEAGKRTADGSEFEKRTADGSEFESPKKKAKVE

SEQ ID NO: 2693 - protein, 2111 aa, synthetic construct
MPAAKRVKLDGGDKKYSIGLDIGTNSVGWAVITDEYKVPSKKFKVLGNTDRHSIKKNLIGALLFDSGETAEATRLKRTARRRYTRRKNRICYLQEIFSNEMAKVDDSFFHRLEESFLVEEDKKHERHPIFGNIVDEVAYHEKYPTIYHLRKKLVDSTDKADLRLIYLALAHMIKFRGHFLIEGDLNPDNSDVDKLFIQLVQTYNQLFEENPINASGVDAKAILSARLSKSRRLENLIAQLPGEKKNGLFGNLIALSLGLTPNFKSNFDLAEDAKLQLSKDTYDDDLDNLLAQIGDQYADLFLAAKNLSDAILLSDILRVNTEITKAPLSASMIKRYDEHHQDLTLLKALVRQQLPEKYKEIFFDQSKNGYAGYIDGGASQEEFYKFIKPILEKMDGTEELLVKLNREDLLRKQRTFDNGSIPHQIHLGELHAILRRQEDFYPFLKDNREKIEKILTFRIPYYVGPLARGNSRFAWMTRKSEETITPWNFEEVVDKGASAQSFIERMTNFDKNLPNEKVLPKHSLLYEYFTVYNELTKVKYVTEGMRKPAFLSGEQKKAIVDLLFKTNRKVTVKQLKEDYFKKIECFDSVEISGVEDRFNASLGTYHDLLKIIKDKDFLDNEENEDILEDIVLTLTLFEDREMIEERLKTYAHLFDDKVMKQLKRRRYTGWGRLSRKLINGIRDKQSGKTILDFLKSDGFANRNFMQLIHDDSLTFKEDIQKAQVSGQGDSLHEHIANLAGSPAIKKGILQTVKVVDELVKVMGRHKPENIVIEMARENQTTQKGQKNSRERMKRIEEGIKELGSQILKEHPVENTQLQNEKLYLYYLQNGRDMYVDQELDINRLSDYDVDHIVPQSFLKDDSIDNKVLTRSDKARGKSDNVPSEEVVKKMKNYWRQLLNAKLITQRKFDNLTKAERGGLSELDKAGFIKRQLVETRQITKHVAQILDSRMNTKYDENDKLIREVKVITLKSKLVSDFRKDFQFYKVREINNYHHAHDAYLNAVVGTALIKKYPKLESEFVYGDYKVYDVRKMIAKSEQEIGKATAKYFFYSNIMNFFKTEITLANGEIRKRPLIETNGETGEIVWDKGRDFATVRKVLSMPQVNIVKKTEVQTGGFSKESILPKRNSDKLIARKKDWDPKKYGGFDSPTVAYSVLVVAKVEKGKSKKLKSVKELLGITIMERSSFEKNPIDFLEAKGYKEVKKDLIIKLPKYSLFELENGRKRMLASAGELQKGNELALPSKYVNFLYLASHYEKLKGSPEDNEQKQLFVEQHKHYLDEIIEQISEFSKRVILADANLDKVLSAYNKHRDKPIREQAENIIHLFTLTNLGAPAAFKYFDTTIDRKRYTSTKEVLDATLIHQSITGLYETRIDLSQLGGDGGGGSGGSGGTLNIEDEYRLHETSKEPDVSLGSTWLSDFPQAWAETGGMGLAVRQAPLIIPLKATSTPVSIKQYPMSQEARLGIKPHIQRLLDQGILVPCQSPWNTPLLPVKKPGTNDYRPVQDLREVNKRVEDIHPTVPNPYNLLSGLPPSHQWYTVLDLKDAFFCLRLHPTSQPLFAFEWRDPEMGISGQLTWTRLPQGFKNSPTLFNEALHRDLADFRIQHPDLILLQYVDDLLLAATSELDCQQGTRALLQTLGNLGYRASAKKAQICQKQVKYLGYLLKEGQRWLTEARKETVMGQPTPKTPRQLREFLGKAGFCRLFIPGFAEMAAPLYPLTKPGTLFNWGPDQQKAYQEIKQALLTAPALGLPDLTKPFELFVDEKQGYAKGVLTQKLGPWRRPVAYLSKKLDPVAAGWPPCLRMVAAIAVLTKDAGKLTMGQPLVILAPHAVEALVKQPPDRWLSNARMTHYQALLLDTDRVQFGPVVALNPATLLPLPEEGLQHNCLDILAEAHGTRPDLTDQPLPDADHTWYTDGSSLLQEGQRKAGAAVTTETEVIWAKALPAGTSAQRAELIALTQALKMAEGKKLNVYTDSRYAFATAHIHGEIYRRRGWLTSEGKEIKNKDEILALLKALFLPKRLSIIHCPGHQKGHSAEARGNRMADQAARKAAITETPDTSTLLIENSSPSGGSKRTADGSEFEAGKRTADGSEFEKRTADGSEFESPKKKAKVE

SEQ ID NO: 2694 - protein, 2114 aa, synthetic construct
MPAAKRVKLDGGDKKYSIGLDIGTNSVGWAVITDEYKVPSKKFKVLGNTDRHSIKKNLIGALLFDSGETAEATRLKRTARRRYTRRKNRICYLQEIFSNEMAKVDDSFFHRLEESFLVEEDKKHERHPIFGNIVDEVAYHEKYPTIYHLRKKLVDSTDKADLRLIYLALAHMIKFRGHFLIEGDLNPDNSDVDKLFIQLVQTYNQLFEENPINASGVDAKAILSARLSKSRRLENLIAQLPGEKKNGLFGNLIALSLGLTPNFKSNFDLAEDAKLQLSKDTYDDDLDNLLAQIGDQYADLFLAAKNLSDAILLSDILRVNTEITKAPLSASMIKRYDEHHQDLTLLKALVRQQLPEKYKEIFFDQSKNGYAGYIDGGASQEEFYKFIKPILEKMDGTEELLVKLNREDLLRKQRTFDNGSIPHQIHLGELHAILRRQEDFYPFLKDNREKIEKILTFRIPYYVGPLARGNSRFAWMTRKSEETITPWNFEEVVDKGASAQSFIERMTNFDKNLPNEKVLPKHSLLYEYFTVYNELTKVKYVTEGMRKPAFLSGEQKKAIVDLLFKTNRKVTVKQLKEDYFKKIECFDSVEISGVEDRFNASLGTYHDLLKIIKDKDFLDNEENEDILEDIVLTLTLFEDREMIEERLKTYAHLFDDKVMKQLKRRRYTGWGRLSRKLINGIRDKQSGKTILDFLKSDGFANRNFMQLIHDDSLTFKEDIQKAQVSGQGDSLHEHIANLAGSPAIKKGILQTVKVVDELVKVMGRHKPENIVIEMARENQTTQKGQKNSRERMKRIEEGIKELGSQILKEHPVENTQLQNEKLYLYYLQNGRDMYVDQELDINRLSDYDVDHIVPQSFLKDDSIDNKVLTRSDKARGKSDNVPSEEVVKKMKNYWRQLLNAKLITQRKFDNLTKAERGGLSELDKAGFIKRQLVETRQITKHVAQILDSRMNTKYDENDKLIREVKVITLKSKLVSDFRKDFQFYKVREINNYHHAHDAYLNAVVGTALIKKYPKLESEFVYGDYKVYDVRKMIAKSEQEIGKATAKYFFYSNIMNFFKTEITLANGEIRKRPLIETNGETGEIVWDKGRDFATVRKVLSMPQVNIVKKTEVQTGGFSKESILPKRNSDKLIARKKDWDPKKYGGFDSPTVAYSVLVVAKVEKGKSKKLKSVKELLGITIMERSSFEKNPIDFLEAKGYKEVKKDLIIKLPKYSLFELENGRKRMLASAGELQKGNELALPSKYVNFLYLASHYEKLKGSPEDNEQKQLFVEQHKHYLDEIIEQISEFSKRVILADANLDKVLSAYNKHRDKPIREQAENIIHLFTLTNLGAPAAFKYFDTTIDRKRYTSTKEVLDATLIHQSITGLYETRIDLSQLGGDGGGSSGGSGGGGGTLNIEDEYRLHETSKEPDVSLGSTWLSDFPQAWAETGGMGLAVRQAPLIIPLKATSTPVSIKQYPMSQEARLGIKPHIQRLLDQGILVPCQSPWNTPLLPVKKPGTNDYRPVQDLREVNKRVEDIHPTVPNPYNLLSGLPPSHQWYTVLDLKDAFFCLRLHPTSQPLFAFEWRDPEMGISGQLTWTRLPQGFKNSPTLFNEALHRDLADFRIQHPDLILLQYVDDLLLAATSELDCQQGTRALLQTLGNLGYRASAKKAQICQKQVKYLGYLLKEGQRWLTEARKETVMGQPTPKTPRQLREFLGKAGFCRLFIPGFAEMAAPLYPLTKPGTLFNWGPDQQKAYQEIKQALLTAPALGLPDLTKPFELFVDEKQGYAKGVLTQKLGPWRRPVAYLSKKLDPVAAGWPPCLRMVAAIAVLTKDAGKLTMGQPLVILAPHAVEALVKQPPDRWLSNARMTHYQALLLDTDRVQFGPVVALNPATLLPLPEEGLQHNCLDILAEAHGTRPDLTDQPLPDADHTWYTDGSSLLQEGQRKAGAAVTTETEVIWAKALPAGTSAQRAELIALTQALKMAEGKKLNVYTDSRYAFATAHIHGEIYRRRGWLTSEGKEIKNKDEILALLKALFLPKRLSIIHCPGHQKGHSAEARGNRMADQAARKAAITETPDTSTLLIENSSPSGGSKRTADGSEFEAGKRTADGSEFEKRTADGSEFESPKKKAKVE

SEQ ID NO: 2695 - protein, 2116 aa, synthetic construct
MPAAKRVKLDGGDKKYSIGLDIGTNSVGWAVITDEYKVPSKKFKVLGNTDRHSIKKNLIGALLFDSGETAEATRLKRTARRRYTRRKNRICYLQEIFSNEMAKVDDSFFHRLEESFLVEEDKKHERHPIFGNIVDEVAYHEKYPTIYHLRKKLVDSTDKADLRLIYLALAHMIKFRGHFLIEGDLNPDNSDVDKLFIQLVQTYNQLFEENPINASGVDAKAILSARLSKSRRLENLIAQLPGEKKNGLFGNLIALSLGLTPNFKSNFDLAEDAKLQLSKDTYDDDLDNLLAQIGDQYADLFLAAKNLSDAILLSDILRVNTEITKAPLSASMIKRYDEHHQDLTLLKALVRQQLPEKYKEIFFDQSKNGYAGYIDGGASQEEFYKFIKPILEKMDGTEELLVKLNREDLLRKQRTFDNGSIPHQIHLGELHAILRRQEDFYPFLKDNREKIEKILTFRIPYYVGPLARGNSRFAWMTRKSEETITPWNFEEVVDKGASAQSFIERMTNFDKNLPNEKVLPKHSLLYEYFTVYNELTKVKYVTEGMRKPAFLSGEQKKAIVDLLFKTNRKVTVKQLKEDYFKKIECFDSVEISGVEDRFNASLGTYHDLLKIIKDKDFLDNEENEDILEDIVLTLTLFEDREMIEERLKTYAHLFDDKVMKQLKRRRYTGWGRLSRKLINGIRDKQSGKTILDFLKSDGFANRNFMQLIHDDSLTFKEDIQKAQVSGQGDSLHEHIANLAGSPAIKKGILQTVKVVDELVKVMGRHKPENIVIEMARENQTTQKGQKNSRERMKRIEEGIKELGSQILKEHPVENTQLQNEKLYLYYLQNGRDMYVDQELDINRLSDYDVDHIVPQSFLKDDSIDNKVLTRSDKARGKSDNVPSEEVVKKMKNYWRQLLNAKLITQRKFDNLTKAERGGLSELDKAGFIKRQLVETRQITKHVAQILDSRMNTKYDENDKLIREVKVITLKSKLVSDFRKDFQFYKVREINNYHHAHDAYLNAVVGTALIKKYPKLESEFVYGDYKVYDVRKMIAKSEQEIGKATAKYFFYSNIMNFFKTEITLANGEIRKRPLIETNGETGEIVWDKGRDFATVRKVLSMPQVNIVKKTEVQTGGFSKESILPKRNSDKLIARKKDWDPKKYGGFDSPTVAYSVLVVAKVEKGKSKKLKSVKELLGITIMERSSFEKNPIDFLEAKGYKEVKKDLIIKLPKYSLFELENGRKRMLASAGELQKGNELALPSKYVNFLYLASHYEKLKGSPEDNEQKQLFVEQHKHYLDEIIEQISEFSKRVILADANLDKVLSAYNKHRDKPIREQAENIIHLFTLTNLGAPAAFKYFDTTIDRKRYTSTKEVLDATLIHQSITGLYETRIDLSQLGGDGGEAAAKGGGGSSGGTLNIEDEYRLHETSKEPDVSLGSTWLSDFPQAWAETGGMGLAVRQAPLIIPLKATSTPVSIKQYPMSQEARLGIKPHIQRLLDQGILVPCQSPWNTPLLPVKKPGTNDYRPVQDLREVNKRVEDIHPTVPNPYNLLSGLPPSHQWYTVLDLKDAFFCLRLHPTSQPLFAFEWRDPEMGISGQLTWTRLPQGFKNSPTLFNEALHRDLADFRIQHPDLILLQYVDDLLLAATSELDCQQGTRALLQTLGNLGYRASAKKAQICQKQVKYLGYLLKEGQRWLTEARKETVMGQPTPKTPRQLREFLGKAGFCRLFIPGFAEMAAPLYPLTKPGTLFNWGPDQQKAYQEIKQALLTAPALGLPDLTKPFELFVDEKQGYAKGVLTQKLGPWRRPVAYLSKKLDPVAAGWPPCLRMVAAIAVLTKDAGKLTMGQPLVILAPHAVEALVKQPPDRWLSNARMTHYQALLLDTDRVQFGPVVALNPATLLPLPEEGLQHNCLDILAEAHGTRPDLTDQPLPDADHTWYTDGSSLLQEGQRKAGAAVTTETEVIWAKALPAGTSAQRAELIALTQALKMAEGKKLNVYTDSRYAFATAHIHGEIYRRRGWLTSEGKEIKNKDEILALLKALFLPKRLSIIHCPGHQKGHSAEARGNRMADQAARKAAITETPDTSTLLIENSSPSGGSKRTADGSEFEAGKRTADGSEFEKRTADGSEFESPKKKAKVE

SEQ ID NO: 2696 - protein, 2117 aa, synthetic construct
MPAAKRVKLDGGDKKYSIGLDIGTNSVGWAVITDEYKVPSKKFKVLGNTDRHSIKKNLIGALLFDSGETAEATRLKRTARRRYTRRKNRICYLQEIFSNEMAKVDDSFFHRLEESFLVEEDKKHERHPIFGNIVDEVAYHEKYPTIYHLRKKLVDSTDKADLRLIYLALAHMIKFRGHFLIEGDLNPDNSDVDKLFIQLVQTYNQLFEENPINASGVDAKAILSARLSKSRRLENLIAQLPGEKKNGLFGNLIALSLGLTPNFKSNFDLAEDAKLQLSKDTYDDDLDNLLAQIGDQYADLFLAAKNLSDAILLSDILRVNTEITKAPLSASMIKRYDEHHQDLTLLKALVRQQLPEKYKEIFFDQSKNGYAGYIDGGASQEEFYKFIKPILEKMDGTEELLVKLNREDLLRKQRTFDNGSIPHQIHLGELHAILRRQEDFYPFLKDNREKIEKILTFRIPYYVGPLARGNSRFAWMTRKSEETITPWNFEEVVDKGASAQSFIERMTNFDKNLPNEKVLPKHSLLYEYFTVYNELTKVKYVTEGMRKPAFLSGEQKKAIVDLLFKTNRKVTVKQLKEDYFKKIECFDSVEISGVEDRFNASLGTYHDLLKIIKDKDFLDNEENEDILEDIVLTLTLFEDREMIEERLKTYAHLFDDKVMKQLKRRRYTGWGRLSRKLINGIRDKQSGKTILDFLKSDGFANRNFMQLIHDDSLTFKEDIQKAQVSGQGDSLHEHIANLAGSPAIKKGILQTVKVVDELVKVMGRHKPENIVIEMARENQTTQKGQKNSRERMKRIEEGIKELGSQILKEHPVENTQLQNEKLYLYYLQNGRDMYVDQELDINRLSDYDVDHIVPQSFLKDDSIDNKVLTRSDKARGKSDNVPSEEVVKKMKNYWRQLLNAKLITQRKFDNLTKAERGGLSELDKAGFIKRQLVETRQITKHVAQILDSRMNTKYDENDKLIREVKVITLKSKLVSDFRKDFQFYKVREINNYHHAHDAYLNAVVGTALIKKYPKLESEFVYGDYKVYDVRKMIAKSEQEIGKATAKYFFYSNIMNFFKTEITLANGEIRKRPLIETNGETGEIVWDKGRDFATVRKVLSMPQVNIVKKTEVQTGGFSKESILPKRNSDKLIARKKDWDPKKYGGFDSPTVAYSVLVVAKVEKGKSKKLKSVKELLGITIMERSSFEKNPIDFLEAKGYKEVKKDLIIKLPKYSLFELENGRKRMLASAGELQKGNELALPSKYVNFLYLASHYEKLKGSPEDNEQKQLFVEQHKHYLDEIIEQISEFSKRVILADANLDKVLSAYNKHRDKPIREQAENIIHLFTLTNLGAPAAFKYFDTTIDRKRYTSTKEVLDATLIHQSITGLYETRIDLSQLGGDGGGSAGSAAGSGEFGGTLNIEDEYRLHETSKEPDVSLGSTWLSDFPQAWAETGGMGLAVRQAPLIIPLKATSTPVSIKQYPMSQEARLGIKPHIQRLLDQGILVPCQSPWNTPLLPVKKPGTNDYRPVQDLREVNKRVEDIHPTVPNPYNLLSGLPPSHQWYTVLDLKDAFFCLRLHPTSQPLFAFEWRDPEMGISGQLTWTRLPQGFKNSPTLFNEALHRDLADFRIQHPDLILLQYVDDLLLAATSELDCQQGTRALLQTLGNLGYRASAKKAQICQKQVKYLGYLLKEGQRWLTEARKETVMGQPTPKTPRQLREFLGKAGFCRLFIPGFAEMAAPLYPLTKPGTLFNWGPDQQKAYQEIKQALLTAPALGLPDLTKPFELFVDEKQGYAKGVLTQKLGPWRRPVAYLSKKLDPVAAGWPPCLRMVAAIAVLTKDAGKLTMGQPLVILAPHAVEALVKQPPDRWLSNARMTHYQALLLDTDRVQFGPVVALNPATLLPLPEEGLQHNCLDILAEAHGTRPDLTDQPLPDADHTWYTDGSSLLQEGQRKAGAAVTTETEVIWAKALPAGTSAQRAELIALTQALKMAEGKKLNVYTDSRYAFATAHIHGEIYRRRGWLTSEGKEIKNKDEILALLKALFLPKRLSIIHCPGHQKGHSAEARGNRMADQAARKAAITETPDTSTLLIENSSPSGGSKRTADGSEFEAGKRTADGSEFEKRTADGSEFESPKKKAKVE

SEQ ID NO: 2697 - protein, 2114 aa, synthetic construct
MPAAKRVKLDGGDKKYSIGLDIGTNSVGWAVITDEYKVPSKKFKVLGNTDRHSIKKNLIGALLFDSGETAEATRLKRTARRRYTRRKNRICYLQEIFSNEMAKVDDSFFHRLEESFLVEEDKKHERHPIFGNIVDEVAYHEKYPTIYHLRKKLVDSTDKADLRLIYLALAHMIKFRGHFLIEGDLNPDNSDVDKLFIQLVQTYNQLFEENPINASGVDAKAILSARLSKSRRLENLIAQLPGEKKNGLFGNLIALSLGLTPNFKSNFDLAEDAKLQLSKDTYDDDLDNLLAQIGDQYADLFLAAKNLSDAILLSDILRVNTEITKAPLSASMIKRYDEHHQDLTLLKALVRQQLPEKYKEIFFDQSKNGYAGYIDGGASQEEFYKFIKPILEKMDGTEELLVKLNREDLLRKQRTFDNGSIPHQIHLGELHAILRRQEDFYPFLKDNREKIEKILTFRIPYYVGPLARGNSRFAWMTRKSEETITPWNFEEVVDKGASAQSFIERMTNFDKNLPNEKVLPKHSLLYEYFTVYNELTKVKYVTEGMRKPAFLSGEQKKAIVDLLFKTNRKVTVKQLKEDYFKKIECFDSVEISGVEDRFNASLGTYHDLLKIIKDKDFLDNEENEDILEDIVLTLTLFEDREMIEERLKTYAHLFDDKVMKQLKRRRYTGWGRLSRKLINGIRDKQSGKTILDFLKSDGFANRNFMQLIHDDSLTFKEDIQKAQVSGQGDSLHEHIANLAGSPAIKKGILQTVKVVDELVKVMGRHKPENIVIEMARENQTTQKGQKNSRERMKRIEEGIKELGSQILKEHPVENTQLQNEKLYLYYLQNGRDMYVDQELDINRLSDYDVDHIVPQSFLKDDSIDNKVLTRSDKARGKSDNVPSEEVVKKMKNYWRQLLNAKLITQRKFDNLTKAERGGLSELDKAGFIKRQLVETRQITKHVAQILDSRMNTKYDENDKLIREVKVITLKSKLVSDFRKDFQFYKVREINNYHHAHDAYLNAVVGTALIKKYPKLESEFVYGDYKVYDVRKMIAKSEQEIGKATAKYFFYSNIMNFFKTEITLANGEIRKRPLIETNGETGEIVWDKGRDFATVRKVLSMPQVNIVKKTEVQTGGFSKESILPKRNSDKLIARKKDWDPKKYGGFDSPTVAYSVLVVAKVEKGKSKKLKSVKELLGITIMERSSFEKNPIDFLEAKGYKEVKKDLIIKLPKYSLFELENGRKRMLASAGELQKGNELALPSKYVNFLYLASHYEKLKGSPEDNEQKQLFVEQHKHYLDEIIEQISEFSKRVILADANLDKVLSAYNKHRDKPIREQAENIIHLFTLTNLGAPAAFKYFDTTIDRKRYTSTKEVLDATLIHQSITGLYETRIDLSQLGGDGGGGSGGSGGSGGTLNIEDEYRLHETSKEPDVSLGSTWLSDFPQAWAETGGMGLAVRQAPLIIPLKATSTPVSIKQYPMSQEARLGIKPHIQRLLDQGILVPCQSPWNTPLLPVKKPGTNDYRPVQDLREVNKRVEDIHPTVPNPYNLLSGLPPSHQWYTVLDLKDAFFCLRLHPTSQPLFAFEWRDPEMGISGQLTWTRLPQGFKNSPTLFNEALHRDLADFRIQHPDLILLQYVDDLLLAATSELDCQQGTRALLQTLGNLGYRASAKKAQICQKQVKYLGYLLKEGQRWLTEARKETVMGQPTPKTPRQLREFLGKAGFCRLFIPGFAEMAAPLYPLTKPGTLFNWGPDQQKAYQEIKQALLTAPALGLPDLTKPFELFVDEKQGYAKGVLTQKLGPWRRPVAYLSKKLDPVAAGWPPCLRMVAAIAVLTKDAGKLTMGQPLVILAPHAVEALVKQPPDRWLSNARMTHYQALLLDTDRVQFGPVVALNPATLLPLPEEGLQHNCLDILAEAHGTRPDLTDQPLPDADHTWYTDGSSLLQEGQRKAGAAVTTETEVIWAKALPAGTSAQRAELIALTQALKMAEGKKLNVYTDSRYAFATAHIHGEIYRRRGWLTSEGKEIKNKDEILALLKALFLPKRLSIIHCPGHQKGHSAEARGNRMADQAARKAAITETPDTSTLLIENSSPSGGSKRTADGSEFEAGKRTADGSEFEKRTADGSEFESPKKKAKVE

SEQ ID NO: 2698 - protein, 2114 aa, synthetic construct
MPAAKRVKLDGGDKKYSIGLDIGTNSVGWAVITDEYKVPSKKFKVLGNTDRHSIKKNLIGALLFDSGETAEATRLKRTARRRYTRRKNRICYLQEIFSNEMAKVDDSFFHRLEESFLVEEDKKHERHPIFGNIVDEVAYHEKYPTIYHLRKKLVDSTDKADLRLIYLALAHMIKFRGHFLIEGDLNPDNSDVDKLFIQLVQTYNQLFEENPINASGVDAKAILSARLSKSRRLENLIAQLPGEKKNGLFGNLIALSLGLTPNFKSNFDLAEDAKLQLSKDTYDDDLDNLLAQIGDQYADLFLAAKNLSDAILLSDILRVNTEITKAPLSASMIKRYDEHHQDLTLLKALVRQQLPEKYKEIFFDQSKNGYAGYIDGGASQEEFYKFIKPILEKMDGTEELLVKLNREDLLRKQRTFDNGSIPHQIHLGELHAILRRQEDFYPFLKDNREKIEKILTFRIPYYVGPLARGNSRFAWMTRKSEETITPWNFEEVVDKGASAQSFIERMTNFDKNLPNEKVLPKHSLLYEYFTVYNELTKVKYVTEGMRKPAFLSGEQKKAIVDLLFKTNRKVTVKQLKEDYFKKIECFDSVEISGVEDRFNASLGTYHDLLKIIKDKDFLDNEENEDILEDIVLTLTLFEDREMIEERLKTYAHLFDDKVMKQLKRRRYTGWGRLSRKLINGIRDKQSGKTILDFLKSDGFANRNFMQLIHDDSLTFKEDIQKAQVSGQGDSLHEHIANLAGSPAIKKGILQTVKVVDELVKVMGRHKPENIVIEMARENQTTQKGQKNSRERMKRIEEGIKELGSQILKEHPVENTQLQNEKLYLYYLQNGRDMYVDQELDINRLSDYDVDHIVPQSFLKDDSIDNKVLTRSDKARGKSDNVPSEEVVKKMKNYWRQLLNAKLITQRKFDNLTKAERGGLSELDKAGFIKRQLVETRQITKHVAQILDSRMNTKYDENDKLIREVKVITLKSKLVSDFRKDFQFYKVREINNYHHAHDAYLNAVVGTALIKKYPKLESEFVYGDYKVYDVRKMIAKSEQEIGKATAKYFFYSNIMNFFKTEITLANGEIRKRPLIETNGETGEIVWDKGRDFATVRKVLSMPQVNIVKKTEVQTGGFSKESILPKRNSDKLIARKKDWDPKKYGGFDSPTVAYSVLVVAKVEKGKSKKLKSVKELLGITIMERSSFEKNPIDFLEAKGYKEVKKDLIIKLPKYSLFELENGRKRMLASAGELQKGNELALPSKYVNFLYLASHYEKLKGSPEDNEQKQLFVEQHKHYLDEIIEQISEFSKRVILADANLDKVLSAYNKHRDKPIREQAENIIHLFTLTNLGAPAAFKYFDTTIDRKRYTSTKEVLDATLIHQSITGLYETRIDLSQLGGDGGGGGPAPGSSGGTLNIEDEYRLHETSKEPDVSLGSTWLSDFPQAWAETGGMGLAVRQAPLIIPLKATSTPVSIKQYPMSQEARLGIKPHIQRLLDQGILVPCQSPWNTPLLPVKKPGTNDYRPVQDLREVNKRVEDIHPTVPNPYNLLSGLPPSHQWYTVLDLKDAFFCLRLHPTSQPLFAFEWRDPEMGISGQLTWTRLPQGFKNSPTLFNEALHRDLADFRIQHPDLILLQYVDDLLLAATSELDCQQGTRALLQTLGNLGYRASAKKAQICQKQVKYLGYLLKEGQRWLTEARKETVMGQPTPKTPRQLREFLGKAGFCRLFIPGFAEMAAPLYPLTKPGTLFNWGPDQQKAYQEIKQALLTAPALGLPDLTKPFELFVDEKQGYAKGVLTQKLGPWRRPVAYLSKKLDPVAAGWPPCLRMVAAIAVLTKDAGKLTMGQPLVILAPHAVEALVKQPPDRWLSNARMTHYQALLLDTDRVQFGPVVALNPATLLPLPEEGLQHNCLDILAEAHGTRPDLTDQPLPDADHTWYTDGSSLLQEGQRKAGAAVTTETEVIWAKALPAGTSAQRAELIALTQALKMAEGKKLNVYTDSRYAFATAHIHGEIYRRRGWLTSEGKEIKNKDEILALLKALFLPKRLSIIHCPGHQKGHSAEARGNRMADQAARKAAITETPDTSTLLIENSSPSGGSKRTADGSEFEAGKRTADGSEFEKRTADGSEFESPKKKAKVE

SEQ ID NO: 2699 - protein, 2114 aa, synthetic construct
MPAAKRVKLDGGDKKYSIGLDIGTNSVGWAVITDEYKVPSKKFKVLGNTDRHSIKKNLIGALLFDSGETAEATRLKRTARRRYTRRKNRICYLQEIFSNEMAKVDDSFFHRLEESFLVEEDKKHERHPIFGNIVDEVAYHEKYPTIYHLRKKLVDSTDKADLRLIYLALAHMIKFRGHFLIEGDLNPDNSDVDKLFIQLVQTYNQLFEENPINASGVDAKAILSARLSKSRRLENLIAQLPGEKKNGLFGNLIALSLGLTPNFKSNFDLAEDAKLQLSKDTYDDDLDNLLAQIGDQYADLFLAAKNLSDAILLSDILRVNTEITKAPLSASMIKRYDEHHQDLTLLKALVRQQLPEKYKEIFFDQSKNGYAGYIDGGASQEEFYKFIKPILEKMDGTEELLVKLNREDLLRKQRTFDNGSIPHQIHLGELHAILRRQEDFYPFLKDNREKIEKILTFRIPYYVGPLARGNSRFAWMTRKSEETITPWNFEEVVDKGASAQSFIERMTNFDKNLPNEKVLPKHSLLYEYFTVYNELTKVKYVTEGMRKPAFLSGEQKKAIVDLLFKTNRKVTVKQLKEDYFKKIECFDSVEISGVEDRFNASLGTYHDLLKIIKDKDFLDNEENEDILEDIVLTLTLFEDREMIEERLKTYAHLFDDKVMKQLKRRRYTGWGRLSRKLINGIRDKQSGKTILDFLKSDGFANRNFMQLIHDDSLTFKEDIQKAQVSGQGDSLHEHIANLAGSPAIKKGILQTVKVVDELVKVMGRHKPENIVIEMARENQTTQKGQKNSRERMKRIEEGIKELGSQILKEHPVENTQLQNEKLYLYYLQNGRDMYVDQELDINRLSDYDVDHIVPQSFLKDDSIDNKVLTRSDKARGKSDNVPSEEVVKKMKNYWRQLLNAKLITQRKFDNLTKAERGGLSELDKAGFIKRQLVETRQITKHVAQILDSRMNTKYDENDKLIREVKVITLKSKLVSDFRKDFQFYKVREINNYHHAHDAYLNAVVGTALIKKYPKLESEFVYGDYKVYDVRKMIAKSEQEIGKATAKYFFYSNIMNFFKTEITLANGEIRKRPLIETNGETGEIVWDKGRDFATVRKVLSMPQVNIVKKTEVQTGGFSKESILPKRNSDKLIARKKDWDPKKYGGFDSPTVAYSVLVVAKVEKGKSKKLKSVKELLGITIMERSSFEKNPIDFLEAKGYKEVKKDLIIKLPKYSLFELENGRKRMLASAGELQKGNELALPSKYVNFLYLASHYEKLKGSPEDNEQKQLFVEQHKHYLDEIIEQISEFSKRVILADANLDKVLSAYNKHRDKPIREQAENIIHLFTLTNLGAPAAFKYFDTTIDRKRYTSTKEVLDATLIHQSITGLYETRIDLSQLGGDGGGSSGGSPAPGGTLNIEDEYRLHETSKEPDVSLGSTWLSDFPQAWAETGGMGLAVRQAPLIIPLKATSTPVSIKQYPMSQEARLGIKPHIQRLLDQGILVPCQSPWNTPLLPVKKPGTNDYRPVQDLREVNKRVEDIHPTVPNPYNLLSGLPPSHQWYTVLDLKDAFFCLRLHPTSQPLFAFEWRDPEMGISGQLTWTRLPQGFKNSPTLFNEALHRDLADFRIQHPDLILLQYVDDLLLAATSELDCQQGTRALLQTLGNLGYRASAKKAQICQKQVKYLGYLLKEGQRWLTEARKETVMGQPTPKTPRQLREFLGKAGFCRLFIPGFAEMAAPLYPLTKPGTLFNWGPDQQKAYQEIKQALLTAPALGLPDLTKPFELFVDEKQGYAKGVLTQKLGPWRRPVAYLSKKLDPVAAGWPPCLRMVAAIAVLTKDAGKLTMGQPLVILAPHAVEALVKQPPDRWLSNARMTHYQALLLDTDRVQFGPVVALNPATLLPLPEEGLQHNCLDILAEAHGTRPDLTDQPLPDADHTWYTDGSSLLQEGQRKAGAAVTTETEVIWAKALPAGTSAQRAELIALTQALKMAEGKKLNVYTDSRYAFATAHIHGEIYRRRGWLTSEGKEIKNKDEILALLKALFLPKRLSIIHCPGHQKGHSAEARGNRMADQAARKAAITETPDTSTLLIENSSPSGGSKRTADGSEFEAGKRTADGSEFEKRTADGSEFESPKKKAKVE

SEQ ID NO: 2700 - protein, 2113 aa, synthetic construct
MPAAKRVKLDGGDKKYSIGLDIGTNSVGWAVITDEYKVPSKKFKVLGNTDRHSIKKNLIGALLFDSGETAEATRLKRTARRRYTRRKNRICYLQEIFSNEMAKVDDSFFHRLEESFLVEEDKKHERHPIFGNIVDEVAYHEKYPTIYHLRKKLVDSTDKADLRLIYLALAHMIKFRGHFLIEGDLNPDNSDVDKLFIQLVQTYNQLFEENPINASGVDAKAILSARLSKSRRLENLIAQLPGEKKNGLFGNLIALSLGLTPNFKSNFDLAEDAKLQLSKDTYDDDLDNLLAQIGDQYADLFLAAKNLSDAILLSDILRVNTEITKAPLSASMIKRYDEHHQDLTLLKALVRQQLPEKYKEIFFDQSKNGYAGYIDGGASQEEFYKFIKPILEKMDGTEELLVKLNREDLLRKQRTFDNGSIPHQIHLGELHAILRRQEDFYPFLKDNREKIEKILTFRIPYYVGPLARGNSRFAWMTRKSEETITPWNFEEVVDKGASAQSFIERMTNFDKNLPNEKVLPKHSLLYEYFTVYNELTKVKYVTEGMRKPAFLSGEQKKAIVDLLFKTNRKVTVKQLKEDYFKKIECFDSVEISGVEDRFNASLGTYHDLLKIIKDKDFLDNEENEDILEDIVLTLTLFEDREMIEERLKTYAHLFDDKVMKQLKRRRYTGWGRLSRKLINGIRDKQSGKTILDFLKSDGFANRNFMQLIHDDSLTFKEDIQKAQVSGQGDSLHEHIANLAGSPAIKKGILQTVKVVDELVKVMGRHKPENIVIEMARENQTTQKGQKNSRERMKRIEEGIKELGSQILKEHPVENTQLQNEKLYLYYLQNGRDMYVDQELDINRLSDYDVDHIVPQSFLKDDSIDNKVLTRSDKARGKSDNVPSEEVVKKMKNYWRQLLNAKLITQRKFDNLTKAERGGLSELDKAGFIKRQLVETRQITKHVAQILDSRMNTKYDENDKLIREVKVITLKSKLVSDFRKDFQFYKVREINNYHHAHDAYLNAVVGTALIKKYPKLESEFVYGDYKVYDVRKMIAKSEQEIGKATAKYFFYSNIMNFFKTEITLANGEIRKRPLIETNGETGEIVWDKGRDFATVRKVLSMPQVNIVKKTEVQTGGFSKESILPKRNSDKLIARKKDWDPKKYGGFDSPTVAYSVLVVAKVEKGKSKKLKSVKELLGITIMERSSFEKNPIDFLEAKGYKEVKKDLIIKLPKYSLFELENGRKRMLASAGELQKGNELALPSKYVNFLYLASHYEKLKGSPEDNEQKQLFVEQHKHYLDEIIEQISEFSKRVILADANLDKVLSAYNKHRDKPIREQAENIIHLFTLTNLGAPAAFKYFDTTIDRKRYTSTKEVLDATLIHQSITGLYETRIDLSQLGGDGGGGSEAAAKGGTLNIEDEYRLHETSKEPDVSLGSTWLSDFPQAWAETGGMGLAVRQAPLIIPLKATSTPVSIKQYPMSQEARLGIKPHIQRLLDQGILVPCQSPWNTPLLPVKKPGTNDYRPVQDLREVNKRVEDIHPTVPNPYNLLSGLPPSHQWYTVLDLKDAFFCLRLHPTSQPLFAFEWRDPEMGISGQLTWTRLPQGFKNSPTLFNEALHRDLADFRIQHPDLILLQYVDDLLLAATSELDCQQGTRALLQTLGNLGYRASAKKAQICQKQVKYLGYLLKEGQRWLTEARKETVMGQPTPKTPRQLREFLGKAGFCRLFIPGFAEMAAPLYPLTKPGTLFNWGPDQQKAYQEIKQALLTAPALGLPDLTKPFELFVDEKQGYAKGVLTQKLGPWRRPVAYLSKKLDPVAAGWPPCLRMVAAIAVLTKDAGKLTMGQPLVILAPHAVEALVKQPPDRWLSNARMTHYQALLLDTDRVQFGPVVALNPATLLPLPEEGLQHNCLDILAEAHGTRPDLTDQPLPDADHTWYTDGSSLLQEGQRKAGAAVTTETEVIWAKALPAGTSAQRAELIALTQALKMAEGKKLNVYTDSRYAFATAHIHGEIYRRRGWLTSEGKEIKNKDEILALLKALFLPKRLSIIHCPGHQKGHSAEARGNRMADQAARKAAITETPDTSTLLIENSSPSGGSKRTADGSEFEAGKRTADGSEFEKRTADGSEFESPKKKAKVE

SEQ ID NO: 2701 - protein, 2116 aa, synthetic construct
MPAAKRVKLDGGDKKYSIGLDIGTNSVGWAVITDEYKVPSKKFKVLGNTDRHSIKKNLIGALLFDSGETAEATRLKRTARRRYTRRKNRICYLQEIFSNEMAKVDDSFFHRLEESFLVEEDKKHERHPIFGNIVDEVAYHEKYPTIYHLRKKLVDSTDKADLRLIYLALAHMIKFRGHFLIEGDLNPDNSDVDKLFIQLVQTYNQLFEENPINASGVDAKAILSARLSKSRRLENLIAQLPGEKKNGLFGNLIALSLGLTPNFKSNFDLAEDAKLQLSKDTYDDDLDNLLAQIGDQYADLFLAAKNLSDAILLSDILRVNTEITKAPLSASMIKRYDEHHQDLTLLKALVRQQLPEKYKEIFFDQSKNGYAGYIDGGASQEEFYKFIKPILEKMDGTEELLVKLNREDLLRKQRTFDNGSIPHQIHLGELHAILRRQEDFYPFLKDNREKIEKILTFRIPYYVGPLARGNSRFAWMTRKSEETITPWNFEEVVDKGASAQSFIERMTNFDKNLPNEKVLPKHSLLYEYFTVYNELTKVKYVTEGMRKPAFLSGEQKKAIVDLLFKTNRKVTVKQLKEDYFKKIECFDSVEISGVEDRFNASLGTYHDLLKIIKDKDFLDNEENEDILEDIVLTLTLFEDREMIEERLKTYAHLFDDKVMKQLKRRRYTGWGRLSRKLINGIRDKQSGKTILDFLKSDGFANRNFMQLIHDDSLTFKEDIQKAQVSGQGDSLHEHIANLAGSPAIKKGILQTVKVVDELVKVMGRHKPENIVIEMARENQTTQKGQKNSRERMKRIEEGIKELGSQILKEHPVENTQLQNEKLYLYYLQNGRDMYVDQELDINRLSDYDVDHIVPQSFLKDDSIDNKVLTRSDKARGKSDNVPSEEVVKKMKNYWRQLLNAKLITQRKFDNLTKAERGGLSELDKAGFIKRQLVETRQITKHVAQILDSRMNTKYDENDKLIREVKVITLKSKLVSDFRKDFQFYKVREINNYHHAHDAYLNAVVGTALIKKYPKLESEFVYGDYKVYDVRKMIAKSEQEIGKATAKYFFYSNIMNFFKTEITLANGEIRKRPLIETNGETGEIVWDKGRDFATVRKVLSMPQVNIVKKTEVQTGGFSKESILPKRNSDKLIARKKDWDPKKYGGFDSPTVAYSVLVVAKVEKGKSKKLKSVKELLGITIMERSSFEKNPIDFLEAKGYKEVKKDLIIKLPKYSLFELENGRKRMLASAGELQKGNELALPSKYVNFLYLASHYEKLKGSPEDNEQKQLFVEQHKHYLDEIIEQISEFSKRVILADANLDKVLSAYNKHRDKPIREQAENIIHLFTLTNLGAPAAFKYFDTTIDRKRYTSTKEVLDATLIHQSITGLYETRIDLSQLGGDGGGGSPAPEAAAKGGTLNIEDEYRLHETSKEPDVSLGSTWLSDFPQAWAETGGMGLAVRQAPLIIPLKATSTPVSIKQYPMSQEARLGIKPHIQRLLDQGILVPCQSPWNTPLLPVKKPGTNDYRPVQDLREVNKRVEDIHPTVPNPYNLLSGLPPSHQWYTVLDLKDAFFCLRLHPTSQPLFAFEWRDPEMGISGQLTWTRLPQGFKNSPTLFNEALHRDLADFRIQHPDLILLQYVDDLLLAATSELDCQQGTRALLQTLGNLGYRASAKKAQICQKQVKYLGYLLKEGQRWLTEARKETVMGQPTPKTPRQLREFLGKAGFCRLFIPGFAEMAAPLYPLTKPGTLFNWGPDQQKAYQEIKQALLTAPALGLPDLTKPFELFVDEKQGYAKGVLTQKLGPWRRPVAYLSKKLDPVAAGWPPCLRMVAAIAVLTKDAGKLTMGQPLVILAPHAVEALVKQPPDRWLSNARMTHYQALLLDTDRVQFGPVVALNPATLLPLPEEGLQHNCLDILAEAHGTRPDLTDQPLPDADHTWYTDGSSLLQEGQRKAGAAVTTETEVIWAKALPAGTSAQRAELIALTQALKMAEGKKLNVYTDSRYAFATAHIHGEIYRRRGWLTSEGKEIKNKDEILALLKALFLPKRLSIIHCPGHQKGHSAEARGNRMADQAARKAAITETPDTSTLLIENSSPSGGSKRTADGSEFEAGKRTADGSEFEKRTADGSEFESPKKKAKVE

SEQ ID NO: 2702 - protein, 2114 aa, synthetic construct
MPAAKRVKLDGGDKKYSIGLDIGTNSVGWAVITDEYKVPSKKFKVLGNTDRHSIKKNLIGALLFDSGETAEATRLKRTARRRYTRRKNRICYLQEIFSNEMAKVDDSFFHRLEESFLVEEDKKHERHPIFGNIVDEVAYHEKYPTIYHLRKKLVDSTDKADLRLIYLALAHMIKFRGHFLIEGDLNPDNSDVDKLFIQLVQTYNQLFEENPINASGVDAKAILSARLSKSRRLENLIAQLPGEKKNGLFGNLIALSLGLTPNFKSNFDLAEDAKLQLSKDTYDDDLDNLLAQIGDQYADLFLAAKNLSDAILLSDILRVNTEITKAPLSASMIKRYDEHHQDLTLLKALVRQQLPEKYKEIFFDQSKNGYAGYIDGGASQEEFYKFIKPILEKMDGTEELLVKLNREDLLRKQRTFDNGSIPHQIHLGELHAILRRQEDFYPFLKDNREKIEKILTFRIPYYVGPLARGNSRFAWMTRKSEETITPWNFEEVVDKGASAQSFIERMTNFDKNLPNEKVLPKHSLLYEYFTVYNELTKVKYVTEGMRKPAFLSGEQKKAIVDLLFKTNRKVTVKQLKEDYFKKIECFDSVEISGVEDRFNASLGTYHDLLKIIKDKDFLDNEENEDILEDIVLTLTLFEDREMIEERLKTYAHLFDDKVMKQLKRRRYTGWGRLSRKLINGIRDKQSGKTILDFLKSDGFANRNFMQLIHDDSLTFKEDIQKAQVSGQGDSLHEHIANLAGSPAIKKGILQTVKVVDELVKVMGRHKPENIVIEMARENQTTQKGQKNSRERMKRIEEGIKELGSQILKEHPVENTQLQNEKLYLYYLQNGRDMYVDQELDINRLSDYDVDHIVPQSFLKDDSIDNKVLTRSDKARGKSDNVPSEEVVKKMKNYWRQLLNAKLITQRKFDNLTKAERGGLSELDKAGFIKRQLVETRQITKHVAQILDSRMNTKYDENDKLIREVKVITLKSKLVSDFRKDFQFYKVREINNYHHAHDAYLNAVVGTALIKKYPKLESEFVYGDYKVYDVRKMIAKSEQEIGKATAKYFFYSNIMNFFKTEITLANGEIRKRPLIETNGETGEIVWDKGRDFATVRKVLSMPQVNIVKKTEVQTGGFSKESILPKRNSDKLIARKKDWDPKKYGGFDSPTVAYSVLVVAKVEKGKSKKLKSVKELLGITIMERSSFEKNPIDFLEAKGYKEVKKDLIIKLPKYSLFELENGRKRMLASAGELQKGNELALPSKYVNFLYLASHYEKLKGSPEDNEQKQLFVEQHKHYLDEIIEQISEFSKRVILADANLDKVLSAYNKHRDKPIREQAENIIHLFTLTNLGAPAAFKYFDTTIDRKRYTSTKEVLDATLIHQSITGLYETRIDLSQLGGDGGGGSGGGGSSGGTLNIEDEYRLHETSKEPDVSLGSTWLSDFPQAWAETGGMGLAVRQAPLIIPLKATSTPVSIKQYPMSQEARLGIKPHIQRLLDQGILVPCQSPWNTPLLPVKKPGTNDYRPVQDLREVNKRVEDIHPTVPNPYNLLSGLPPSHQWYTVLDLKDAFFCLRLHPTSQPLFAFEWRDPEMGISGQLTWTRLPQGFKNSPTLFNEALHRDLADFRIQHPDLILLQYVDDLLLAATSELDCQQGTRALLQTLGNLGYRASAKKAQICQKQVKYLGYLLKEGQRWLTEARKETVMGQPTPKTPRQLREFLGKAGFCRLFIPGFAEMAAPLYPLTKPGTLFNWGPDQQKAYQEIKQALLTAPALGLPDLTKPFELFVDEKQGYAKGVLTQKLGPWRRPVAYLSKKLDPVAAGWPPCLRMVAAIAVLTKDAGKLTMGQPLVILAPHAVEALVKQPPDRWLSNARMTHYQALLLDTDRVQFGPVVALNPATLLPLPEEGLQHNCLDILAEAHGTRPDLTDQPLPDADHTWYTDGSSLLQEGQRKAGAAVTTETEVIWAKALPAGTSAQRAELIALTQALKMAEGKKLNVYTDSRYAFATAHIHGEIYRRRGWLTSEGKEIKNKDEILALLKALFLPKRLSIIHCPGHQKGHSAEARGNRMADQAARKAAITETPDTSTLLIENSSPSGGSKRTADGSEFEAGKRTADGSEFEKRTADGSEFESPKKKAKVE

SEQ ID NO: 2703 - protein, 2116 aa, synthetic construct
MPAAKRVKLDGGDKKYSIGLDIGTNSVGWAVITDEYKVPSKKFKVLGNTDRHSIKKNLIGALLFDSGETAEATRLKRTARRRYTRRKNRICYLQEIFSNEMAKVDDSFFHRLEESFLVEEDKKHERHPIFGNIVDEVAYHEKYPTIYHLRKKLVDSTDKADLRLIYLALAHMIKFRGHFLIEGDLNPDNSDVDKLFIQLVQTYNQLFEENPINASGVDAKAILSARLSKSRRLENLIAQLPGEKKNGLFGNLIALSLGLTPNFKSNFDLAEDAKLQLSKDTYDDDLDNLLAQIGDQYADLFLAAKNLSDAILLSDILRVNTEITKAPLSASMIKRYDEHHQDLTLLKALVRQQLPEKYKEIFFDQSKNGYAGYIDGGASQEEFYKFIKPILEKMDGTEELLVKLNREDLLRKQRTFDNGSIPHQIHLGELHAILRRQEDFYPFLKDNREKIEKILTFRIPYYVGPLARGNSRFAWMTRKSEETITPWNFEEVVDKGASAQSFIERMTNFDKNLPNEKVLPKHSLLYEYFTVYNELTKVKYVTEGMRKPAFLSGEQKKAIVDLLFKTNRKVTVKQLKEDYFKKIECFDSVEISGVEDRFNASLGTYHDLLKIIKDKDFLDNEENEDILEDIVLTLTLFEDREMIEERLKTYAHLFDDKVMKQLKRRRYTGWGRLSRKLINGIRDKQSGKTILDFLKSDGFANRNFMQLIHDDSLTFKEDIQKAQVSGQGDSLHEHIANLAGSPAIKKGILQTVKVVDELVKVMGRHKPENIVIEMARENQTTQKGQKNSRERMKRIEEGIKELGSQILKEHPVENTQLQNEKLYLYYLQNGRDMYVDQELDINRLSDYDVDHIVPQSFLKDDSIDNKVLTRSDKARGKSDNVPSEEVVKKMKNYWRQLLNAKLITQRKFDNLTKAERGGLSELDKAGFIKRQLVETRQITKHVAQILDSRMNTKYDENDKLIREVKVITLKSKLVSDFRKDFQFYKVREINNYHHAHDAYLNAVVGTALIKKYPKLESEFVYGDYKVYDVRKMIAKSEQEIGKATAKYFFYSNIMNFFKTEITLANGEIRKRPLIETNGETGEIVWDKGRDFATVRKVLSMPQVNIVKKTEVQTGGFSKESILPKRNSDKLIARKKDWDPKKYGGFDSPTVAYSVLVVAKVEKGKSKKLKSVKELLGITIMERSSFEKNPIDFLEAKGYKEVKKDLIIKLPKYSLFELENGRKRMLASAGELQKGNELALPSKYVNFLYLASHYEKLKGSPEDNEQKQLFVEQHKHYLDEIIEQISEFSKRVILADANLDKVLSAYNKHRDKPIREQAENIIHLFTLTNLGAPAAFKYFDTTIDRKRYTSTKEVLDATLIHQSITGLYETRIDLSQLGGDGGGSSEAAAKGGSGGTLNIEDEYRLHETSKEPDVSLGSTWLSDFPQAWAETGGMGLAVRQAPLIIPLKATSTPVSIKQYPMSQEARLGIKPHIQRLLDQGILVPCQSPWNTPLLPVKKPGTNDYRPVQDLREVNKRVEDIHPTVPNPYNLLSGLPPSHQWYTVLDLKDAFFCLRLHPTSQPLFAFEWRDPEMGISGQLTWTRLPQGFKNSPTLFNEALHRDLADFRIQHPDLILLQYVDDLLLAATSELDCQQGTRALLQTLGNLGYRASAKKAQICQKQVKYLGYLLKEGQRWLTEARKETVMGQPTPKTPRQLREFLGKAGFCRLFIPGFAEMAAPLYPLTKPGTLFNWGPDQQKAYQEIKQALLTAPALGLPDLTKPFELFVDEKQGYAKGVLTQKLGPWRRPVAYLSKKLDPVAAGWPPCLRMVAAIAVLTKDAGKLTMGQPLVILAPHAVEALVKQPPDRWLSNARMTHYQALLLDTDRVQFGPVVALNPATLLPLPEEGLQHNCLDILAEAHGTRPDLTDQPLPDADHTWYTDGSSLLQEGQRKAGAAVTTETEVIWAKALPAGTSAQRAELIALTQALKMAEGKKLNVYTDSRYAFATAHIHGEIYRRRGWLTSEGKEIKNKDEILALLKALFLPKRLSIIHCPGHQKGHSAEARGNRMADQAARKAAITETPDTSTLLIENSSPSGGSKRTADGSEFEAGKRTADGSEFEKRTADGSEFESPKKKAKVE

SEQ ID NO: 2704 - protein, 2094 aa, synthetic construct
MPAAKRVKLDGGDKKYSIGLDIGTNSVGWAVITDEYKVPSKKFKVLGNTDRHSIKKNLIGALLFDSGETAEATRLKRTARRRYTRRKNRICYLQEIFSNEMAKVDDSFFHRLEESFLVEEDKKHERHPIFGNIVDEVAYHEKYPTIYHLRKKLVDSTDKADLRLIYLALAHMIKFRGHFLIEGDLNPDNSDVDKLFIQLVQTYNQLFEENPINASGVDAKAILSARLSKSRRLENLIAQLPGEKKNGLFGNLIALSLGLTPNFKSNFDLAEDAKLQLSKDTYDDDLDNLLAQIGDQYADLFLAAKNLSDAILLSDILRVNTEITKAPLSASMIKRYDEHHQDLTLLKALVRQQLPEKYKEIFFDQSKNGYAGYIDGGASQEEFYKFIKPILEKMDGTEELLVKLNREDLLRKQRTFDNGSIPHQIHLGELHAILRRQEDFYPFLKDNREKIEKILTFRIPYYVGPLARGNSRFAWMTRKSEETITPWNFEEVVDKGASAQSFIERMTNFDKNLPNEKVLPKHSLLYEYFTVYNELTKVKYVTEGMRKPAFLSGEQKKAIVDLLFKTNRKVTVKQLKEDYFKKIECFDSVEISGVEDRFNASLGTYHDLLKIIKDKDFLDNEENEDILEDIVLTLTLFEDREMIEERLKTYAHLFDDKVMKQLKRRRYTGWGRLSRKLINGIRDKQSGKTILDFLKSDGFANRNFMQLIHDDSLTFKEDIQKAQVSGQGDSLHEHIANLAGSPAIKKGILQTVKVVDELVKVMGRHKPENIVIEMARENQTTQKGQKNSRERMKRIEEGIKELGSQILKEHPVENTQLQNEKLYLYYLQNGRDMYVDQELDINRLSDYDVDHIVPQSFLKDDSIDNKVLTRSDKARGKSDNVPSEEVVKKMKNYWRQLLNAKLITQRKFDNLTKAERGGLSELDKAGFIKRQLVETRQITKHVAQILDSRMNTKYDENDKLIREVKVITLKSKLVSDFRKDFQFYKVREINNYHHAHDAYLNAVVGTALIKKYPKLESEFVYGDYKVYDVRKMIAKSEQEIGKATAKYFFYSNIMNFFKTEITLANGEIRKRPLIETNGETGEIVWDKGRDFATVRKVLSMPQVNIVKKTEVQTGGFSKESILPKRNSDKLIARKKDWDPKKYGGFDSPTVAYSVLVVAKVEKGKSKKLKSVKELLGITIMERSSFEKNPIDFLEAKGYKEVKKDLIIKLPKYSLFELENGRKRMLASAGELQKGNELALPSKYVNFLYLASHYEKLKGSPEDNEQKQLFVEQHKHYLDEIIEQISEFSKRVILADANLDKVLSAYNKHRDKPIREQAENIIHLFTLTNLGAPAAFKYFDTTIDRKRYTSTKEVLDATLIHQSITGLYETRIDLSQLGGDGGGGSPAPGSSGGTLNIEDEHRLHETSKEPDVSLGSTWLSDFPQAWAETGGMGLAVRQAPLIIPLKATSTPVSIKQYPMSQEARLGIKPHIQRLLDQGILVPCQSPWNTPLLPVKKPGTNDYRPVQDLREVNKRVEDIHPTVPNPYNLLSGLPPSHQWYTVLDLKDAFFCLRLHPTSQPLFAFEWRDPEMGISGQLTWTRLPQGFKNSPTLFDEALHRDLADFRIQHPDLILLQYVDDLLLAATSELDCQQGTRALLQTLGNLGYRASAKKAQICQKQVKYLGYLLKEGQRWLTEARKETVMGQPTPKTPRQLREFLGTAGFCRLWIPGFAEMAAPLYPLTKTGTLFNWGPDQQKAYQEIKQALLTAPALGLPDLTKPFELFVDEKQGYAKGVLTQKLGPWRRPVAYLSKKLDPVAAGWPPCLRMVAAIAVLTKDAGKLTMGQPLVILAPHAVEALVKQPPDRWLSNARMTHYQALLLDTDRVQFGPVVALNPATLLPLPEEGLQHNCLDILAEAHGTRPDLTDQPLPDADHTWYTDGSSLLQEGQRKAGAAVTTETEVIWAKALPAGTSAQRAELIALTQALKMAEGKKLNVYTDSRYAFATAHIHGEIYRRRGLLTSEGKEIKNKDEILALLKALFLPKRLSIIHCPGHQKGHSAEARGNRMADQAARKAAITETPDTSTLLAGKRTADGSEFEKRTADGSEFESPKKKAKVE

SEQ ID NO: 2705 - protein, 2096 aa, synthetic construct
MPAAKRVKLDGGDKKYSIGLDIGTNSVGWAVITDEYKVPSKKFKVLGNTDRHSIKKNLIGALLFDSGETAEATRLKRTARRRYTRRKNRICYLQEIFSNEMAKVDDSFFHRLEESFLVEEDKKHERHPIFGNIVDEVAYHEKYPTIYHLRKKLVDSTDKADLRLIYLALAHMIKFRGHFLIEGDLNPDNSDVDKLFIQLVQTYNQLFEENPINASGVDAKAILSARLSKSRRLENLIAQLPGEKKNGLFGNLIALSLGLTPNFKSNFDLAEDAKLQLSKDTYDDDLDNLLAQIGDQYADLFLAAKNLSDAILLSDILRVNTEITKAPLSASMIKRYDEHHQDLTLLKALVRQQLPEKYKEIFFDQSKNGYAGYIDGGASQEEFYKFIKPILEKMDGTEELLVKLNREDLLRKQRTFDNGSIPHQIHLGELHAILRRQEDFYPFLKDNREKIEKILTFRIPYYVGPLARGNSRFAWMTRKSEETITPWNFEEVVDKGASAQSFIERMTNFDKNLPNEKVLPKHSLLYEYFTVYNELTKVKYVTEGMRKPAFLSGEQKKAIVDLLFKTNRKVTVKQLKEDYFKKIECFDSVEISGVEDRFNASLGTYHDLLKIIKDKDFLDNEENEDILEDIVLTLTLFEDREMIEERLKTYAHLFDDKVMKQLKRRRYTGWGRLSRKLINGIRDKQSGKTILDFLKSDGFANRNFMQLIHDDSLTFKEDIQKAQVSGQGDSLHEHIANLAGSPAIKKGILQTVKVVDELVKVMGRHKPENIVIEMARENQTTQKGQKNSRERMKRIEEGIKELGSQILKEHPVENTQLQNEKLYLYYLQNGRDMYVDQELDINRLSDYDVDHIVPQSFLKDDSIDNKVLTRSDKARGKSDNVPSEEVVKKMKNYWRQLLNAKLITQRKFDNLTKAERGGLSELDKAGFIKRQLVETRQITKHVAQILDSRMNTKYDENDKLIREVKVITLKSKLVSDFRKDFQFYKVREINNYHHAHDAYLNAVVGTALIKKYPKLESEFVYGDYKVYDVRKMIAKSEQEIGKATAKYFFYSNIMNFFKTEITLANGEIRKRPLIETNGETGEIVWDKGRDFATVRKVLSMPQVNIVKKTEVQTGGFSKESILPKRNSDKLIARKKDWDPKKYGGFDSPTVAYSVLVVAKVEKGKSKKLKSVKELLGITIMERSSFEKNPIDFLEAKGYKEVKKDLIIKLPKYSLFELENGRKRMLASAGELQKGNELALPSKYVNFLYLASHYEKLKGSPEDNEQKQLFVEQHKHYLDEIIEQISEFSKRVILADANLDKVLSAYNKHRDKPIREQAENIIHLFTLTNLGAPAAFKYFDTTIDRKRYTSTKEVLDATLIHQSITGLYETRIDLSQLGGDGGEAAAKGSSGGGGGTLNIEDEHRLHETSKEPDVSLGSTWLSDFPQAWAETGGMGLAVRQAPLIIPLKATSTPVSIKQYPMSQEARLGIKPHIQRLLDQGILVPCQSPWNTPLLPVKKPGTNDYRPVQDLREVNKRVEDIHPTVPNPYNLLSGLPPSHQWYTVLDLKDAFFCLRLHPTSQPLFAFEWRDPEMGISGQLTWTRLPQGFKNSPTLFDEALHRDLADFRIQHPDLILLQYVDDLLLAATSELDCQQGTRALLQTLGNLGYRASAKKAQICQKQVKYLGYLLKEGQRWLTEARKETVMGQPTPKTPRQLREFLGTAGFCRLWIPGFAEMAAPLYPLTKTGTLFNWGPDQQKAYQEIKQALLTAPALGLPDLTKPFELFVDEKQGYAKGVLTQKLGPWRRPVAYLSKKLDPVAAGWPPCLRMVAAIAVLTKDAGKLTMGQPLVILAPHAVEALVKQPPDRWLSNARMTHYQALLLDTDRVQFGPVVALNPATLLPLPEEGLQHNCLDILAEAHGTRPDLTDQPLPDADHTWYTDGSSLLQEGQRKAGAAVTTETEVIWAKALPAGTSAQRAELIALTQALKMAEGKKLNVYTDSRYAFATAHIHGEIYRRRGLLTSEGKEIKNKDEILALLKALFLPKRLSIIHCPGHQKGHSAEARGNRMADQAARKAAITETPDTSTLLAGKRTADGSEFEKRTADGSEFESPKKKAKVE

SEQ ID NO: 2706 - protein, 2096 aa, synthetic construct
MPAAKRVKLDGGDKKYSIGLDIGTNSVGWAVITDEYKVPSKKFKVLGNTDRHSIKKNLIGALLFDSGETAEATRLKRTARRRYTRRKNRICYLQEIFSNEMAKVDDSFFHRLEESFLVEEDKKHERHPIFGNIVDEVAYHEKYPTIYHLRKKLVDSTDKADLRLIYLALAHMIKFRGHFLIEGDLNPDNSDVDKLFIQLVQTYNQLFEENPINASGVDAKAILSARLSKSRRLENLIAQLPGEKKNGLFGNLIALSLGLTPNFKSNFDLAEDAKLQLSKDTYDDDLDNLLAQIGDQYADLFLAAKNLSDAILLSDILRVNTEITKAPLSASMIKRYDEHHQDLTLLKALVRQQLPEKYKEIFFDQSKNGYAGYIDGGASQEEFYKFIKPILEKMDGTEELLVKLNREDLLRKQRTFDNGSIPHQIHLGELHAILRRQEDFYPFLKDNREKIEKILTFRIPYYVGPLARGNSRFAWMTRKSEETITPWNFEEVVDKGASAQSFIERMTNFDKNLPNEKVLPKHSLLYEYFTVYNELTKVKYVTEGMRKPAFLSGEQKKAIVDLLFKTNRKVTVKQLKEDYFKKIECFDSVEISGVEDRFNASLGTYHDLLKIIKDKDFLDNEENEDILEDIVLTLTLFEDREMIEERLKTYAHLFDDKVMKQLKRRRYTGWGRLSRKLINGIRDKQSGKTILDFLKSDGFANRNFMQLIHDDSLTFKEDIQKAQVSGQGDSLHEHIANLAGSPAIKKGILQTVKVVDELVKVMGRHKPENIVIEMARENQTTQKGQKNSRERMKRIEEGIKELGSQILKEHPVENTQLQNEKLYLYYLQNGRDMYVDQELDINRLSDYDVDHIVPQSFLKDDSIDNKVLTRSDKARGKSDNVPSEEVVKKMKNYWRQLLNAKLITQRKFDNLTKAERGGLSELDKAGFIKRQLVETRQITKHVAQILDSRMNTKYDENDKLIREVKVITLKSKLVSDFRKDFQFYKVREINNYHHAHDAYLNAVVGTALIKKYPKLESEFVYGDYKVYDVRKMIAKSEQEIGKATAKYFFYSNIMNFFKTEITLANGEIRKRPLIETNGETGEIVWDKGRDFATVRKVLSMPQVNIVKKTEVQTGGFSKESILPKRNSDKLIARKKDWDPKKYGGFDSPTVAYSVLVVAKVEKGKSKKLKSVKELLGITIMERSSFEKNPIDFLEAKGYKEVKKDLIIKLPKYSLFELENGRKRMLASAGELQKGNELALPSKYVNFLYLASHYEKLKGSPEDNEQKQLFVEQHKHYLDEIIEQISEFSKRVILADANLDKVLSAYNKHRDKPIREQAENIIHLFTLTNLGAPAAFKYFDTTIDRKRYTSTKEVLDATLIHQSITGLYETRIDLSQLGGDGGGSSGGGEAAAKGGTLNIEDEHRLHETSKEPDVSLGSTWLSDFPQAWAETGGMGLAVRQAPLIIPLKATSTPVSIKQYPMSQEARLGIKPHIQRLLDQGILVPCQSPWNTPLLPVKKPGTNDYRPVQDLREVNKRVEDIHPTVPNPYNLLSGLPPSHQWYTVLDLKDAFFCLRLHPTSQPLFAFEWRDPEMGISGQLTWTRLPQGFKNSPTLFDEALHRDLADFRIQHPDLILLQYVDDLLLAATSELDCQQGTRALLQTLGNLGYRASAKKAQICQKQVKYLGYLLKEGQRWLTEARKETVMGQPTPKTPRQLREFLGTAGFCRLWIPGFAEMAAPLYPLTKTGTLFNWGPDQQKAYQEIKQALLTAPALGLPDLTKPFELFVDEKQGYAKGVLTQKLGPWRRPVAYLSKKLDPVAAGWPPCLRMVAAIAVLTKDAGKLTMGQPLVILAPHAVEALVKQPPDRWLSNARMTHYQALLLDTDRVQFGPVVALNPATLLPLPEEGLQHNCLDILAEAHGTRPDLTDQPLPDADHTWYTDGSSLLQEGQRKAGAAVTTETEVIWAKALPAGTSAQRAELIALTQALKMAEGKKLNVYTDSRYAFATAHIHGEIYRRRGLLTSEGKEIKNKDEILALLKALFLPKRLSIIHCPGHQKGHSAEARGNRMADQAARKAAITETPDTSTLLAGKRTADGSEFEKRTADGSEFESPKKKAKVE

SEQ ID NO: 2707 - protein, 2093 aa, synthetic construct
MPAAKRVKLDGGDKKYSIGLDIGTNSVGWAVITDEYKVPSKKFKVLGNTDRHSIKKNLIGALLFDSGETAEATRLKRTARRRYTRRKNRICYLQEIFSNEMAKVDDSFFHRLEESFLVEEDKKHERHPIFGNIVDEVAYHEKYPTIYHLRKKLVDSTDKADLRLIYLALAHMIKFRGHFLIEGDLNPDNSDVDKLFIQLVQTYNQLFEENPINASGVDAKAILSARLSKSRRLENLIAQLPGEKKNGLFGNLIALSLGLTPNFKSNFDLAEDAKLQLSKDTYDDDLDNLLAQIGDQYADLFLAAKNLSDAILLSDILRVNTEITKAPLSASMIKRYDEHHQDLTLLKALVRQQLPEKYKEIFFDQSKNGYAGYIDGGASQEEFYKFIKPILEKMDGTEELLVKLNREDLLRKQRTFDNGSIPHQIHLGELHAILRRQEDFYPFLKDNREKIEKILTFRIPYYVGPLARGNSRFAWMTRKSEETITPWNFEEVVDKGASAQSFIERMTNFDKNLPNEKVLPKHSLLYEYFTVYNELTKVKYVTEGMRKPAFLSGEQKKAIVDLLFKTNRKVTVKQLKEDYFKKIECFDSVEISGVEDRFNASLGTYHDLLKIIKDKDFLDNEENEDILEDIVLTLTLFEDREMIEERLKTYAHLFDDKVMKQLKRRRYTGWGRLSRKLINGIRDKQSGKTILDFLKSDGFANRNFMQLIHDDSLTFKEDIQKAQVSGQGDSLHEHIANLAGSPAIKKGILQTVKVVDELVKVMGRHKPENIVIEMARENQTTQKGQKNSRERMKRIEEGIKELGSQILKEHPVENTQLQNEKLYLYYLQNGRDMYVDQELDINRLSDYDVDHIVPQSFLKDDSIDNKVLTRSDKARGKSDNVPSEEVVKKMKNYWRQLLNAKLITQRKFDNLTKAERGGLSELDKAGFIKRQLVETRQITKHVAQILDSRMNTKYDENDKLIREVKVITLKSKLVSDFRKDFQFYKVREINNYHHAHDAYLNAVVGTALIKKYPKLESEFVYGDYKVYDVRKMIAKSEQEIGKATAKYFFYSNIMNFFKTEITLANGEIRKRPLIETNGETGEIVWDKGRDFATVRKVLSMPQVNIVKKTEVQTGGFSKESILPKRNSDKLIARKKDWDPKKYGGFDSPTVAYSVLVVAKVEKGKSKKLKSVKELLGITIMERSSFEKNPIDFLEAKGYKEVKKDLIIKLPKYSLFELENGRKRMLASAGELQKGNELALPSKYVNFLYLASHYEKLKGSPEDNEQKQLFVEQHKHYLDEIIEQISEFSKRVILADANLDKVLSAYNKHRDKPIREQAENIIHLFTLTNLGAPAAFKYFDTTIDRKRYTSTKEVLDATLIHQSITGLYETRIDLSQLGGDGGEAAAKGSSGGTLNIEDEHRLHETSKEPDVSLGSTWLSDFPQAWAETGGMGLAVRQAPLIIPLKATSTPVSIKQYPMSQEARLGIKPHIQRLLDQGILVPCQSPWNTPLLPVKKPGTNDYRPVQDLREVNKRVEDIHPTVPNPYNLLSGLPPSHQWYTVLDLKDAFFCLRLHPTSQPLFAFEWRDPEMGISGQLTWTRLPQGFKNSPTLFDEALHRDLADFRIQHPDLILLQYVDDLLLAATSELDCQQGTRALLQTLGNLGYRASAKKAQICQKQVKYLGYLLKEGQRWLTEARKETVMGQPTPKTPRQLREFLGTAGFCRLWIPGFAEMAAPLYPLTKTGTLFNWGPDQQKAYQEIKQALLTAPALGLPDLTKPFELFVDEKQGYAKGVLTQKLGPWRRPVAYLSKKLDPVAAGWPPCLRMVAAIAVLTKDAGKLTMGQPLVILAPHAVEALVKQPPDRWLSNARMTHYQALLLDTDRVQFGPVVALNPATLLPLPEEGLQHNCLDILAEAHGTRPDLTDQPLPDADHTWYTDGSSLLQEGQRKAGAAVTTETEVIWAKALPAGTSAQRAELIALTQALKMAEGKKLNVYTDSRYAFATAHIHGEIYRRRGLLTSEGKEIKNKDEILALLKALFLPKRLSIIHCPGHQKGHSAEARGNRMADQAARKAAITETPDTSTLLAGKRTADGSEFEKRTADGSEFESPKKKAKVE

SEQ ID NO: 2708 - protein, 2096 aa, synthetic construct
MPAAKRVKLDGGDKKYSIGLDIGTNSVGWAVITDEYKVPSKKFKVLGNTDRHSIKKNLIGALLFDSGETAEATRLKRTARRRYTRRKNRICYLQEIFSNEMAKVDDSFFHRLEESFLVEEDKKHERHPIFGNIVDEVAYHEKYPTIYHLRKKLVDSTDKADLRLIYLALAHMIKFRGHFLIEGDLNPDNSDVDKLFIQLVQTYNQLFEENPINASGVDAKAILSARLSKSRRLENLIAQLPGEKKNGLFGNLIALSLGLTPNFKSNFDLAEDAKLQLSKDTYDDDLDNLLAQIGDQYADLFLAAKNLSDAILLSDILRVNTEITKAPLSASMIKRYDEHHQDLTLLKALVRQQLPEKYKEIFFDQSKNGYAGYIDGGASQEEFYKFIKPILEKMDGTEELLVKLNREDLLRKQRTFDNGSIPHQIHLGELHAILRRQEDFYPFLKDNREKIEKILTFRIPYYVGPLARGNSRFAWMTRKSEETITPWNFEEVVDKGASAQSFIERMTNFDKNLPNEKVLPKHSLLYEYFTVYNELTKVKYVTEGMRKPAFLSGEQKKAIVDLLFKTNRKVTVKQLKEDYFKKIECFDSVEISGVEDRFNASLGTYHDLLKIIKDKDFLDNEENEDILEDIVLTLTLFEDREMIEERLKTYAHLFDDKVMKQLKRRRYTGWGRLSRKLINGIRDKQSGKTILDFLKSDGFANRNFMQLIHDDSLTFKEDIQKAQVSGQGDSLHEHIANLAGSPAIKKGILQTVKVVDELVKVMGRHKPENIVIEMARENQTTQKGQKNSRERMKRIEEGIKELGSQILKEHPVENTQLQNEKLYLYYLQNGRDMYVDQELDINRLSDYDVDHIVPQSFLKDDSIDNKVLTRSDKARGKSDNVPSEEVVKKMKNYWRQLLNAKLITQRKFDNLTKAERGGLSELDKAGFIKRQLVETRQITKHVAQILDSRMNTKYDENDKLIREVKVITLKSKLVSDFRKDFQFYKVREINNYHHAHDAYLNAVVGTALIKKYPKLESEFVYGDYKVYDVRKMIAKSEQEIGKATAKYFFYSNIMNFFKTEITLANGEIRKRPLIETNGETGEIVWDKGRDFATVRKVLSMPQVNIVKKTEVQTGGFSKESILPKRNSDKLIARKKDWDPKKYGGFDSPTVAYSVLVVAKVEKGKSKKLKSVKELLGITIMERSSFEKNPIDFLEAKGYKEVKKDLIIKLPKYSLFELENGRKRMLASAGELQKGNELALPSKYVNFLYLASHYEKLKGSPEDNEQKQLFVEQHKHYLDEIIEQISEFSKRVILADANLDKVLSAYNKHRDKPIREQAENIIHLFTLTNLGAPAAFKYFDTTIDRKRYTSTKEVLDATLIHQSITGLYETRIDLSQLGGDGGGGGGGSEAAAKGGTLNIEDEHRLHETSKEPDVSLGSTWLSDFPQAWAETGGMGLAVRQAPLIIPLKATSTPVSIKQYPMSQEARLGIKPHIQRLLDQGILVPCQSPWNTPLLPVKKPGTNDYRPVQDLREVNKRVEDIHPTVPNPYNLLSGLPPSHQWYTVLDLKDAFFCLRLHPTSQPLFAFEWRDPEMGISGQLTWTRLPQGFKNSPTLFDEALHRDLADFRIQHPDLILLQYVDDLLLAATSELDCQQGTRALLQTLGNLGYRASAKKAQICQKQVKYLGYLLKEGQRWLTEARKETVMGQPTPKTPRQLREFLGTAGFCRLWIPGFAEMAAPLYPLTKTGTLFNWGPDQQKAYQEIKQALLTAPALGLPDLTKPFELFVDEKQGYAKGVLTQKLGPWRRPVAYLSKKLDPVAAGWPPCLRMVAAIAVLTKDAGKLTMGQPLVILAPHAVEALVKQPPDRWLSNARMTHYQALLLDTDRVQFGPVVALNPATLLPLPEEGLQHNCLDILAEAHGTRPDLTDQPLPDADHTWYTDGSSLLQEGQRKAGAAVTTETEVIWAKALPAGTSAQRAELIALTQALKMAEGKKLNVYTDSRYAFATAHIHGEIYRRRGLLTSEGKEIKNKDEILALLKALFLPKRLSIIHCPGHQKGHSAEARGNRMADQAARKAAITETPDTSTLLAGKRTADGSEFEKRTADGSEFESPKKKAKVE

SEQ ID NO: 2709 - protein, 2096 aa, synthetic construct
MPAAKRVKLDGGDKKYSIGLDIGTNSVGWAVITDEYKVPSKKFKVLGNTDRHSIKKNLIGALLFDSGETAEATRLKRTARRRYTRRKNRICYLQEIFSNEMAKVDDSFFHRLEESFLVEEDKKHERHPIFGNIVDEVAYHEKYPTIYHLRKKLVDSTDKADLRLIYLALAHMIKFRGHFLIEGDLNPDNSDVDKLFIQLVQTYNQLFEENPINASGVDAKAILSARLSKSRRLENLIAQLPGEKKNGLFGNLIALSLGLTPNFKSNFDLAEDAKLQLSKDTYDDDLDNLLAQIGDQYADLFLAAKNLSDAILLSDILRVNTEITKAPLSASMIKRYDEHHQDLTLLKALVRQQLPEKYKEIFFDQSKNGYAGYIDGGASQEEFYKFIKPILEKMDGTEELLVKLNREDLLRKQRTFDNGSIPHQIHLGELHAILRRQEDFYPFLKDNREKIEKILTFRIPYYVGPLARGNSRFAWMTRKSEETITPWNFEEVVDKGASAQSFIERMTNFDKNLPNEKVLPKHSLLYEYFTVYNELTKVKYVTEGMRKPAFLSGEQKKAIVDLLFKTNRKVTVKQLKEDYFKKIECFDSVEISGVEDRFNASLGTYHDLLKIIKDKDFLDNEENEDILEDIVLTLTLFEDREMIEERLKTYAHLFDDKVMKQLKRRRYTGWGRLSRKLINGIRDKQSGKTILDFLKSDGFANRNFMQLIHDDSLTFKEDIQKAQVSGQGDSLHEHIANLAGSPAIKKGILQTVKVVDELVKVMGRHKPENIVIEMARENQTTQKGQKNSRERMKRIEEGIKELGSQILKEHPVENTQLQNEKLYLYYLQNGRDMYVDQELDINRLSDYDVDHIVPQSFLKDDSIDNKVLTRSDKARGKSDNVPSEEVVKKMKNYWRQLLNAKLITQRKFDNLTKAERGGLSELDKAGFIKRQLVETRQITKHVAQILDSRMNTKYDENDKLIREVKVITLKSKLVSDFRKDFQFYKVREINNYHHAHDAYLNAVVGTALIKKYPKLESEFVYGDYKVYDVRKMIAKSEQEIGKATAKYFFYSNIMNFFKTEITLANGEIRKRPLIETNGETGEIVWDKGRDFATVRKVLSMPQVNIVKKTEVQTGGFSKESILPKRNSDKLIARKKDWDPKKYGGFDSPTVAYSVLVVAKVEKGKSKKLKSVKELLGITIMERSSFEKNPIDFLEAKGYKEVKKDLIIKLPKYSLFELENGRKRMLASAGELQKGNELALPSKYVNFLYLASHYEKLKGSPEDNEQKQLFVEQHKHYLDEIIEQISEFSKRVILADANLDKVLSAYNKHRDKPIREQAENIIHLFTLTNLGAPAAFKYFDTTIDRKRYTSTKEVLDATLIHQSITGLYETRIDLSQLGGDGGPAPAPAPAPAPGGTLNIEDEHRLHETSKEPDVSLGSTWLSDFPQAWAETGGMGLAVRQAPLIIPLKATSTPVSIKQYPMSQEARLGIKPHIQRLLDQGILVPCQSPWNTPLLPVKKPGTNDYRPVQDLREVNKRVEDIHPTVPNPYNLLSGLPPSHQWYTVLDLKDAFFCLRLHPTSQPLFAFEWRDPEMGISGQLTWTRLPQGFKNSPTLFDEALHRDLADFRIQHPDLILLQYVDDLLLAATSELDCQQGTRALLQTLGNLGYRASAKKAQICQKQVKYLGYLLKEGQRWLTEARKETVMGQPTPKTPRQLREFLGTAGFCRLWIPGFAEMAAPLYPLTKTGTLFNWGPDQQKAYQEIKQALLTAPALGLPDLTKPFELFVDEKQGYAKGVLTQKLGPWRRPVAYLSKKLDPVAAGWPPCLRMVAAIAVLTKDAGKLTMGQPLVILAPHAVEALVKQPPDRWLSNARMTHYQALLLDTDRVQFGPVVALNPATLLPLPEEGLQHNCLDILAEAHGTRPDLTDQPLPDADHTWYTDGSSLLQEGQRKAGAAVTTETEVIWAKALPAGTSAQRAELIALTQALKMAEGKKLNVYTDSRYAFATAHIHGEIYRRRGLLTSEGKEIKNKDEILALLKALFLPKRLSIIHCPGHQKGHSAEARGNRMADQAARKAAITETPDTSTLLAGKRTADGSEFEKRTADGSEFESPKKKAKVE

SEQ ID NO: 2710 - protein, 2091 aa, synthetic construct
MPAAKRVKLDGGDKKYSIGLDIGTNSVGWAVITDEYKVPSKKFKVLGNTDRHSIKKNLIGALLFDSGETAEATRLKRTARRRYTRRKNRICYLQEIFSNEMAKVDDSFFHRLEESFLVEEDKKHERHPIFGNIVDEVAYHEKYPTIYHLRKKLVDSTDKADLRLIYLALAHMIKFRGHFLIEGDLNPDNSDVDKLFIQLVQTYNQLFEENPINASGVDAKAILSARLSKSRRLENLIAQLPGEKKNGLFGNLIALSLGLTPNFKSNFDLAEDAKLQLSKDTYDDDLDNLLAQIGDQYADLFLAAKNLSDAILLSDILRVNTEITKAPLSASMIKRYDEHHQDLTLLKALVRQQLPEKYKEIFFDQSKNGYAGYIDGGASQEEFYKFIKPILEKMDGTEELLVKLNREDLLRKQRTFDNGSIPHQIHLGELHAILRRQEDFYPFLKDNREKIEKILTFRIPYYVGPLARGNSRFAWMTRKSEETITPWNFEEVVDKGASAQSFIERMTNFDKNLPNEKVLPKHSLLYEYFTVYNELTKVKYVTEGMRKPAFLSGEQKKAIVDLLFKTNRKVTVKQLKEDYFKKIECFDSVEISGVEDRFNASLGTYHDLLKIIKDKDFLDNEENEDILEDIVLTLTLFEDREMIEERLKTYAHLFDDKVMKQLKRRRYTGWGRLSRKLINGIRDKQSGKTILDFLKSDGFANRNFMQLIHDDSLTFKEDIQKAQVSGQGDSLHEHIANLAGSPAIKKGILQTVKVVDELVKVMGRHKPENIVIEMARENQTTQKGQKNSRERMKRIEEGIKELGSQILKEHPVENTQLQNEKLYLYYLQNGRDMYVDQELDINRLSDYDVDHIVPQSFLKDDSIDNKVLTRSDKARGKSDNVPSEEVVKKMKNYWRQLLNAKLITQRKFDNLTKAERGGLSELDKAGFIKRQLVETRQITKHVAQILDSRMNTKYDENDKLIREVKVITLKSKLVSDFRKDFQFYKVREINNYHHAHDAYLNAVVGTALIKKYPKLESEFVYGDYKVYDVRKMIAKSEQEIGKATAKYFFYSNIMNFFKTEITLANGEIRKRPLIETNGETGEIVWDKGRDFATVRKVLSMPQVNIVKKTEVQTGGFSKESILPKRNSDKLIARKKDWDPKKYGGFDSPTVAYSVLVVAKVEKGKSKKLKSVKELLGITIMERSSFEKNPIDFLEAKGYKEVKKDLIIKLPKYSLFELENGRKRMLASAGELQKGNELALPSKYVNFLYLASHYEKLKGSPEDNEQKQLFVEQHKHYLDEIIEQISEFSKRVILADANLDKVLSAYNKHRDKPIREQAENIIHLFTLTNLGAPAAFKYFDTTIDRKRYTSTKEVLDATLIHQSITGLYETRIDLSQLGGDGGGSSPAPGGTLNIEDEHRLHETSKEPDVSLGSTWLSDFPQAWAETGGMGLAVRQAPLIIPLKATSTPVSIKQYPMSQEARLGIKPHIQRLLDQGILVPCQSPWNTPLLPVKKPGTNDYRPVQDLREVNKRVEDIHPTVPNPYNLLSGLPPSHQWYTVLDLKDAFFCLRLHPTSQPLFAFEWRDPEMGISGQLTWTRLPQGFKNSPTLFDEALHRDLADFRIQHPDLILLQYVDDLLLAATSELDCQQGTRALLQTLGNLGYRASAKKAQICQKQVKYLGYLLKEGQRWLTEARKETVMGQPTPKTPRQLREFLGTAGFCRLWIPGFAEMAAPLYPLTKTGTLFNWGPDQQKAYQEIKQALLTAPALGLPDLTKPFELFVDEKQGYAKGVLTQKLGPWRRPVAYLSKKLDPVAAGWPPCLRMVAAIAVLTKDAGKLTMGQPLVILAPHAVEALVKQPPDRWLSNARMTHYQALLLDTDRVQFGPVVALNPATLLPLPEEGLQHNCLDILAEAHGTRPDLTDQPLPDADHTWYTDGSSLLQEGQRKAGAAVTTETEVIWAKALPAGTSAQRAELIALTQALKMAEGKKLNVYTDSRYAFATAHIHGEIYRRRGLLTSEGKEIKNKDEILALLKALFLPKRLSIIHCPGHQKGHSAEARGNRMADQAARKAAITETPDTSTLLAGKRTADGSEFEKRTADGSEFESPKKKAKVE

SEQ ID NO: 2711 - protein, 2131 aa, synthetic construct
MPAAKRVKLDGGDKKYSIGLDIGTNSVGWAVITDEYKVPSKKFKVLGNTDRHSIKKNLIGALLFDSGETAEATRLKRTARRRYTRRKNRICYLQEIFSNEMAKVDDSFFHRLEESFLVEEDKKHERHPIFGNIVDEVAYHEKYPTIYHLRKKLVDSTDKADLRLIYLALAHMIKFRGHFLIEGDLNPDNSDVDKLFIQLVQTYNQLFEENPINASGVDAKAILSARLSKSRRLENLIAQLPGEKKNGLFGNLIALSLGLTPNFKSNFDLAEDAKLQLSKDTYDDDLDNLLAQIGDQYADLFLAAKNLSDAILLSDILRVNTEITKAPLSASMIKRYDEHHQDLTLLKALVRQQLPEKYKEIFFDQSKNGYAGYIDGGASQEEFYKFIKPILEKMDGTEELLVKLNREDLLRKQRTFDNGSIPHQIHLGELHAILRRQEDFYPFLKDNREKIEKILTFRIPYYVGPLARGNSRFAWMTRKSEETITPWNFEEVVDKGASAQSFIERMTNFDKNLPNEKVLPKHSLLYEYFTVYNELTKVKYVTEGMRKPAFLSGEQKKAIVDLLFKTNRKVTVKQLKEDYFKKIECFDSVEISGVEDRFNASLGTYHDLLKIIKDKDFLDNEENEDILEDIVLTLTLFEDREMIEERLKTYAHLFDDKVMKQLKRRRYTGWGRLSRKLINGIRDKQSGKTILDFLKSDGFANRNFMQLIHDDSLTFKEDIQKAQVSGQGDSLHEHIANLAGSPAIKKGILQTVKVVDELVKVMGRHKPENIVIEMARENQTTQKGQKNSRERMKRIEEGIKELGSQILKEHPVENTQLQNEKLYLYYLQNGRDMYVDQELDINRLSDYDVDHIVPQSFLKDDSIDNKVLTRSDKARGKSDNVPSEEVVKKMKNYWRQLLNAKLITQRKFDNLTKAERGGLSELDKAGFIKRQLVETRQITKHVAQILDSRMNTKYDENDKLIREVKVITLKSKLVSDFRKDFQFYKVREINNYHHAHDAYLNAVVGTALIKKYPKLESEFVYGDYKVYDVRKMIAKSEQEIGKATAKYFFYSNIMNFFKTEITLANGEIRKRPLIETNGETGEIVWDKGRDFATVRKVLSMPQVNIVKKTEVQTGGFSKESILPKRNSDKLIARKKDWDPKKYGGFDSPTVAYSVLVVAKVEKGKSKKLKSVKELLGITIMERSSFEKNPIDFLEAKGYKEVKKDLIIKLPKYSLFELENGRKRMLASAGELQKGNELALPSKYVNFLYLASHYEKLKGSPEDNEQKQLFVEQHKHYLDEIIEQISEFSKRVILADANLDKVLSAYNKHRDKPIREQAENIIHLFTLTNLGAPAAFKYFDTTIDRKRYTSTKEVLDATLIHQSITGLYETRIDLSQLGGDGGAEAAAKEAAAKEAAAKEAAAKALEAEAAAKEAAAKEAAAKEAAAKAGGTLNIEDEHRLHETSKEPDVSLGSTWLSDFPQAWAETGGMGLAVRQAPLIIPLKATSTPVSIKQYPMSQEARLGIKPHIQRLLDQGILVPCQSPWNTPLLPVKKPGTNDYRPVQDLREVNKRVEDIHPTVPNPYNLLSGLPPSHQWYTVLDLKDAFFCLRLHPTSQPLFAFEWRDPEMGISGQLTWTRLPQGFKNSPTLFNEALHRDLADFRIQHPDLILLQYVDDLLLAATSELDCQQGTRALLQTLGNLGYRASAKKAQICQKQVKYLGYLLKEGQRWLTEARKETVMGQPTPKTPRQLREFLGTAGFCRLWIPGFAEMAAPLYPLTKPGTLFNWGPDQQKAYQEIKQALLTAPALGLPDLTKPFELFVDEKQGYAKGVLTQKLGPWRRPVAYLSKKLDPVAAGWPPCLRMVAAIAVLTKDAGKLTMGQPLVILAPHAVEALVKQPPDRWLSNARMTHYQALLLDTDRVQFGPVVALNPATLLPLPEEGLQHNCLDILAEAHGTRPDLTDQPLPDADHTWYTDGSSLLQEGQRKAGAAVTTETEVIWAKALPAGTSAQRAELIALTQALKMAEGKKLNVYTDSRYAFATAHIHGEIYRRRGWLTSEGKEIKNKDEILALLKALFLPKRLSIIHCPGHQKGHSAEARGNRMADQAARKAAITETPDTSTLLAGKRTADGSEFEKRTADGSEFESPKKKAKVE

SEQ ID NO: 2712 - protein, 2100 aa, synthetic construct
MPAAKRVKLDGGDKKYSIGLDIGTNSVGWAVITDEYKVPSKKFKVLGNTDRHSIKKNLIGALLFDSGETAEATRLKRTARRRYTRRKNRICYLQEIFSNEMAKVDDSFFHRLEESFLVEEDKKHERHPIFGNIVDEVAYHEKYPTIYHLRKKLVDSTDKADLRLIYLALAHMIKFRGHFLIEGDLNPDNSDVDKLFIQLVQTYNQLFEENPINASGVDAKAILSARLSKSRRLENLIAQLPGEKKNGLFGNLIALSLGLTPNFKSNFDLAEDAKLQLSKDTYDDDLDNLLAQIGDQYADLFLAAKNLSDAILLSDILRVNTEITKAPLSASMIKRYDEHHQDLTLLKALVRQQLPEKYKEIFFDQSKNGYAGYIDGGASQEEFYKFIKPILEKMDGTEELLVKLNREDLLRKQRTFDNGSIPHQIHLGELHAILRRQEDFYPFLKDNREKIEKILTFRIPYYVGPLARGNSRFAWMTRKSEETITPWNFEEVVDKGASAQSFIERMTNFDKNLPNEKVLPKHSLLYEYFTVYNELTKVKYVTEGMRKPAFLSGEQKKAIVDLLFKTNRKVTVKQLKEDYFKKIECFDSVEISGVEDRFNASLGTYHDLLKIIKDKDFLDNEENEDILEDIVLTLTLFEDREMIEERLKTYAHLFDDKVMKQLKRRRYTGWGRLSRKLINGIRDKQSGKTILDFLKSDGFANRNFMQLIHDDSLTFKEDIQKAQVSGQGDSLHEHIANLAGSPAIKKGILQTVKVVDELVKVMGRHKPENIVIEMARENQTTQKGQKNSRERMKRIEEGIKELGSQILKEHPVENTQLQNEKLYLYYLQNGRDMYVDQELDINRLSDYDVDHIVPQSFLKDDSIDNKVLTRSDKARGKSDNVPSEEVVKKMKNYWRQLLNAKLITQRKFDNLTKAERGGLSELDKAGFIKRQLVETRQITKHVAQILDSRMNTKYDENDKLIREVKVITLKSKLVSDFRKDFQFYKVREINNYHHAHDAYLNAVVGTALIKKYPKLESEFVYGDYKVYDVRKMIAKSEQEIGKATAKYFFYSNIMNFFKTEITLANGEIRKRPLIETNGETGEIVWDKGRDFATVRKVLSMPQVNIVKKTEVQTGGFSKESILPKRNSDKLIARKKDWDPKKYGGFDSPTVAYSVLVVAKVEKGKSKKLKSVKELLGITIMERSSFEKNPIDFLEAKGYKEVKKDLIIKLPKYSLFELENGRKRMLASAGELQKGNELALPSKYVNFLYLASHYEKLKGSPEDNEQKQLFVEQHKHYLDEIIEQISEFSKRVILADANLDKVLSAYNKHRDKPIREQAENIIHLFTLTNLGAPAAFKYFDTTIDRKRYTSTKEVLDATLIHQSITGLYETRIDLSQLGGDGGEAAAKGGGGSEAAAKGGTLNIEDEHRLHETSKEPDVSLGSTWLSDFPQAWAETGGMGLAVRQAPLIIPLKATSTPVSIKQYPMSQEARLGIKPHIQRLLDQGILVPCQSPWNTPLLPVKKPGTNDYRPVQDLREVNKRVEDIHPTVPNPYNLLSGLPPSHQWYTVLDLKDAFFCLRLHPTSQPLFAFEWRDPEMGISGQLTWTRLPQGFKNSPTLFNEALHRDLADFRIQHPDLILLQYVDDLLLAATSELDCQQGTRALLQTLGNLGYRASAKKAQICQKQVKYLGYLLKEGQRWLTEARKETVMGQPTPKTPRQLREFLGTAGFCRLWIPGFAEMAAPLYPLTKPGTLFNWGPDQQKAYQEIKQALLTAPALGLPDLTKPFELFVDEKQGYAKGVLTQKLGPWRRPVAYLSKKLDPVAAGWPPCLRMVAAIAVLTKDAGKLTMGQPLVILAPHAVEALVKQPPDRWLSNARMTHYQALLLDTDRVQFGPVVALNPATLLPLPEEGLQHNCLDILAEAHGTRPDLTDQPLPDADHTWYTDGSSLLQEGQRKAGAAVTTETEVIWAKALPAGTSAQRAELIALTQALKMAEGKKLNVYTDSRYAFATAHIHGEIYRRRGWLTSEGKEIKNKDEILALLKALFLPKRLSIIHCPGHQKGHSAEARGNRMADQAARKAAITETPDTSTLLAGKRTADGSEFEKRTADGSEFESPKKKAKVE

SEQ ID NO: 2713 - protein, 2096 aa, synthetic construct
MPAAKRVKLDGGDKKYSIGLDIGTNSVGWAVITDEYKVPSKKFKVLGNTDRHSIKKNLIGALLFDSGETAEATRLKRTARRRYTRRKNRICYLQEIFSNEMAKVDDSFFHRLEESFLVEEDKKHERHPIFGNIVDEVAYHEKYPTIYHLRKKLVDSTDKADLRLIYLALAHMIKFRGHFLIEGDLNPDNSDVDKLFIQLVQTYNQLFEENPINASGVDAKAILSARLSKSRRLENLIAQLPGEKKNGLFGNLIALSLGLTPNFKSNFDLAEDAKLQLSKDTYDDDLDNLLAQIGDQYADLFLAAKNLSDAILLSDILRVNTEITKAPLSASMIKRYDEHHQDLTLLKALVRQQLPEKYKEIFFDQSKNGYAGYIDGGASQEEFYKFIKPILEKMDGTEELLVKLNREDLLRKQRTFDNGSIPHQIHLGELHAILRRQEDFYPFLKDNREKIEKILTFRIPYYVGPLARGNSRFAWMTRKSEETITPWNFEEVVDKGASAQSFIERMTNFDKNLPNEKVLPKHSLLYEYFTVYNELTKVKYVTEGMRKPAFLSGEQKKAIVDLLFKTNRKVTVKQLKEDYFKKIECFDSVEISGVEDRFNASLGTYHDLLKIIKDKDFLDNEENEDILEDIVLTLTLFEDREMIEERLKTYAHLFDDKVMKQLKRRRYTGWGRLSRKLINGIRDKQSGKTILDFLKSDGFANRNFMQLIHDDSLTFKEDIQKAQVSGQGDSLHEHIANLAGSPAIKKGILQTVKVVDELVKVMGRHKPENIVIEMARENQTTQKGQKNSRERMKRIEEGIKELGSQILKEHPVENTQLQNEKLYLYYLQNGRDMYVDQELDINRLSDYDVDHIVPQSFLKDDSIDNKVLTRSDKARGKSDNVPSEEVVKKMKNYWRQLLNAKLITQRKFDNLTKAERGGLSELDKAGFIKRQLVETRQITKHVAQILDSRMNTKYDENDKLIREVKVITLKSKLVSDFRKDFQFYKVREINNYHHAHDAYLNAVVGTALIKKYPKLESEFVYGDYKVYDVRKMIAKSEQEIGKATAKYFFYSNIMNFFKTEITLANGEIRKRPLIETNGETGEIVWDKGRDFATVRKVLSMPQVNIVKKTEVQTGGFSKESILPKRNSDKLIARKKDWDPKKYGGFDSPTVAYSVLVVAKVEKGKSKKLKSVKELLGITIMERSSFEKNPIDFLEAKGYKEVKKDLIIKLPKYSLFELENGRKRMLASAGELQKGNELALPSKYVNFLYLASHYEKLKGSPEDNEQKQLFVEQHKHYLDEIIEQISEFSKRVILADANLDKVLSAYNKHRDKPIREQAENIIHLFTLTNLGAPAAFKYFDTTIDRKRYTSTKEVLDATLIHQSITGLYETRIDLSQLGGDGGGGSEAAAKGGGGGTLNIEDEHRLHETSKEPDVSLGSTWLSDFPQAWAETGGMGLAVRQAPLIIPLKATSTPVSIKQYPMSQEARLGIKPHIQRLLDQGILVPCQSPWNTPLLPVKKPGTNDYRPVQDLREVNKRVEDIHPTVPNPYNLLSGLPPSHQWYTVLDLKDAFFCLRLHPTSQPLFAFEWRDPEMGISGQLTWTRLPQGFKNSPTLFNEALHRDLADFRIQHPDLILLQYVDDLLLAATSELDCQQGTRALLQTLGNLGYRASAKKAQICQKQVKYLGYLLKEGQRWLTEARKETVMGQPTPKTPRQLREFLGTAGFCRLWIPGFAEMAAPLYPLTKPGTLFNWGPDQQKAYQEIKQALLTAPALGLPDLTKPFELFVDEKQGYAKGVLTQKLGPWRRPVAYLSKKLDPVAAGWPPCLRMVAAIAVLTKDAGKLTMGQPLVILAPHAVEALVKQPPDRWLSNARMTHYQALLLDTDRVQFGPVVALNPATLLPLPEEGLQHNCLDILAEAHGTRPDLTDQPLPDADHTWYTDGSSLLQEGQRKAGAAVTTETEVIWAKALPAGTSAQRAELIALTQALKMAEGKKLNVYTDSRYAFATAHIHGEIYRRRGWLTSEGKEIKNKDEILALLKALFLPKRLSIIHCPGHQKGHSAEARGNRMADQAARKAAITETPDTSTLLAGKRTADGSEFEKRTADGSEFESPKKKAKVE

SEQ ID NO: 2714 - protein, 2096 aa, synthetic construct
MPAAKRVKLDGGDKKYSIGLDIGTNSVGWAVITDEYKVPSKKFKVLGNTDRHSIKKNLIGALLFDSGETAEATRLKRTARRRYTRRKNRICYLQEIFSNEMAKVDDSFFHRLEESFLVEEDKKHERHPIFGNIVDEVAYHEKYPTIYHLRKKLVDSTDKADLRLIYLALAHMIKFRGHFLIEGDLNPDNSDVDKLFIQLVQTYNQLFEENPINASGVDAKAILSARLSKSRRLENLIAQLPGEKKNGLFGNLIALSLGLTPNFKSNFDLAEDAKLQLSKDTYDDDLDNLLAQIGDQYADLFLAAKNLSDAILLSDILRVNTEITKAPLSASMIKRYDEHHQDLTLLKALVRQQLPEKYKEIFFDQSKNGYAGYIDGGASQEEFYKFIKPILEKMDGTEELLVKLNREDLLRKQRTFDNGSIPHQIHLGELHAILRRQEDFYPFLKDNREKIEKILTFRIPYYVGPLARGNSRFAWMTRKSEETITPWNFEEVVDKGASAQSFIERMTNFDKNLPNEKVLPKHSLLYEYFTVYNELTKVKYVTEGMRKPAFLSGEQKKAIVDLLFKTNRKVTVKQLKEDYFKKIECFDSVEISGVEDRFNASLGTYHDLLKIIKDKDFLDNEENEDILEDIVLTLTLFEDREMIEERLKTYAHLFDDKVMKQLKRRRYTGWGRLSRKLINGIRDKQSGKTILDFLKSDGFANRNFMQLIHDDSLTFKEDIQKAQVSGQGDSLHEHIANLAGSPAIKKGILQTVKVVDELVKVMGRHKPENIVIEMARENQTTQKGQKNSRERMKRIEEGIKELGSQILKEHPVENTQLQNEKLYLYYLQNGRDMYVDQELDINRLSDYDVDHIVPQSFLKDDSIDNKVLTRSDKARGKSDNVPSEEVVKKMKNYWRQLLNAKLITQRKFDNLTKAERGGLSELDKAGFIKRQLVETRQITKHVAQILDSRMNTKYDENDKLIREVKVITLKSKLVSDFRKDFQFYKVREINNYHHAHDAYLNAVVGTALIKKYPKLESEFVYGDYKVYDVRKMIAKSEQEIGKATAKYFFYSNIMNFFKTEITLANGEIRKRPLIETNGETGEIVWDKGRDFATVRKVLSMPQVNIVKKTEVQTGGFSKESILPKRNSDKLIARKKDWDPKKYGGFDSPTVAYSVLVVAKVEKGKSKKLKSVKELLGITIMERSSFEKNPIDFLEAKGYKEVKKDLIIKLPKYSLFELENGRKRMLASAGELQKGNELALPSKYVNFLYLASHYEKLKGSPEDNEQKQLFVEQHKHYLDEIIEQISEFSKRVILADANLDKVLSAYNKHRDKPIREQAENIIHLFTLTNLGAPAAFKYFDTTIDRKRYTSTKEVLDATLIHQSITGLYETRIDLSQLGGDGGEAAAKPAPGGSGGTLNIEDEHRLHETSKEPDVSLGSTWLSDFPQAWAETGGMGLAVRQAPLIIPLKATSTPVSIKQYPMSQEARLGIKPHIQRLLDQGILVPCQSPWNTPLLPVKKPGTNDYRPVQDLREVNKRVEDIHPTVPNPYNLLSGLPPSHQWYTVLDLKDAFFCLRLHPTSQPLFAFEWRDPEMGISGQLTWTRLPQGFKNSPTLFNEALHRDLADFRIQHPDLILLQYVDDLLLAATSELDCQQGTRALLQTLGNLGYRASAKKAQICQKQVKYLGYLLKEGQRWLTEARKETVMGQPTPKTPRQLREFLGTAGFCRLWIPGFAEMAAPLYPLTKPGTLFNWGPDQQKAYQEIKQALLTAPALGLPDLTKPFELFVDEKQGYAKGVLTQKLGPWRRPVAYLSKKLDPVAAGWPPCLRMVAAIAVLTKDAGKLTMGQPLVILAPHAVEALVKQPPDRWLSNARMTHYQALLLDTDRVQFGPVVALNPATLLPLPEEGLQHNCLDILAEAHGTRPDLTDQPLPDADHTWYTDGSSLLQEGQRKAGAAVTTETEVIWAKALPAGTSAQRAELIALTQALKMAEGKKLNVYTDSRYAFATAHIHGEIYRRRGWLTSEGKEIKNKDEILALLKALFLPKRLSIIHCPGHQKGHSAEARGNRMADQAARKAAITETPDTSTLLAGKRTADGSEFEKRTADGSEFESPKKKAKVE

SEQ ID NO: 2715 - protein, 2094 aa, synthetic construct
MPAAKRVKLDGGDKKYSIGLDIGTNSVGWAVITDEYKVPSKKFKVLGNTDRHSIKKNLIGALLFDSGETAEATRLKRTARRRYTRRKNRICYLQEIFSNEMAKVDDSFFHRLEESFLVEEDKKHERHPIFGNIVDEVAYHEKYPTIYHLRKKLVDSTDKADLRLIYLALAHMIKFRGHFLIEGDLNPDNSDVDKLFIQLVQTYNQLFEENPINASGVDAKAILSARLSKSRRLENLIAQLPGEKKNGLFGNLIALSLGLTPNFKSNFDLAEDAKLQLSKDTYDDDLDNLLAQIGDQYADLFLAAKNLSDAILLSDILRVNTEITKAPLSASMIKRYDEHHQDLTLLKALVRQQLPEKYKEIFFDQSKNGYAGYIDGGASQEEFYKFIKPILEKMDGTEELLVKLNREDLLRKQRTFDNGSIPHQIHLGELHAILRRQEDFYPFLKDNREKIEKILTFRIPYYVGPLARGNSRFAWMTRKSEETITPWNFEEVVDKGASAQSFIERMTNFDKNLPNEKVLPKHSLLYEYFTVYNELTKVKYVTEGMRKPAFLSGEQKKAIVDLLFKTNRKVTVKQLKEDYFKKIECFDSVEISGVEDRFNASLGTYHDLLKIIKDKDFLDNEENEDILEDIVLTLTLFEDREMIEERLKTYAHLFDDKVMKQLKRRRYTGWGRLSRKLINGIRDKQSGKTILDFLKSDGFANRNFMQLIHDDSLTFKEDIQKAQVSGQGDSLHEHIANLAGSPAIKKGILQTVKVVDELVKVMGRHKPENIVIEMARENQTTQKGQKNSRERMKRIEEGIKELGSQILKEHPVENTQLQNEKLYLYYLQNGRDMYVDQELDINRLSDYDVDHIVPQSFLKDDSIDNKVLTRSDKARGKSDNVPSEEVVKKMKNYWRQLLNAKLITQRKFDNLTKAERGGLSELDKAGFIKRQLVETRQITKHVAQILDSRMNTKYDENDKLIREVKVITLKSKLVSDFRKDFQFYKVREINNYHHAHDAYLNAVVGTALIKKYPKLESEFVYGDYKVYDVRKMIAKSEQEIGKATAKYFFYSNIMNFFKTEITLANGEIRKRPLIETNGETGEIVWDKGRDFATVRKVLSMPQVNIVKKTEVQTGGFSKESILPKRNSDKLIARKKDWDPKKYGGFDSPTVAYSVLVVAKVEKGKSKKLKSVKELLGITIMERSSFEKNPIDFLEAKGYKEVKKDLIIKLPKYSLFELENGRKRMLASAGELQKGNELALPSKYVNFLYLASHYEKLKGSPEDNEQKQLFVEQHKHYLDEIIEQISEFSKRVILADANLDKVLSAYNKHRDKPIREQAENIIHLFTLTNLGAPAAFKYFDTTIDRKRYTSTKEVLDATLIHQSITGLYETRIDLSQLGGDGGGSSGGGGGSGGTLNIEDEHRLHETSKEPDVSLGSTWLSDFPQAWAETGGMGLAVRQAPLIIPLKATSTPVSIKQYPMSQEARLGIKPHIQRLLDQGILVPCQSPWNTPLLPVKKPGTNDYRPVQDLREVNKRVEDIHPTVPNPYNLLSGLPPSHQWYTVLDLKDAFFCLRLHPTSQPLFAFEWRDPEMGISGQLTWTRLPQGFKNSPTLFNEALHRDLADFRIQHPDLILLQYVDDLLLAATSELDCQQGTRALLQTLGNLGYRASAKKAQICQKQVKYLGYLLKEGQRWLTEARKETVMGQPTPKTPRQLREFLGTAGFCRLWIPGFAEMAAPLYPLTKPGTLFNWGPDQQKAYQEIKQALLTAPALGLPDLTKPFELFVDEKQGYAKGVLTQKLGPWRRPVAYLSKKLDPVAAGWPPCLRMVAAIAVLTKDAGKLTMGQPLVILAPHAVEALVKQPPDRWLSNARMTHYQALLLDTDRVQFGPVVALNPATLLPLPEEGLQHNCLDILAEAHGTRPDLTDQPLPDADHTWYTDGSSLLQEGQRKAGAAVTTETEVIWAKALPAGTSAQRAELIALTQALKMAEGKKLNVYTDSRYAFATAHIHGEIYRRRGWLTSEGKEIKNKDEILALLKALFLPKRLSIIHCPGHQKGHSAEARGNRMADQAARKAAITETPDTSTLLAGKRTADGSEFEKRTADGSEFESPKKKAKVE

SEQ ID NO: 2716 - protein, 2110 aa, synthetic construct
MPAAKRVKLDGGDKKYSIGLDIGTNSVGWAVITDEYKVPSKKFKVLGNTDRHSIKKNLIGALLFDSGETAEATRLKRTARRRYTRRKNRICYLQEIFSNEMAKVDDSFFHRLEESFLVEEDKKHERHPIFGNIVDEVAYHEKYPTIYHLRKKLVDSTDKADLRLIYLALAHMIKFRGHFLIEGDLNPDNSDVDKLFIQLVQTYNQLFEENPINASGVDAKAILSARLSKSRRLENLIAQLPGEKKNGLFGNLIALSLGLTPNFKSNFDLAEDAKLQLSKDTYDDDLDNLLAQIGDQYADLFLAAKNLSDAILLSDILRVNTEITKAPLSASMIKRYDEHHQDLTLLKALVRQQLPEKYKEIFFDQSKNGYAGYIDGGASQEEFYKFIKPILEKMDGTEELLVKLNREDLLRKQRTFDNGSIPHQIHLGELHAILRRQEDFYPFLKDNREKIEKILTFRIPYYVGPLARGNSRFAWMTRKSEETITPWNFEEVVDKGASAQSFIERMTNFDKNLPNEKVLPKHSLLYEYFTVYNELTKVKYVTEGMRKPAFLSGEQKKAIVDLLFKTNRKVTVKQLKEDYFKKIECFDSVEISGVEDRFNASLGTYHDLLKIIKDKDFLDNEENEDILEDIVLTLTLFEDREMIEERLKTYAHLFDDKVMKQLKRRRYTGWGRLSRKLINGIRDKQSGKTILDFLKSDGFANRNFMQLIHDDSLTFKEDIQKAQVSGQGDSLHEHIANLAGSPAIKKGILQTVKVVDELVKVMGRHKPENIVIEMARENQTTQKGQKNSRERMKRIEEGIKELGSQILKEHPVENTQLQNEKLYLYYLQNGRDMYVDQELDINRLSDYDVDHIVPQSFLKDDSIDNKVLTRSDKARGKSDNVPSEEVVKKMKNYWRQLLNAKLITQRKFDNLTKAERGGLSELDKAGFIKRQLVETRQITKHVAQILDSRMNTKYDENDKLIREVKVITLKSKLVSDFRKDFQFYKVREINNYHHAHDAYLNAVVGTALIKKYPKLESEFVYGDYKVYDVRKMIAKSEQEIGKATAKYFFYSNIMNFFKTEITLANGEIRKRPLIETNGETGEIVWDKGRDFATVRKVLSMPQVNIVKKTEVQTGGFSKESILPKRNSDKLIARKKDWDPKKYGGFDSPTVAYSVLVVAKVEKGKSKKLKSVKELLGITIMERSSFEKNPIDFLEAKGYKEVKKDLIIKLPKYSLFELENGRKRMLASAGELQKGNELALPSKYVNFLYLASHYEKLKGSPEDNEQKQLFVEQHKHYLDEIIEQISEFSKRVILADANLDKVLSAYNKHRDKPIREQAENIIHLFTLTNLGAPAAFKYFDTTIDRKRYTSTKEVLDATLIHQSITGLYETRIDLSQLGGDGGEAAAKEAAAKEAAAKEAAAKEAAAKGGTLNIEDEHRLHETSKEPDVSLGSTWLSDFPQAWAETGGMGLAVRQAPLIIPLKATSTPVSIKQYPMSQEARLGIKPHIQRLLDQGILVPCQSPWNTPLLPVKKPGTNDYRPVQDLREVNKRVEDIHPTVPNPYNLLSGLPPSHQWYTVLDLKDAFFCLRLHPTSQPLFAFEWRDPEMGISGQLTWTRLPQGFKNSPTLFNEALHRDLADFRIQHPDLILLQYVDDLLLAATSELDCQQGTRALLQTLGNLGYRASAKKAQICQKQVKYLGYLLKEGQRWLTEARKETVMGQPTPKTPRQLREFLGTAGFCRLWIPGFAEMAAPLYPLTKPGTLFNWGPDQQKAYQEIKQALLTAPALGLPDLTKPFELFVDEKQGYAKGVLTQKLGPWRRPVAYLSKKLDPVAAGWPPCLRMVAAIAVLTKDAGKLTMGQPLVILAPHAVEALVKQPPDRWLSNARMTHYQALLLDTDRVQFGPVVALNPATLLPLPEEGLQHNCLDILAEAHGTRPDLTDQPLPDADHTWYTDGSSLLQEGQRKAGAAVTTETEVIWAKALPAGTSAQRAELIALTQALKMAEGKKLNVYTDSRYAFATAHIHGEIYRRRGWLTSEGKEIKNKDEILALLKALFLPKRLSIIHCPGHQKGHSAEARGNRMADQAARKAAITETPDTSTLLAGKRTADGSEFEKRTADGSEFESPKKKAKVE

SEQ ID NO: 2717 - protein, 2091 aa, synthetic construct
MPAAKRVKLDGGDKKYSIGLDIGTNSVGWAVITDEYKVPSKKFKVLGNTDRHSIKKNLIGALLFDSGETAEATRLKRTARRRYTRRKNRICYLQEIFSNEMAKVDDSFFHRLEESFLVEEDKKHERHPIFGNIVDEVAYHEKYPTIYHLRKKLVDSTDKADLRLIYLALAHMIKFRGHFLIEGDLNPDNSDVDKLFIQLVQTYNQLFEENPINASGVDAKAILSARLSKSRRLENLIAQLPGEKKNGLFGNLIALSLGLTPNFKSNFDLAEDAKLQLSKDTYDDDLDNLLAQIGDQYADLFLAAKNLSDAILLSDILRVNTEITKAPLSASMIKRYDEHHQDLTLLKALVRQQLPEKYKEIFFDQSKNGYAGYIDGGASQEEFYKFIKPILEKMDGTEELLVKLNREDLLRKQRTFDNGSIPHQIHLGELHAILRRQEDFYPFLKDNREKIEKILTFRIPYYVGPLARGNSRFAWMTRKSEETITPWNFEEVVDKGASAQSFIERMTNFDKNLPNEKVLPKHSLLYEYFTVYNELTKVKYVTEGMRKPAFLSGEQKKAIVDLLFKTNRKVTVKQLKEDYFKKIECFDSVEISGVEDRFNASLGTYHDLLKIIKDKDFLDNEENEDILEDIVLTLTLFEDREMIEERLKTYAHLFDDKVMKQLKRRRYTGWGRLSRKLINGIRDKQSGKTILDFLKSDGFANRNFMQLIHDDSLTFKEDIQKAQVSGQGDSLHEHIANLAGSPAIKKGILQTVKVVDELVKVMGRHKPENIVIEMARENQTTQKGQKNSRERMKRIEEGIKELGSQILKEHPVENTQLQNEKLYLYYLQNGRDMYVDQELDINRLSDYDVDHIVPQSFLKDDSIDNKVLTRSDKARGKSDNVPSEEVVKKMKNYWRQLLNAKLITQRKFDNLTKAERGGLSELDKAGFIKRQLVETRQITKHVAQILDSRMNTKYDENDKLIREVKVITLKSKLVSDFRKDFQFYKVREINNYHHAHDAYLNAVVGTALIKKYPKLESEFVYGDYKVYDVRKMIAKSEQEIGKATAKYFFYSNIMNFFKTEITLANGEIRKRPLIETNGETGEIVWDKGRDFATVRKVLSMPQVNIVKKTEVQTGGFSKESILPKRNSDKLIARKKDWDPKKYGGFDSPTVAYSVLVVAKVEKGKSKKLKSVKELLGITIMERSSFEKNPIDFLEAKGYKEVKKDLIIKLPKYSLFELENGRKRMLASAGELQKGNELALPSKYVNFLYLASHYEKLKGSPEDNEQKQLFVEQHKHYLDEIIEQISEFSKRVILADANLDKVLSAYNKHRDKPIREQAENIIHLFTLTNLGAPAAFKYFDTTIDRKRYTSTKEVLDATLIHQSITGLYETRIDLSQLGGDGGGGGGGSGGTLNIEDEHRLHETSKEPDVSLGSTWLSDFPQAWAETGGMGLAVRQAPLIIPLKATSTPVSIKQYPMSQEARLGIKPHIQRLLDQGILVPCQSPWNTPLLPVKKPGTNDYRPVQDLREVNKRVEDIHPTVPNPYNLLSGLPPSHQWYTVLDLKDAFFCLRLHPTSQPLFAFEWRDPEMGISGQLTWTRLPQGFKNSPTLFNEALHRDLADFRIQHPDLILLQYVDDLLLAATSELDCQQGTRALLQTLGNLGYRASAKKAQICQKQVKYLGYLLKEGQRWLTEARKETVMGQPTPKTPRQLREFLGTAGFCRLWIPGFAEMAAPLYPLTKPGTLFNWGPDQQKAYQEIKQALLTAPALGLPDLTKPFELFVDEKQGYAKGVLTQKLGPWRRPVAYLSKKLDPVAAGWPPCLRMVAAIAVLTKDAGKLTMGQPLVILAPHAVEALVKQPPDRWLSNARMTHYQALLLDTDRVQFGPVVALNPATLLPLPEEGLQHNCLDILAEAHGTRPDLTDQPLPDADHTWYTDGSSLLQEGQRKAGAAVTTETEVIWAKALPAGTSAQRAELIALTQALKMAEGKKLNVYTDSRYAFATAHIHGEIYRRRGWLTSEGKEIKNKDEILALLKALFLPKRLSIIHCPGHQKGHSAEARGNRMADQAARKAAITETPDTSTLLAGKRTADGSEFEKRTADGSEFESPKKKAKVE

SEQ ID NO: 2718 - protein, 2093 aa, synthetic construct
MPAAKRVKLDGGDKKYSIGLDIGTNSVGWAVITDEYKVPSKKFKVLGNTDRHSIKKNLIGALLFDSGETAEATRLKRTARRRYTRRKNRICYLQEIFSNEMAKVDDSFFHRLEESFLVEEDKKHERHPIFGNIVDEVAYHEKYPTIYHLRKKLVDSTDKADLRLIYLALAHMIKFRGHFLIEGDLNPDNSDVDKLFIQLVQTYNQLFEENPINASGVDAKAILSARLSKSRRLENLIAQLPGEKKNGLFGNLIALSLGLTPNFKSNFDLAEDAKLQLSKDTYDDDLDNLLAQIGDQYADLFLAAKNLSDAILLSDILRVNTEITKAPLSASMIKRYDEHHQDLTLLKALVRQQLPEKYKEIFFDQSKNGYAGYIDGGASQEEFYKFIKPILEKMDGTEELLVKLNREDLLRKQRTFDNGSIPHQIHLGELHAILRRQEDFYPFLKDNREKIEKILTFRIPYYVGPLARGNSRFAWMTRKSEETITPWNFEEVVDKGASAQSFIERMTNFDKNLPNEKVLPKHSLLYEYFTVYNELTKVKYVTEGMRKPAFLSGEQKKAIVDLLFKTNRKVTVKQLKEDYFKKIECFDSVEISGVEDRFNASLGTYHDLLKIIKDKDFLDNEENEDILEDIVLTLTLFEDREMIEERLKTYAHLFDDKVMKQLKRRRYTGWGRLSRKLINGIRDKQSGKTILDFLKSDGFANRNFMQLIHDDSLTFKEDIQKAQVSGQGDSLHEHIANLAGSPAIKKGILQTVKVVDELVKVMGRHKPENIVIEMARENQTTQKGQKNSRERMKRIEEGIKELGSQILKEHPVENTQLQNEKLYLYYLQNGRDMYVDQELDINRLSDYDVDHIVPQSFLKDDSIDNKVLTRSDKARGKSDNVPSEEVVKKMKNYWRQLLNAKLITQRKFDNLTKAERGGLSELDKAGFIKRQLVETRQITKHVAQILDSRMNTKYDENDKLIREVKVITLKSKLVSDFRKDFQFYKVREINNYHHAHDAYLNAVVGTALIKKYPKLESEFVYGDYKVYDVRKMIAKSEQEIGKATAKYFFYSNIMNFFKTEITLANGEIRKRPLIETNGETGEIVWDKGRDFATVRKVLSMPQVNIVKKTEVQTGGFSKESILPKRNSDKLIARKKDWDPKKYGGFDSPTVAYSVLVVAKVEKGKSKKLKSVKELLGITIMERSSFEKNPIDFLEAKGYKEVKKDLIIKLPKYSLFELENGRKRMLASAGELQKGNELALPSKYVNFLYLASHYEKLKGSPEDNEQKQLFVEQHKHYLDEIIEQISEFSKRVILADANLDKVLSAYNKHRDKPIREQAENIIHLFTLTNLGAPAAFKYFDTTIDRKRYTSTKEVLDATLIHQSITGLYETRIDLSQLGGDGGGSSEAAAKGGTLNIEDEHRLHETSKEPDVSLGSTWLSDFPQAWAETGGMGLAVRQAPLIIPLKATSTPVSIKQYPMSQEARLGIKPHIQRLLDQGILVPCQSPWNTPLLPVKKPGTNDYRPVQDLREVNKRVEDIHPTVPNPYNLLSGLPPSHQWYTVLDLKDAFFCLRLHPTSQPLFAFEWRDPEMGISGQLTWTRLPQGFKNSPTLFNEALHRDLADFRIQHPDLILLQYVDDLLLAATSELDCQQGTRALLQTLGNLGYRASAKKAQICQKQVKYLGYLLKEGQRWLTEARKETVMGQPTPKTPRQLREFLGTAGFCRLWIPGFAEMAAPLYPLTKPGTLFNWGPDQQKAYQEIKQALLTAPALGLPDLTKPFELFVDEKQGYAKGVLTQKLGPWRRPVAYLSKKLDPVAAGWPPCLRMVAAIAVLTKDAGKLTMGQPLVILAPHAVEALVKQPPDRWLSNARMTHYQALLLDTDRVQFGPVVALNPATLLPLPEEGLQHNCLDILAEAHGTRPDLTDQPLPDADHTWYTDGSSLLQEGQRKAGAAVTTETEVIWAKALPAGTSAQRAELIALTQALKMAEGKKLNVYTDSRYAFATAHIHGEIYRRRGWLTSEGKEIKNKDEILALLKALFLPKRLSIIHCPGHQKGHSAEARGNRMADQAARKAAITETPDTSTLLAGKRTADGSEFEKRTADGSEFESPKKKAKVE

SEQ ID NO: 2719 - protein, 2096 aa, synthetic construct
MPAAKRVKLDGGDKKYSIGLDIGTNSVGWAVITDEYKVPSKKFKVLGNTDRHSIKKNLIGALLFDSGETAEATRLKRTARRRYTRRKNRICYLQEIFSNEMAKVDDSFFHRLEESFLVEEDKKHERHPIFGNIVDEVAYHEKYPTIYHLRKKLVDSTDKADLRLIYLALAHMIKFRGHFLIEGDLNPDNSDVDKLFIQLVQTYNQLFEENPINASGVDAKAILSARLSKSRRLENLIAQLPGEKKNGLFGNLIALSLGLTPNFKSNFDLAEDAKLQLSKDTYDDDLDNLLAQIGDQYADLFLAAKNLSDAILLSDILRVNTEITKAPLSASMIKRYDEHHQDLTLLKALVRQQLPEKYKEIFFDQSKNGYAGYIDGGASQEEFYKFIKPILEKMDGTEELLVKLNREDLLRKQRTFDNGSIPHQIHLGELHAILRRQEDFYPFLKDNREKIEKILTFRIPYYVGPLARGNSRFAWMTRKSEETITPWNFEEVVDKGASAQSFIERMTNFDKNLPNEKVLPKHSLLYEYFTVYNELTKVKYVTEGMRKPAFLSGEQKKAIVDLLFKTNRKVTVKQLKEDYFKKIECFDSVEISGVEDRFNASLGTYHDLLKIIKDKDFLDNEENEDILEDIVLTLTLFEDREMIEERLKTYAHLFDDKVMKQLKRRRYTGWGRLSRKLINGIRDKQSGKTILDFLKSDGFANRNFMQLIHDDSLTFKEDIQKAQVSGQGDSLHEHIANLAGSPAIKKGILQTVKVVDELVKVMGRHKPENIVIEMARENQTTQKGQKNSRERMKRIEEGIKELGSQILKEHPVENTQLQNEKLYLYYLQNGRDMYVDQELDINRLSDYDVDHIVPQSFLKDDSIDNKVLTRSDKARGKSDNVPSEEVVKKMKNYWRQLLNAKLITQRKFDNLTKAERGGLSELDKAGFIKRQLVETRQITKHVAQILDSRMNTKYDENDKLIREVKVITLKSKLVSDFRKDFQFYKVREINNYHHAHDAYLNAVVGTALIKKYPKLESEFVYGDYKVYDVRKMIAKSEQEIGKATAKYFFYSNIMNFFKTEITLANGEIRKRPLIETNGETGEIVWDKGRDFATVRKVLSMPQVNIVKKTEVQTGGFSKESILPKRNSDKLIARKKDWDPKKYGGFDSPTVAYSVLVVAKVEKGKSKKLKSVKELLGITIMERSSFEKNPIDFLEAKGYKEVKKDLIIKLPKYSLFELENGRKRMLASAGELQKGNELALPSKYVNFLYLASHYEKLKGSPEDNEQKQLFVEQHKHYLDEIIEQISEFSKRVILADANLDKVLSAYNKHRDKPIREQAENIIHLFTLTNLGAPAAFKYFDTTIDRKRYTSTKEVLDATLIHQSITGLYETRIDLSQLGGDGGGGGEAAAKPAPGGTLNIEDEHRLHETSKEPDVSLGSTWLSDFPQAWAETGGMGLAVRQAPLIIPLKATSTPVSIKQYPMSQEARLGIKPHIQRLLDQGILVPCQSPWNTPLLPVKKPGTNDYRPVQDLREVNKRVEDIHPTVPNPYNLLSGLPPSHQWYTVLDLKDAFFCLRLHPTSQPLFAFEWRDPEMGISGQLTWTRLPQGFKNSPTLFNEALHRDLADFRIQHPDLILLQYVDDLLLAATSELDCQQGTRALLQTLGNLGYRASAKKAQICQKQVKYLGYLLKEGQRWLTEARKETVMGQPTPKTPRQLREFLGTAGFCRLWIPGFAEMAAPLYPLTKPGTLFNWGPDQQKAYQEIKQALLTAPALGLPDLTKPFELFVDEKQGYAKGVLTQKLGPWRRPVAYLSKKLDPVAAGWPPCLRMVAAIAVLTKDAGKLTMGQPLVILAPHAVEALVKQPPDRWLSNARMTHYQALLLDTDRVQFGPVVALNPATLLPLPEEGLQHNCLDILAEAHGTRPDLTDQPLPDADHTWYTDGSSLLQEGQRKAGAAVTTETEVIWAKALPAGTSAQRAELIALTQALKMAEGKKLNVYTDSRYAFATAHIHGEIYRRRGWLTSEGKEIKNKDEILALLKALFLPKRLSIIHCPGHQKGHSAEARGNRMADQAARKAAITETPDTSTLLAGKRTADGSEFEKRTADGSEFESPKKKAKVE

SEQ ID NO: 2720 - protein, 2105 aa, synthetic construct
MPAAKRVKLDGGDKKYSIGLDIGTNSVGWAVITDEYKVPSKKFKVLGNTDRHSIKKNLIGALLFDSGETAEATRLKRTARRRYTRRKNRICYLQEIFSNEMAKVDDSFFHRLEESFLVEEDKKHERHPIFGNIVDEVAYHEKYPTIYHLRKKLVDSTDKADLRLIYLALAHMIKFRGHFLIEGDLNPDNSDVDKLFIQLVQTYNQLFEENPINASGVDAKAILSARLSKSRRLENLIAQLPGEKKNGLFGNLIALSLGLTPNFKSNFDLAEDAKLQLSKDTYDDDLDNLLAQIGDQYADLFLAAKNLSDAILLSDILRVNTEITKAPLSASMIKRYDEHHQDLTLLKALVRQQLPEKYKEIFFDQSKNGYAGYIDGGASQEEFYKFIKPILEKMDGTEELLVKLNREDLLRKQRTFDNGSIPHQIHLGELHAILRRQEDFYPFLKDNREKIEKILTFRIPYYVGPLARGNSRFAWMTRKSEETITPWNFEEVVDKGASAQSFIERMTNFDKNLPNEKVLPKHSLLYEYFTVYNELTKVKYVTEGMRKPAFLSGEQKKAIVDLLFKTNRKVTVKQLKEDYFKKIECFDSVEISGVEDRFNASLGTYHDLLKIIKDKDFLDNEENEDILEDIVLTLTLFEDREMIEERLKTYAHLFDDKVMKQLKRRRYTGWGRLSRKLINGIRDKQSGKTILDFLKSDGFANRNFMQLIHDDSLTFKEDIQKAQVSGQGDSLHEHIANLAGSPAIKKGILQTVKVVDELVKVMGRHKPENIVIEMARENQTTQKGQKNSRERMKRIEEGIKELGSQILKEHPVENTQLQNEKLYLYYLQNGRDMYVDQELDINRLSDYDVDHIVPQSFLKDDSIDNKVLTRSDKARGKSDNVPSEEVVKKMKNYWRQLLNAKLITQRKFDNLTKAERGGLSELDKAGFIKRQLVETRQITKHVAQILDSRMNTKYDENDKLIREVKVITLKSKLVSDFRKDFQFYKVREINNYHHAHDAYLNAVVGTALIKKYPKLESEFVYGDYKVYDVRKMIAKSEQEIGKATAKYFFYSNIMNFFKTEITLANGEIRKRPLIETNGETGEIVWDKGRDFATVRKVLSMPQVNIVKKTEVQTGGFSKESILPKRNSDKLIARKKDWDPKKYGGFDSPTVAYSVLVVAKVEKGKSKKLKSVKELLGITIMERSSFEKNPIDFLEAKGYKEVKKDLIIKLPKYSLFELENGRKRMLASAGELQKGNELALPSKYVNFLYLASHYEKLKGSPEDNEQKQLFVEQHKHYLDEIIEQISEFSKRVILADANLDKVLSAYNKHRDKPIREQAENIIHLFTLTNLGAPAAFKYFDTTIDRKRYTSTKEVLDATLIHQSITGLYETRIDLSQLGGDGGEAAAKEAAAKEAAAKEAAAKGGTLNIEDEHRLHETSKEPDVSLGSTWLSDFPQAWAETGGMGLAVRQAPLIIPLKATSTPVSIKQYPMSQEARLGIKPHIQRLLDQGILVPCQSPWNTPLLPVKKPGTNDYRPVQDLREVNKRVEDIHPTVPNPYNLLSGLPPSHQWYTVLDLKDAFFCLRLHPTSQPLFAFEWRDPEMGISGQLTWTRLPQGFKNSPTLFNEALHRDLADFRIQHPDLILLQYVDDLLLAATSELDCQQGTRALLQTLGNLGYRASAKKAQICQKQVKYLGYLLKEGQRWLTEARKETVMGQPTPKTPRQLREFLGTAGFCRLWIPGFAEMAAPLYPLTKPGTLFNWGPDQQKAYQEIKQALLTAPALGLPDLTKPFELFVDEKQGYAKGVLTQKLGPWRRPVAYLSKKLDPVAAGWPPCLRMVAAIAVLTKDAGKLTMGQPLVILAPHAVEALVKQPPDRWLSNARMTHYQALLLDTDRVQFGPVVALNPATLLPLPEEGLQHNCLDILAEAHGTRPDLTDQPLPDADHTWYTDGSSLLQEGQRKAGAAVTTETEVIWAKALPAGTSAQRAELIALTQALKMAEGKKLNVYTDSRYAFATAHIHGEIYRRRGWLTSEGKEIKNKDEILALLKALFLPKRLSIIHCPGHQKGHSAEARGNRMADQAARKAAITETPDTSTLLAGKRTADGSEFEKRTADGSEFESPKKKAKVE

SEQ ID NO: 2721 - protein, 2096 aa, synthetic construct
MPAAKRVKLDGGDKKYSIGLDIGTNSVGWAVITDEYKVPSKKFKVLGNTDRHSIKKNLIGALLFDSGETAEATRLKRTARRRYTRRKNRICYLQEIFSNEMAKVDDSFFHRLEESFLVEEDKKHERHPIFGNIVDEVAYHEKYPTIYHLRKKLVDSTDKADLRLIYLALAHMIKFRGHFLIEGDLNPDNSDVDKLFIQLVQTYNQLFEENPINASGVDAKAILSARLSKSRRLENLIAQLPGEKKNGLFGNLIALSLGLTPNFKSNFDLAEDAKLQLSKDTYDDDLDNLLAQIGDQYADLFLAAKNLSDAILLSDILRVNTEITKAPLSASMIKRYDEHHQDLTLLKALVRQQLPEKYKEIFFDQSKNGYAGYIDGGASQEEFYKFIKPILEKMDGTEELLVKLNREDLLRKQRTFDNGSIPHQIHLGELHAILRRQEDFYPFLKDNREKIEKILTFRIPYYVGPLARGNSRFAWMTRKSEETITPWNFEEVVDKGASAQSFIERMTNFDKNLPNEKVLPKHSLLYEYFTVYNELTKVKYVTEGMRKPAFLSGEQKKAIVDLLFKTNRKVTVKQLKEDYFKKIECFDSVEISGVEDRFNASLGTYHDLLKIIKDKDFLDNEENEDILEDIVLTLTLFEDREMIEERLKTYAHLFDDKVMKQLKRRRYTGWGRLSRKLINGIRDKQSGKTILDFLKSDGFANRNFMQLIHDDSLTFKEDIQKAQVSGQGDSLHEHIANLAGSPAIKKGILQTVKVVDELVKVMGRHKPENIVIEMARENQTTQKGQKNSRERMKRIEEGIKELGSQILKEHPVENTQLQNEKLYLYYLQNGRDMYVDQELDINRLSDYDVDHIVPQSFLKDDSIDNKVLTRSDKARGKSDNVPSEEVVKKMKNYWRQLLNAKLITQRKFDNLTKAERGGLSELDKAGFIKRQLVETRQITKHVAQILDSRMNTKYDENDKLIREVKVITLKSKLVSDFRKDFQFYKVREINNYHHAHDAYLNAVVGTALIKKYPKLESEFVYGDYKVYDVRKMIAKSEQEIGKATAKYFFYSNIMNFFKTEITLANGEIRKRPLIETNGETGEIVWDKGRDFATVRKVLSMPQVNIVKKTEVQTGGFSKESILPKRNSDKLIARKKDWDPKKYGGFDSPTVAYSVLVVAKVEKGKSKKLKSVKELLGITIMERSSFEKNPIDFLEAKGYKEVKKDLIIKLPKYSLFELENGRKRMLASAGELQKGNELALPSKYVNFLYLASHYEKLKGSPEDNEQKQLFVEQHKHYLDEIIEQISEFSKRVILADANLDKVLSAYNKHRDKPIREQAENIIHLFTLTNLGAPAAFKYFDTTIDRKRYTSTKEVLDATLIHQSITGLYETRIDLSQLGGDGGGGGEAAAKGGSGGTLNIEDEHRLHETSKEPDVSLGSTWLSDFPQAWAETGGMGLAVRQAPLIIPLKATSTPVSIKQYPMSQEARLGIKPHIQRLLDQGILVPCQSPWNTPLLPVKKPGTNDYRPVQDLREVNKRVEDIHPTVPNPYNLLSGLPPSHQWYTVLDLKDAFFCLRLHPTSQPLFAFEWRDPEMGISGQLTWTRLPQGFKNSPTLFNEALHRDLADFRIQHPDLILLQYVDDLLLAATSELDCQQGTRALLQTLGNLGYRASAKKAQICQKQVKYLGYLLKEGQRWLTEARKETVMGQPTPKTPRQLREFLGTAGFCRLWIPGFAEMAAPLYPLTKPGTLFNWGPDQQKAYQEIKQALLTAPALGLPDLTKPFELFVDEKQGYAKGVLTQKLGPWRRPVAYLSKKLDPVAAGWPPCLRMVAAIAVLTKDAGKLTMGQPLVILAPHAVEALVKQPPDRWLSNARMTHYQALLLDTDRVQFGPVVALNPATLLPLPEEGLQHNCLDILAEAHGTRPDLTDQPLPDADHTWYTDGSSLLQEGQRKAGAAVTTETEVIWAKALPAGTSAQRAELIALTQALKMAEGKKLNVYTDSRYAFATAHIHGEIYRRRGWLTSEGKEIKNKDEILALLKALFLPKRLSIIHCPGHQKGHSAEARGNRMADQAARKAAITETPDTSTLLAGKRTADGSEFEKRTADGSEFESPKKKAKVE

SEQ ID NO: 2722 - protein, 2096 aa, synthetic construct
MPAAKRVKLDGGDKKYSIGLDIGTNSVGWAVITDEYKVPSKKFKVLGNTDRHSIKKNLIGALLFDSGETAEATRLKRTARRRYTRRKNRICYLQEIFSNEMAKVDDSFFHRLEESFLVEEDKKHERHPIFGNIVDEVAYHEKYPTIYHLRKKLVDSTDKADLRLIYLALAHMIKFRGHFLIEGDLNPDNSDVDKLFIQLVQTYNQLFEENPINASGVDAKAILSARLSKSRRLENLIAQLPGEKKNGLFGNLIALSLGLTPNFKSNFDLAEDAKLQLSKDTYDDDLDNLLAQIGDQYADLFLAAKNLSDAILLSDILRVNTEITKAPLSASMIKRYDEHHQDLTLLKALVRQQLPEKYKEIFFDQSKNGYAGYIDGGASQEEFYKFIKPILEKMDGTEELLVKLNREDLLRKQRTFDNGSIPHQIHLGELHAILRRQEDFYPFLKDNREKIEKILTFRIPYYVGPLARGNSRFAWMTRKSEETITPWNFEEVVDKGASAQSFIERMTNFDKNLPNEKVLPKHSLLYEYFTVYNELTKVKYVTEGMRKPAFLSGEQKKAIVDLLFKTNRKVTVKQLKEDYFKKIECFDSVEISGVEDRFNASLGTYHDLLKIIKDKDFLDNEENEDILEDIVLTLTLFEDREMIEERLKTYAHLFDDKVMKQLKRRRYTGWGRLSRKLINGIRDKQSGKTILDFLKSDGFANRNFMQLIHDDSLTFKEDIQKAQVSGQGDSLHEHIANLAGSPAIKKGILQTVKVVDELVKVMGRHKPENIVIEMARENQTTQKGQKNSRERMKRIEEGIKELGSQILKEHPVENTQLQNEKLYLYYLQNGRDMYVDQELDINRLSDYDVDHIVPQSFLKDDSIDNKVLTRSDKARGKSDNVPSEEVVKKMKNYWRQLLNAKLITQRKFDNLTKAERGGLSELDKAGFIKRQLVETRQITKHVAQILDSRMNTKYDENDKLIREVKVITLKSKLVSDFRKDFQFYKVREINNYHHAHDAYLNAVVGTALIKKYPKLESEFVYGDYKVYDVRKMIAKSEQEIGKATAKYFFYSNIMNFFKTEITLANGEIRKRPLIETNGETGEIVWDKGRDFATVRKVLSMPQVNIVKKTEVQTGGFSKESILPKRNSDKLIARKKDWDPKKYGGFDSPTVAYSVLVVAKVEKGKSKKLKSVKELLGITIMERSSFEKNPIDFLEAKGYKEVKKDLIIKLPKYSLFELENGRKRMLASAGELQKGNELALPSKYVNFLYLASHYEKLKGSPEDNEQKQLFVEQHKHYLDEIIEQISEFSKRVILADANLDKVLSAYNKHRDKPIREQAENIIHLFTLTNLGAPAAFKYFDTTIDRKRYTSTKEVLDATLIHQSITGLYETRIDLSQLGGDGGGGGGGSEAAAKGGTLNIEDEHRLHETSKEPDVSLGSTWLSDFPQAWAETGGMGLAVRQAPLIIPLKATSTPVSIKQYPMSQEARLGIKPHIQRLLDQGILVPCQSPWNTPLLPVKKPGTNDYRPVQDLREVNKRVEDIHPTVPNPYNLLSGLPPSHQWYTVLDLKDAFFCLRLHPTSQPLFAFEWRDPEMGISGQLTWTRLPQGFKNSPTLFNEALHRDLADFRIQHPDLILLQYVDDLLLAATSELDCQQGTRALLQTLGNLGYRASAKKAQICQKQVKYLGYLLKEGQRWLTEARKETVMGQPTPKTPRQLREFLGTAGFCRLWIPGFAEMAAPLYPLTKPGTLFNWGPDQQKAYQEIKQALLTAPALGLPDLTKPFELFVDEKQGYAKGVLTQKLGPWRRPVAYLSKKLDPVAAGWPPCLRMVAAIAVLTKDAGKLTMGQPLVILAPHAVEALVKQPPDRWLSNARMTHYQALLLDTDRVQFGPVVALNPATLLPLPEEGLQHNCLDILAEAHGTRPDLTDQPLPDADHTWYTDGSSLLQEGQRKAGAAVTTETEVIWAKALPAGTSAQRAELIALTQALKMAEGKKLNVYTDSRYAFATAHIHGEIYRRRGWLTSEGKEIKNKDEILALLKALFLPKRLSIIHCPGHQKGHSAEARGNRMADQAARKAAITETPDTSTLLAGKRTADGSEFEKRTADGSEFESPKKKAKVE

SEQ ID NO: 2723 - protein, 2096 aa, synthetic construct
MPAAKRVKLDGGDKKYSIGLDIGTNSVGWAVITDEYKVPSKKFKVLGNTDRHSIKKNLIGALLFDSGETAEATRLKRTARRRYTRRKNRICYLQEIFSNEMAKVDDSFFHRLEESFLVEEDKKHERHPIFGNIVDEVAYHEKYPTIYHLRKKLVDSTDKADLRLIYLALAHMIKFRGHFLIEGDLNPDNSDVDKLFIQLVQTYNQLFEENPINASGVDAKAILSARLSKSRRLENLIAQLPGEKKNGLFGNLIALSLGLTPNFKSNFDLAEDAKLQLSKDTYDDDLDNLLAQIGDQYADLFLAAKNLSDAILLSDILRVNTEITKAPLSASMIKRYDEHHQDLTLLKALVRQQLPEKYKEIFFDQSKNGYAGYIDGGASQEEFYKFIKPILEKMDGTEELLVKLNREDLLRKQRTFDNGSIPHQIHLGELHAILRRQEDFYPFLKDNREKIEKILTFRIPYYVGPLARGNSRFAWMTRKSEETITPWNFEEVVDKGASAQSFIERMTNFDKNLPNEKVLPKHSLLYEYFTVYNELTKVKYVTEGMRKPAFLSGEQKKAIVDLLFKTNRKVTVKQLKEDYFKKIECFDSVEISGVEDRFNASLGTYHDLLKIIKDKDFLDNEENEDILEDIVLTLTLFEDREMIEERLKTYAHLFDDKVMKQLKRRRYTGWGRLSRKLINGIRDKQSGKTILDFLKSDGFANRNFMQLIHDDSLTFKEDIQKAQVSGQGDSLHEHIANLAGSPAIKKGILQTVKVVDELVKVMGRHKPENIVIEMARENQTTQKGQKNSRERMKRIEEGIKELGSQILKEHPVENTQLQNEKLYLYYLQNGRDMYVDQELDINRLSDYDVDHIVPQSFLKDDSIDNKVLTRSDKARGKSDNVPSEEVVKKMKNYWRQLLNAKLITQRKFDNLTKAERGGLSELDKAGFIKRQLVETRQITKHVAQILDSRMNTKYDENDKLIREVKVITLKSKLVSDFRKDFQFYKVREINNYHHAHDAYLNAVVGTALIKKYPKLESEFVYGDYKVYDVRKMIAKSEQEIGKATAKYFFYSNIMNFFKTEITLANGEIRKRPLIETNGETGEIVWDKGRDFATVRKVLSMPQVNIVKKTEVQTGGFSKESILPKRNSDKLIARKKDWDPKKYGGFDSPTVAYSVLVVAKVEKGKSKKLKSVKELLGITIMERSSFEKNPIDFLEAKGYKEVKKDLIIKLPKYSLFELENGRKRMLASAGELQKGNELALPSKYVNFLYLASHYEKLKGSPEDNEQKQLFVEQHKHYLDEIIEQISEFSKRVILADANLDKVLSAYNKHRDKPIREQAENIIHLFTLTNLGAPAAFKYFDTTIDRKRYTSTKEVLDATLIHQSITGLYETRIDLSQLGGDGGEAAAKGSSPAPGGTLNIEDEHRLHETSKEPDVSLGSTWLSDFPQAWAETGGMGLAVRQAPLIIPLKATSTPVSIKQYPMSQEARLGIKPHIQRLLDQGILVPCQSPWNTPLLPVKKPGTNDYRPVQDLREVNKRVEDIHPTVPNPYNLLSGLPPSHQWYTVLDLKDAFFCLRLHPTSQPLFAFEWRDPEMGISGQLTWTRLPQGFKNSPTLFNEALHRDLADFRIQHPDLILLQYVDDLLLAATSELDCQQGTRALLQTLGNLGYRASAKKAQICQKQVKYLGYLLKEGQRWLTEARKETVMGQPTPKTPRQLREFLGTAGFCRLWIPGFAEMAAPLYPLTKPGTLFNWGPDQQKAYQEIKQALLTAPALGLPDLTKPFELFVDEKQGYAKGVLTQKLGPWRRPVAYLSKKLDPVAAGWPPCLRMVAAIAVLTKDAGKLTMGQPLVILAPHAVEALVKQPPDRWLSNARMTHYQALLLDTDRVQFGPVVALNPATLLPLPEEGLQHNCLDILAEAHGTRPDLTDQPLPDADHTWYTDGSSLLQEGQRKAGAAVTTETEVIWAKALPAGTSAQRAELIALTQALKMAEGKKLNVYTDSRYAFATAHIHGEIYRRRGWLTSEGKEIKNKDEILALLKALFLPKRLSIIHCPGHQKGHSAEARGNRMADQAARKAAITETPDTSTLLAGKRTADGSEFEKRTADGSEFESPKKKAKVE

SEQ ID NO: 2724 - protein, 2093 aa, synthetic construct
MPAAKRVKLDGGDKKYSIGLDIGTNSVGWAVITDEYKVPSKKFKVLGNTDRHSIKKNLIGALLFDSGETAEATRLKRTARRRYTRRKNRICYLQEIFSNEMAKVDDSFFHRLEESFLVEEDKKHERHPIFGNIVDEVAYHEKYPTIYHLRKKLVDSTDKADLRLIYLALAHMIKFRGHFLIEGDLNPDNSDVDKLFIQLVQTYNQLFEENPINASGVDAKAILSARLSKSRRLENLIAQLPGEKKNGLFGNLIALSLGLTPNFKSNFDLAEDAKLQLSKDTYDDDLDNLLAQIGDQYADLFLAAKNLSDAILLSDILRVNTEITKAPLSASMIKRYDEHHQDLTLLKALVRQQLPEKYKEIFFDQSKNGYAGYIDGGASQEEFYKFIKPILEKMDGTEELLVKLNREDLLRKQRTFDNGSIPHQIHLGELHAILRRQEDFYPFLKDNREKIEKILTFRIPYYVGPLARGNSRFAWMTRKSEETITPWNFEEVVDKGASAQSFIERMTNFDKNLPNEKVLPKHSLLYEYFTVYNELTKVKYVTEGMRKPAFLSGEQKKAIVDLLFKTNRKVTVKQLKEDYFKKIECFDSVEISGVEDRFNASLGTYHDLLKIIKDKDFLDNEENEDILEDIVLTLTLFEDREMIEERLKTYAHLFDDKVMKQLKRRRYTGWGRLSRKLINGIRDKQSGKTILDFLKSDGFANRNFMQLIHDDSLTFKEDIQKAQVSGQGDSLHEHIANLAGSPAIKKGILQTVKVVDELVKVMGRHKPENIVIEMARENQTTQKGQKNSRERMKRIEEGIKELGSQILKEHPVENTQLQNEKLYLYYLQNGRDMYVDQELDINRLSDYDVDHIVPQSFLKDDSIDNKVLTRSDKARGKSDNVPSEEVVKKMKNYWRQLLNAKLITQRKFDNLTKAERGGLSELDKAGFIKRQLVETRQITKHVAQILDSRMNTKYDENDKLIREVKVITLKSKLVSDFRKDFQFYKVREINNYHHAHDAYLNAVVGTALIKKYPKLESEFVYGDYKVYDVRKMIAKSEQEIGKATAKYFFYSNIMNFFKTEITLANGEIRKRPLIETNGETGEIVWDKGRDFATVRKVLSMPQVNIVKKTEVQTGGFSKESILPKRNSDKLIARKKDWDPKKYGGFDSPTVAYSVLVVAKVEKGKSKKLKSVKELLGITIMERSSFEKNPIDFLEAKGYKEVKKDLIIKLPKYSLFELENGRKRMLASAGELQKGNELALPSKYVNFLYLASHYEKLKGSPEDNEQKQLFVEQHKHYLDEIIEQISEFSKRVILADANLDKVLSAYNKHRDKPIREQAENIIHLFTLTNLGAPAAFKYFDTTIDRKRYTSTKEVLDATLIHQSITGLYETRIDLSQLGGDGGEAAAKPAPGGTLNIEDEHRLHETSKEPDVSLGSTWLSDFPQAWAETGGMGLAVRQAPLIIPLKATSTPVSIKQYPMSQEARLGIKPHIQRLLDQGILVPCQSPWNTPLLPVKKPGTNDYRPVQDLREVNKRVEDIHPTVPNPYNLLSGLPPSHQWYTVLDLKDAFFCLRLHPTSQPLFAFEWRDPEMGISGQLTWTRLPQGFKNSPTLFNEALHRDLADFRIQHPDLILLQYVDDLLLAATSELDCQQGTRALLQTLGNLGYRASAKKAQICQKQVKYLGYLLKEGQRWLTEARKETVMGQPTPKTPRQLREFLGTAGFCRLWIPGFAEMAAPLYPLTKPGTLFNWGPDQQKAYQEIKQALLTAPALGLPDLTKPFELFVDEKQGYAKGVLTQKLGPWRRPVAYLSKKLDPVAAGWPPCLRMVAAIAVLTKDAGKLTMGQPLVILAPHAVEALVKQPPDRWLSNARMTHYQALLLDTDRVQFGPVVALNPATLLPLPEEGLQHNCLDILAEAHGTRPDLTDQPLPDADHTWYTDGSSLLQEGQRKAGAAVTTETEVIWAKALPAGTSAQRAELIALTQALKMAEGKKLNVYTDSRYAFATAHIHGEIYRRRGWLTSEGKEIKNKDEILALLKALFLPKRLSIIHCPGHQKGHSAEARGNRMADQAARKAAITETPDTSTLLAGKRTADGSEFEKRTADGSEFESPKKKAKVE

SEQ ID NO: 2725 - protein, 2100 aa, synthetic construct
MPAAKRVKLDGGDKKYSIGLDIGTNSVGWAVITDEYKVPSKKFKVLGNTDRHSIKKNLIGALLFDSGETAEATRLKRTARRRYTRRKNRICYLQEIFSNEMAKVDDSFFHRLEESFLVEEDKKHERHPIFGNIVDEVAYHEKYPTIYHLRKKLVDSTDKADLRLIYLALAHMIKFRGHFLIEGDLNPDNSDVDKLFIQLVQTYNQLFEENPINASGVDAKAILSARLSKSRRLENLIAQLPGEKKNGLFGNLIALSLGLTPNFKSNFDLAEDAKLQLSKDTYDDDLDNLLAQIGDQYADLFLAAKNLSDAILLSDILRVNTEITKAPLSASMIKRYDEHHQDLTLLKALVRQQLPEKYKEIFFDQSKNGYAGYIDGGASQEEFYKFIKPILEKMDGTEELLVKLNREDLLRKQRTFDNGSIPHQIHLGELHAILRRQEDFYPFLKDNREKIEKILTFRIPYYVGPLARGNSRFAWMTRKSEETITPWNFEEVVDKGASAQSFIERMTNFDKNLPNEKVLPKHSLLYEYFTVYNELTKVKYVTEGMRKPAFLSGEQKKAIVDLLFKTNRKVTVKQLKEDYFKKIECFDSVEISGVEDRFNASLGTYHDLLKIIKDKDFLDNEENEDILEDIVLTLTLFEDREMIEERLKTYAHLFDDKVMKQLKRRRYTGWGRLSRKLINGIRDKQSGKTILDFLKSDGFANRNFMQLIHDDSLTFKEDIQKAQVSGQGDSLHEHIANLAGSPAIKKGILQTVKVVDELVKVMGRHKPENIVIEMARENQTTQKGQKNSRERMKRIEEGIKELGSQILKEHPVENTQLQNEKLYLYYLQNGRDMYVDQELDINRLSDYDVDHIVPQSFLKDDSIDNKVLTRSDKARGKSDNVPSEEVVKKMKNYWRQLLNAKLITQRKFDNLTKAERGGLSELDKAGFIKRQLVETRQITKHVAQILDSRMNTKYDENDKLIREVKVITLKSKLVSDFRKDFQFYKVREINNYHHAHDAYLNAVVGTALIKKYPKLESEFVYGDYKVYDVRKMIAKSEQEIGKATAKYFFYSNIMNFFKTEITLANGEIRKRPLIETNGETGEIVWDKGRDFATVRKVLSMPQVNIVKKTEVQTGGFSKESILPKRNSDKLIARKKDWDPKKYGGFDSPTVAYSVLVVAKVEKGKSKKLKSVKELLGITIMERSSFEKNPIDFLEAKGYKEVKKDLIIKLPKYSLFELENGRKRMLASAGELQKGNELALPSKYVNFLYLASHYEKLKGSPEDNEQKQLFVEQHKHYLDEIIEQISEFSKRVILADANLDKVLSAYNKHRDKPIREQAENIIHLFTLTNLGAPAAFKYFDTTIDRKRYTSTKEVLDATLIHQSITGLYETRIDLSQLGGDGGGGGGSEAAAKGGGGSGGTLNIEDEHRLHETSKEPDVSLGSTWLSDFPQAWAETGGMGLAVRQAPLIIPLKATSTPVSIKQYPMSQEARLGIKPHIQRLLDQGILVPCQSPWNTPLLPVKKPGTNDYRPVQDLREVNKRVEDIHPTVPNPYNLLSGLPPSHQWYTVLDLKDAFFCLRLHPTSQPLFAFEWRDPEMGISGQLTWTRLPQGFKNSPTLFNEALHRDLADFRIQHPDLILLQYVDDLLLAATSELDCQQGTRALLQTLGNLGYRASAKKAQICQKQVKYLGYLLKEGQRWLTEARKETVMGQPTPKTPRQLREFLGTAGFCRLWIPGFAEMAAPLYPLTKPGTLFNWGPDQQKAYQEIKQALLTAPALGLPDLTKPFELFVDEKQGYAKGVLTQKLGPWRRPVAYLSKKLDPVAAGWPPCLRMVAAIAVLTKDAGKLTMGQPLVILAPHAVEALVKQPPDRWLSNARMTHYQALLLDTDRVQFGPVVALNPATLLPLPEEGLQHNCLDILAEAHGTRPDLTDQPLPDADHTWYTDGSSLLQEGQRKAGAAVTTETEVIWAKALPAGTSAQRAELIALTQALKMAEGKKLNVYTDSRYAFATAHIHGEIYRRRGWLTSEGKEIKNKDEILALLKALFLPKRLSIIHCPGHQKGHSAEARGNRMADQAARKAAITETPDTSTLLAGKRTADGSEFEKRTADGSEFESPKKKAKVE

SEQ ID NO: 2726 - protein, 2093 aa, synthetic construct
MPAAKRVKLDGGDKKYSIGLDIGTNSVGWAVITDEYKVPSKKFKVLGNTDRHSIKKNLIGALLFDSGETAEATRLKRTARRRYTRRKNRICYLQEIFSNEMAKVDDSFFHRLEESFLVEEDKKHERHPIFGNIVDEVAYHEKYPTIYHLRKKLVDSTDKADLRLIYLALAHMIKFRGHFLIEGDLNPDNSDVDKLFIQLVQTYNQLFEENPINASGVDAKAILSARLSKSRRLENLIAQLPGEKKNGLFGNLIALSLGLTPNFKSNFDLAEDAKLQLSKDTYDDDLDNLLAQIGDQYADLFLAAKNLSDAILLSDILRVNTEITKAPLSASMIKRYDEHHQDLTLLKALVRQQLPEKYKEIFFDQSKNGYAGYIDGGASQEEFYKFIKPILEKMDGTEELLVKLNREDLLRKQRTFDNGSIPHQIHLGELHAILRRQEDFYPFLKDNREKIEKILTFRIPYYVGPLARGNSRFAWMTRKSEETITPWNFEEVVDKGASAQSFIERMTNFDKNLPNEKVLPKHSLLYEYFTVYNELTKVKYVTEGMRKPAFLSGEQKKAIVDLLFKTNRKVTVKQLKEDYFKKIECFDSVEISGVEDRFNASLGTYHDLLKIIKDKDFLDNEENEDILEDIVLTLTLFEDREMIEERLKTYAHLFDDKVMKQLKRRRYTGWGRLSRKLINGIRDKQSGKTILDFLKSDGFANRNFMQLIHDDSLTFKEDIQKAQVSGQGDSLHEHIANLAGSPAIKKGILQTVKVVDELVKVMGRHKPENIVIEMARENQTTQKGQKNSRERMKRIEEGIKELGSQILKEHPVENTQLQNEKLYLYYLQNGRDMYVDQELDINRLSDYDVDHIVPQSFLKDDSIDNKVLTRSDKARGKSDNVPSEEVVKKMKNYWRQLLNAKLITQRKFDNLTKAERGGLSELDKAGFIKRQLVETRQITKHVAQILDSRMNTKYDENDKLIREVKVITLKSKLVSDFRKDFQFYKVREINNYHHAHDAYLNAVVGTALIKKYPKLESEFVYGDYKVYDVRKMIAKSEQEIGKATAKYFFYSNIMNFFKTEITLANGEIRKRPLIETNGETGEIVWDKGRDFATVRKVLSMPQVNIVKKTEVQTGGFSKESILPKRNSDKLIARKKDWDPKKYGGFDSPTVAYSVLVVAKVEKGKSKKLKSVKELLGITIMERSSFEKNPIDFLEAKGYKEVKKDLIIKLPKYSLFELENGRKRMLASAGELQKGNELALPSKYVNFLYLASHYEKLKGSPEDNEQKQLFVEQHKHYLDEIIEQISEFSKRVILADANLDKVLSAYNKHRDKPIREQAENIIHLFTLTNLGAPAAFKYFDTTIDRKRYTSTKEVLDATLIHQSITGLYETRIDLSQLGGDGGEAAAKGGSGGTLNIEDEHRLHETSKEPDVSLGSTWLSDFPQAWAETGGMGLAVRQAPLIIPLKATSTPVSIKQYPMSQEARLGIKPHIQRLLDQGILVPCQSPWNTPLLPVKKPGTNDYRPVQDLREVNKRVEDIHPTVPNPYNLLSGLPPSHQWYTVLDLKDAFFCLRLHPTSQPLFAFEWRDPEMGISGQLTWTRLPQGFKNSPTLFNEALHRDLADFRIQHPDLILLQYVDDLLLAATSELDCQQGTRALLQTLGNLGYRASAKKAQICQKQVKYLGYLLKEGQRWLTEARKETVMGQPTPKTPRQLREFLGTAGFCRLWIPGFAEMAAPLYPLTKPGTLFNWGPDQQKAYQEIKQALLTAPALGLPDLTKPFELFVDEKQGYAKGVLTQKLGPWRRPVAYLSKKLDPVAAGWPPCLRMVAAIAVLTKDAGKLTMGQPLVILAPHAVEALVKQPPDRWLSNARMTHYQALLLDTDRVQFGPVVALNPATLLPLPEEGLQHNCLDILAEAHGTRPDLTDQPLPDADHTWYTDGSSLLQEGQRKAGAAVTTETEVIWAKALPAGTSAQRAELIALTQALKMAEGKKLNVYTDSRYAFATAHIHGEIYRRRGWLTSEGKEIKNKDEILALLKALFLPKRLSIIHCPGHQKGHSAEARGNRMADQAARKAAITETPDTSTLLAGKRTADGSEFEKRTADGSEFESPKKKAKVE

SEQ ID NO: 2727 - protein, 2096 aa, synthetic construct
MPAAKRVKLDGGDKKYSIGLDIGTNSVGWAVITDEYKVPSKKFKVLGNTDRHSIKKNLIGALLFDSGETAEATRLKRTARRRYTRRKNRICYLQEIFSNEMAKVDDSFFHRLEESFLVEEDKKHERHPIFGNIVDEVAYHEKYPTIYHLRKKLVDSTDKADLRLIYLALAHMIKFRGHFLIEGDLNPDNSDVDKLFIQLVQTYNQLFEENPINASGVDAKAILSARLSKSRRLENLIAQLPGEKKNGLFGNLIALSLGLTPNFKSNFDLAEDAKLQLSKDTYDDDLDNLLAQIGDQYADLFLAAKNLSDAILLSDILRVNTEITKAPLSASMIKRYDEHHQDLTLLKALVRQQLPEKYKEIFFDQSKNGYAGYIDGGASQEEFYKFIKPILEKMDGTEELLVKLNREDLLRKQRTFDNGSIPHQIHLGELHAILRRQEDFYPFLKDNREKIEKILTFRIPYYVGPLARGNSRFAWMTRKSEETITPWNFEEVVDKGASAQSFIERMTNFDKNLPNEKVLPKHSLLYEYFTVYNELTKVKYVTEGMRKPAFLSGEQKKAIVDLLFKTNRKVTVKQLKEDYFKKIECFDSVEISGVEDRFNASLGTYHDLLKIIKDKDFLDNEENEDILEDIVLTLTLFEDREMIEERLKTYAHLFDDKVMKQLKRRRYTGWGRLSRKLINGIRDKQSGKTILDFLKSDGFANRNFMQLIHDDSLTFKEDIQKAQVSGQGDSLHEHIANLAGSPAIKKGILQTVKVVDELVKVMGRHKPENIVIEMARENQTTQKGQKNSRERMKRIEEGIKELGSQILKEHPVENTQLQNEKLYLYYLQNGRDMYVDQELDINRLSDYDVDHIVPQSFLKDDSIDNKVLTRSDKARGKSDNVPSEEVVKKMKNYWRQLLNAKLITQRKFDNLTKAERGGLSELDKAGFIKRQLVETRQITKHVAQILDSRMNTKYDENDKLIREVKVITLKSKLVSDFRKDFQFYKVREINNYHHAHDAYLNAVVGTALIKKYPKLESEFVYGDYKVYDVRKMIAKSEQEIGKATAKYFFYSNIMNFFKTEITLANGEIRKRPLIETNGETGEIVWDKGRDFATVRKVLSMPQVNIVKKTEVQTGGFSKESILPKRNSDKLIARKKDWDPKKYGGFDSPTVAYSVLVVAKVEKGKSKKLKSVKELLGITIMERSSFEKNPIDFLEAKGYKEVKKDLIIKLPKYSLFELENGRKRMLASAGELQKGNELALPSKYVNFLYLASHYEKLKGSPEDNEQKQLFVEQHKHYLDEIIEQISEFSKRVILADANLDKVLSAYNKHRDKPIREQAENIIHLFTLTNLGAPAAFKYFDTTIDRKRYTSTKEVLDATLIHQSITGLYETRIDLSQLGGDGGEAAAKGGSGSSGGTLNIEDEHRLHETSKEPDVSLGSTWLSDFPQAWAETGGMGLAVRQAPLIIPLKATSTPVSIKQYPMSQEARLGIKPHIQRLLDQGILVPCQSPWNTPLLPVKKPGTNDYRPVQDLREVNKRVEDIHPTVPNPYNLLSGLPPSHQWYTVLDLKDAFFCLRLHPTSQPLFAFEWRDPEMGISGQLTWTRLPQGFKNSPTLFNEALHRDLADFRIQHPDLILLQYVDDLLLAATSELDCQQGTRALLQTLGNLGYRASAKKAQICQKQVKYLGYLLKEGQRWLTEARKETVMGQPTPKTPRQLREFLGTAGFCRLWIPGFAEMAAPLYPLTKPGTLFNWGPDQQKAYQEIKQALLTAPALGLPDLTKPFELFVDEKQGYAKGVLTQKLGPWRRPVAYLSKKLDPVAAGWPPCLRMVAAIAVLTKDAGKLTMGQPLVILAPHAVEALVKQPPDRWLSNARMTHYQALLLDTDRVQFGPVVALNPATLLPLPEEGLQHNCLDILAEAHGTRPDLTDQPLPDADHTWYTDGSSLLQEGQRKAGAAVTTETEVIWAKALPAGTSAQRAELIALTQALKMAEGKKLNVYTDSRYAFATAHIHGEIYRRRGWLTSEGKEIKNKDEILALLKALFLPKRLSIIHCPGHQKGHSAEARGNRMADQAARKAAITETPDTSTLLAGKRTADGSEFEKRTADGSEFESPKKKAKVE

SEQ ID NO: 2728 - protein, 2097 aa, synthetic construct
MPAAKRVKLDGGDKKYSIGLDIGTNSVGWAVITDEYKVPSKKFKVLGNTDRHSIKKNLIGALLFDSGETAEATRLKRTARRRYTRRKNRICYLQEIFSNEMAKVDDSFFHRLEESFLVEEDKKHERHPIFGNIVDEVAYHEKYPTIYHLRKKLVDSTDKADLRLIYLALAHMIKFRGHFLIEGDLNPDNSDVDKLFIQLVQTYNQLFEENPINASGVDAKAILSARLSKSRRLENLIAQLPGEKKNGLFGNLIALSLGLTPNFKSNFDLAEDAKLQLSKDTYDDDLDNLLAQIGDQYADLFLAAKNLSDAILLSDILRVNTEITKAPLSASMIKRYDEHHQDLTLLKALVRQQLPEKYKEIFFDQSKNGYAGYIDGGASQEEFYKFIKPILEKMDGTEELLVKLNREDLLRKQRTFDNGSIPHQIHLGELHAILRRQEDFYPFLKDNREKIEKILTFRIPYYVGPLARGNSRFAWMTRKSEETITPWNFEEVVDKGASAQSFIERMTNFDKNLPNEKVLPKHSLLYEYFTVYNELTKVKYVTEGMRKPAFLSGEQKKAIVDLLFKTNRKVTVKQLKEDYFKKIECFDSVEISGVEDRFNASLGTYHDLLKIIKDKDFLDNEENEDILEDIVLTLTLFEDREMIEERLKTYAHLFDDKVMKQLKRRRYTGWGRLSRKLINGIRDKQSGKTILDFLKSDGFANRNFMQLIHDDSLTFKEDIQKAQVSGQGDSLHEHIANLAGSPAIKKGILQTVKVVDELVKVMGRHKPENIVIEMARENQTTQKGQKNSRERMKRIEEGIKELGSQILKEHPVENTQLQNEKLYLYYLQNGRDMYVDQELDINRLSDYDVDHIVPQSFLKDDSIDNKVLTRSDKARGKSDNVPSEEVVKKMKNYWRQLLNAKLITQRKFDNLTKAERGGLSELDKAGFIKRQLVETRQITKHVAQILDSRMNTKYDENDKLIREVKVITLKSKLVSDFRKDFQFYKVREINNYHHAHDAYLNAVVGTALIKKYPKLESEFVYGDYKVYDVRKMIAKSEQEIGKATAKYFFYSNIMNFFKTEITLANGEIRKRPLIETNGETGEIVWDKGRDFATVRKVLSMPQVNIVKKTEVQTGGFSKESILPKRNSDKLIARKKDWDPKKYGGFDSPTVAYSVLVVAKVEKGKSKKLKSVKELLGITIMERSSFEKNPIDFLEAKGYKEVKKDLIIKLPKYSLFELENGRKRMLASAGELQKGNELALPSKYVNFLYLASHYEKLKGSPEDNEQKQLFVEQHKHYLDEIIEQISEFSKRVILADANLDKVLSAYNKHRDKPIREQAENIIHLFTLTNLGAPAAFKYFDTTIDRKRYTSTKEVLDATLIHQSITGLYETRIDLSQLGGDGGGSSGSSGSSGSSGGTLNIEDEHRLHETSKEPDVSLGSTWLSDFPQAWAETGGMGLAVRQAPLIIPLKATSTPVSIKQYPMSQEARLGIKPHIQRLLDQGILVPCQSPWNTPLLPVKKPGTNDYRPVQDLREVNKRVEDIHPTVPNPYNLLSGLPPSHQWYTVLDLKDAFFCLRLHPTSQPLFAFEWRDPEMGISGQLTWTRLPQGFKNSPTLFNEALHRDLADFRIQHPDLILLQYVDDLLLAATSELDCQQGTRALLQTLGNLGYRASAKKAQICQKQVKYLGYLLKEGQRWLTEARKETVMGQPTPKTPRQLREFLGTAGFCRLWIPGFAEMAAPLYPLTKPGTLFNWGPDQQKAYQEIKQALLTAPALGLPDLTKPFELFVDEKQGYAKGVLTQKLGPWRRPVAYLSKKLDPVAAGWPPCLRMVAAIAVLTKDAGKLTMGQPLVILAPHAVEALVKQPPDRWLSNARMTHYQALLLDTDRVQFGPVVALNPATLLPLPEEGLQHNCLDILAEAHGTRPDLTDQPLPDADHTWYTDGSSLLQEGQRKAGAAVTTETEVIWAKALPAGTSAQRAELIALTQALKMAEGKKLNVYTDSRYAFATAHIHGEIYRRRGWLTSEGKEIKNKDEILALLKALFLPKRLSIIHCPGHQKGHSAEARGNRMADQAARKAAITETPDTSTLLAGKRTADGSEFEKRTADGSEFESPKKKAKVE

SEQ ID NO: 2729 - protein, 2095 aa, synthetic construct
MPAAKRVKLDGGDKKYSIGLDIGTNSVGWAVITDEYKVPSKKFKVLGNTDRHSIKKNLIGALLFDSGETAEATRLKRTARRRYTRRKNRICYLQEIFSNEMAKVDDSFFHRLEESFLVEEDKKHERHPIFGNIVDEVAYHEKYPTIYHLRKKLVDSTDKADLRLIYLALAHMIKFRGHFLIEGDLNPDNSDVDKLFIQLVQTYNQLFEENPINASGVDAKAILSARLSKSRRLENLIAQLPGEKKNGLFGNLIALSLGLTPNFKSNFDLAEDAKLQLSKDTYDDDLDNLLAQIGDQYADLFLAAKNLSDAILLSDILRVNTEITKAPLSASMIKRYDEHHQDLTLLKALVRQQLPEKYKEIFFDQSKNGYAGYIDGGASQEEFYKFIKPILEKMDGTEELLVKLNREDLLRKQRTFDNGSIPHQIHLGELHAILRRQEDFYPFLKDNREKIEKILTFRIPYYVGPLARGNSRFAWMTRKSEETITPWNFEEVVDKGASAQSFIERMTNFDKNLPNEKVLPKHSLLYEYFTVYNELTKVKYVTEGMRKPAFLSGEQKKAIVDLLFKTNRKVTVKQLKEDYFKKIECFDSVEISGVEDRFNASLGTYHDLLKIIKDKDFLDNEENEDILEDIVLTLTLFEDREMIEERLKTYAHLFDDKVMKQLKRRRYTGWGRLSRKLINGIRDKQSGKTILDFLKSDGFANRNFMQLIHDDSLTFKEDIQKAQVSGQGDSLHEHIANLAGSPAIKKGILQTVKVVDELVKVMGRHKPENIVIEMARENQTTQKGQKNSRERMKRIEEGIKELGSQILKEHPVENTQLQNEKLYLYYLQNGRDMYVDQELDINRLSDYDVDHIVPQSFLKDDSIDNKVLTRSDKARGKSDNVPSEEVVKKMKNYWRQLLNAKLITQRKFDNLTKAERGGLSELDKAGFIKRQLVETRQITKHVAQILDSRMNTKYDENDKLIREVKVITLKSKLVSDFRKDFQFYKVREINNYHHAHDAYLNAVVGTALIKKYPKLESEFVYGDYKVYDVRKMIAKSEQEIGKATAKYFFYSNIMNFFKTEITLANGEIRKRPLIETNGETGEIVWDKGRDFATVRKVLSMPQVNIVKKTEVQTGGFSKESILPKRNSDKLIARKKDWDPKKYGGFDSPTVAYSVLVVAKVEKGKSKKLKSVKELLGITIMERSSFEKNPIDFLEAKGYKEVKKDLIIKLPKYSLFELENGRKRMLASAGELQKGNELALPSKYVNFLYLASHYEKLKGSPEDNEQKQLFVEQHKHYLDEIIEQISEFSKRVILADANLDKVLSAYNKHRDKPIREQAENIIHLFTLTNLGAPAAFKYFDTTIDRKRYTSTKEVLDATLIHQSITGLYETRIDLSQLGGDGGEAAAKEAAAKGGTLNIEDEHRLHETSKEPDVSLGSTWLSDFPQAWAETGGMGLAVRQAPLIIPLKATSTPVSIKQYPMSQEARLGIKPHIQRLLDQGILVPCQSPWNTPLLPVKKPGTNDYRPVQDLREVNKRVEDIHPTVPNPYNLLSGLPPSHQWYTVLDLKDAFFCLRLHPTSQPLFAFEWRDPEMGISGQLTWTRLPQGFKNSPTLFNEALHRDLADFRIQHPDLILLQYVDDLLLAATSELDCQQGTRALLQTLGNLGYRASAKKAQICQKQVKYLGYLLKEGQRWLTEARKETVMGQPTPKTPRQLREFLGTAGFCRLWIPGFAEMAAPLYPLTKPGTLFNWGPDQQKAYQEIKQALLTAPALGLPDLTKPFELFVDEKQGYAKGVLTQKLGPWRRPVAYLSKKLDPVAAGWPPCLRMVAAIAVLTKDAGKLTMGQPLVILAPHAVEALVKQPPDRWLSNARMTHYQALLLDTDRVQFGPVVALNPATLLPLPEEGLQHNCLDILAEAHGTRPDLTDQPLPDADHTWYTDGSSLLQEGQRKAGAAVTTETEVIWAKALPAGTSAQRAELIALTQALKMAEGKKLNVYTDSRYAFATAHIHGEIYRRRGWLTSEGKEIKNKDEILALLKALFLPKRLSIIHCPGHQKGHSAEARGNRMADQAARKAAITETPDTSTLLAGKRTADGSEFEKRTADGSEFESPKKKAKVE

SEQ ID NO: 2730 - protein, 2090 aa, synthetic construct
MPAAKRVKLDGGDKKYSIGLDIGTNSVGWAVITDEYKVPSKKFKVLGNTDRHSIKKNLIGALLFDSGETAEATRLKRTARRRYTRRKNRICYLQEIFSNEMAKVDDSFFHRLEESFLVEEDKKHERHPIFGNIVDEVAYHEKYPTIYHLRKKLVDSTDKADLRLIYLALAHMIKFRGHFLIEGDLNPDNSDVDKLFIQLVQTYNQLFEENPINASGVDAKAILSARLSKSRRLENLIAQLPGEKKNGLFGNLIALSLGLTPNFKSNFDLAEDAKLQLSKDTYDDDLDNLLAQIGDQYADLFLAAKNLSDAILLSDILRVNTEITKAPLSASMIKRYDEHHQDLTLLKALVRQQLPEKYKEIFFDQSKNGYAGYIDGGASQEEFYKFIKPILEKMDGTEELLVKLNREDLLRKQRTFDNGSIPHQIHLGELHAILRRQEDFYPFLKDNREKIEKILTFRIPYYVGPLARGNSRFAWMTRKSEETITPWNFEEVVDKGASAQSFIERMTNFDKNLPNEKVLPKHSLLYEYFTVYNELTKVKYVTEGMRKPAFLSGEQKKAIVDLLFKTNRKVTVKQLKEDYFKKIECFDSVEISGVEDRFNASLGTYHDLLKIIKDKDFLDNEENEDILEDIVLTLTLFEDREMIEERLKTYAHLFDDKVMKQLKRRRYTGWGRLSRKLINGIRDKQSGKTILDFLKSDGFANRNFMQLIHDDSLTFKEDIQKAQVSGQGDSLHEHIANLAGSPAIKKGILQTVKVVDELVKVMGRHKPENIVIEMARENQTTQKGQKNSRERMKRIEEGIKELGSQILKEHPVENTQLQNEKLYLYYLQNGRDMYVDQELDINRLSDYDVDHIVPQSFLKDDSIDNKVLTRSDKARGKSDNVPSEEVVKKMKNYWRQLLNAKLITQRKFDNLTKAERGGLSELDKAGFIKRQLVETRQITKHVAQILDSRMNTKYDENDKLIREVKVITLKSKLVSDFRKDFQFYKVREINNYHHAHDAYLNAVVGTALIKKYPKLESEFVYGDYKVYDVRKMIAKSEQEIGKATAKYFFYSNIMNFFKTEITLANGEIRKRPLIETNGETGEIVWDKGRDFATVRKVLSMPQVNIVKKTEVQTGGFSKESILPKRNSDKLIARKKDWDPKKYGGFDSPTVAYSVLVVAKVEKGKSKKLKSVKELLGITIMERSSFEKNPIDFLEAKGYKEVKKDLIIKLPKYSLFELENGRKRMLASAGELQKGNELALPSKYVNFLYLASHYEKLKGSPEDNEQKQLFVEQHKHYLDEIIEQISEFSKRVILADANLDKVLSAYNKHRDKPIREQAENIIHLFTLTNLGAPAAFKYFDTTIDRKRYTSTKEVLDATLIHQSITGLYETRIDLSQLGGDGGEAAAKGGTLNIEDEHRLHETSKEPDVSLGSTWLSDFPQAWAETGGMGLAVRQAPLIIPLKATSTPVSIKQYPMSQEARLGIKPHIQRLLDQGILVPCQSPWNTPLLPVKKPGTNDYRPVQDLREVNKRVEDIHPTVPNPYNLLSGLPPSHQWYTVLDLKDAFFCLRLHPTSQPLFAFEWRDPEMGISGQLTWTRLPQGFKNSPTLFNEALHRDLADFRIQHPDLILLQYVDDLLLAATSELDCQQGTRALLQTLGNLGYRASAKKAQICQKQVKYLGYLLKEGQRWLTEARKETVMGQPTPKTPRQLREFLGTAGFCRLWIPGFAEMAAPLYPLTKPGTLFNWGPDQQKAYQEIKQALLTAPALGLPDLTKPFELFVDEKQGYAKGVLTQKLGPWRRPVAYLSKKLDPVAAGWPPCLRMVAAIAVLTKDAGKLTMGQPLVILAPHAVEALVKQPPDRWLSNARMTHYQALLLDTDRVQFGPVVALNPATLLPLPEEGLQHNCLDILAEAHGTRPDLTDQPLPDADHTWYTDGSSLLQEGQRKAGAAVTTETEVIWAKALPAGTSAQRAELIALTQALKMAEGKKLNVYTDSRYAFATAHIHGEIYRRRGWLTSEGKEIKNKDEILALLKALFLPKRLSIIHCPGHQKGHSAEARGNRMADQAARKAAITETPDTSTLLAGKRTADGSEFEKRTADGSEFESPKKKAKVE

SEQ ID NO: 2731 - protein, 2094 aa, synthetic construct
MPAAKRVKLDGGDKKYSIGLDIGTNSVGWAVITDEYKVPSKKFKVLGNTDRHSIKKNLIGALLFDSGETAEATRLKRTARRRYTRRKNRICYLQEIFSNEMAKVDDSFFHRLEESFLVEEDKKHERHPIFGNIVDEVAYHEKYPTIYHLRKKLVDSTDKADLRLIYLALAHMIKFRGHFLIEGDLNPDNSDVDKLFIQLVQTYNQLFEENPINASGVDAKAILSARLSKSRRLENLIAQLPGEKKNGLFGNLIALSLGLTPNFKSNFDLAEDAKLQLSKDTYDDDLDNLLAQIGDQYADLFLAAKNLSDAILLSDILRVNTEITKAPLSASMIKRYDEHHQDLTLLKALVRQQLPEKYKEIFFDQSKNGYAGYIDGGASQEEFYKFIKPILEKMDGTEELLVKLNREDLLRKQRTFDNGSIPHQIHLGELHAILRRQEDFYPFLKDNREKIEKILTFRIPYYVGPLARGNSRFAWMTRKSEETITPWNFEEVVDKGASAQSFIERMTNFDKNLPNEKVLPKHSLLYEYFTVYNELTKVKYVTEGMRKPAFLSGEQKKAIVDLLFKTNRKVTVKQLKEDYFKKIECFDSVEISGVEDRFNASLGTYHDLLKIIKDKDFLDNEENEDILEDIVLTLTLFEDREMIEERLKTYAHLFDDKVMKQLKRRRYTGWGRLSRKLINGIRDKQSGKTILDFLKSDGFANRNFMQLIHDDSLTFKEDIQKAQVSGQGDSLHEHIANLAGSPAIKKGILQTVKVVDELVKVMGRHKPENIVIEMARENQTTQKGQKNSRERMKRIEEGIKELGSQILKEHPVENTQLQNEKLYLYYLQNGRDMYVDQELDINRLSDYDVDHIVPQSFLKDDSIDNKVLTRSDKARGKSDNVPSEEVVKKMKNYWRQLLNAKLITQRKFDNLTKAERGGLSELDKAGFIKRQLVETRQITKHVAQILDSRMNTKYDENDKLIREVKVITLKSKLVSDFRKDFQFYKVREINNYHHAHDAYLNAVVGTALIKKYPKLESEFVYGDYKVYDVRKMIAKSEQEIGKATAKYFFYSNIMNFFKTEITLANGEIRKRPLIETNGETGEIVWDKGRDFATVRKVLSMPQVNIVKKTEVQTGGFSKESILPKRNSDKLIARKKDWDPKKYGGFDSPTVAYSVLVVAKVEKGKSKKLKSVKELLGITIMERSSFEKNPIDFLEAKGYKEVKKDLIIKLPKYSLFELENGRKRMLASAGELQKGNELALPSKYVNFLYLASHYEKLKGSPEDNEQKQLFVEQHKHYLDEIIEQISEFSKRVILADANLDKVLSAYNKHRDKPIREQAENIIHLFTLTNLGAPAAFKYFDTTIDRKRYTSTKEVLDATLIHQSITGLYETRIDLSQLGGDGGPAPAPAPAPGGTLNIEDEHRLHETSKEPDVSLGSTWLSDFPQAWAETGGMGLAVRQAPLIIPLKATSTPVSIKQYPMSQEARLGIKPHIQRLLDQGILVPCQSPWNTPLLPVKKPGTNDYRPVQDLREVNKRVEDIHPTVPNPYNLLSGLPPSHQWYTVLDLKDAFFCLRLHPTSQPLFAFEWRDPEMGISGQLTWTRLPQGFKNSPTLFNEALHRDLADFRIQHPDLILLQYVDDLLLAATSELDCQQGTRALLQTLGNLGYRASAKKAQICQKQVKYLGYLLKEGQRWLTEARKETVMGQPTPKTPRQLREFLGTAGFCRLWIPGFAEMAAPLYPLTKPGTLFNWGPDQQKAYQEIKQALLTAPALGLPDLTKPFELFVDEKQGYAKGVLTQKLGPWRRPVAYLSKKLDPVAAGWPPCLRMVAAIAVLTKDAGKLTMGQPLVILAPHAVEALVKQPPDRWLSNARMTHYQALLLDTDRVQFGPVVALNPATLLPLPEEGLQHNCLDILAEAHGTRPDLTDQPLPDADHTWYTDGSSLLQEGQRKAGAAVTTETEVIWAKALPAGTSAQRAELIALTQALKMAEGKKLNVYTDSRYAFATAHIHGEIYRRRGWLTSEGKEIKNKDEILALLKALFLPKRLSIIHCPGHQKGHSAEARGNRMADQAARKAAITETPDTSTLLAGKRTADGSEFEKRTADGSEFESPKKKAKVE

SEQ ID NO: 2732 - protein, 2096 aa, synthetic construct
MPAAKRVKLDGGDKKYSIGLDIGTNSVGWAVITDEYKVPSKKFKVLGNTDRHSIKKNLIGALLFDSGETAEATRLKRTARRRYTRRKNRICYLQEIFSNEMAKVDDSFFHRLEESFLVEEDKKHERHPIFGNIVDEVAYHEKYPTIYHLRKKLVDSTDKADLRLIYLALAHMIKFRGHFLIEGDLNPDNSDVDKLFIQLVQTYNQLFEENPINASGVDAKAILSARLSKSRRLENLIAQLPGEKKNGLFGNLIALSLGLTPNFKSNFDLAEDAKLQLSKDTYDDDLDNLLAQIGDQYADLFLAAKNLSDAILLSDILRVNTEITKAPLSASMIKRYDEHHQDLTLLKALVRQQLPEKYKEIFFDQSKNGYAGYIDGGASQEEFYKFIKPILEKMDGTEELLVKLNREDLLRKQRTFDNGSIPHQIHLGELHAILRRQEDFYPFLKDNREKIEKILTFRIPYYVGPLARGNSRFAWMTRKSEETITPWNFEEVVDKGASAQSFIERMTNFDKNLPNEKVLPKHSLLYEYFTVYNELTKVKYVTEGMRKPAFLSGEQKKAIVDLLFKTNRKVTVKQLKEDYFKKIECFDSVEISGVEDRFNASLGTYHDLLKIIKDKDFLDNEENEDILEDIVLTLTLFEDREMIEERLKTYAHLFDDKVMKQLKRRRYTGWGRLSRKLINGIRDKQSGKTILDFLKSDGFANRNFMQLIHDDSLTFKEDIQKAQVSGQGDSLHEHIANLAGSPAIKKGILQTVKVVDELVKVMGRHKPENIVIEMARENQTTQKGQKNSRERMKRIEEGIKELGSQILKEHPVENTQLQNEKLYLYYLQNGRDMYVDQELDINRLSDYDVDHIVPQSFLKDDSIDNKVLTRSDKARGKSDNVPSEEVVKKMKNYWRQLLNAKLITQRKFDNLTKAERGGLSELDKAGFIKRQLVETRQITKHVAQILDSRMNTKYDENDKLIREVKVITLKSKLVSDFRKDFQFYKVREINNYHHAHDAYLNAVVGTALIKKYPKLESEFVYGDYKVYDVRKMIAKSEQEIGKATAKYFFYSNIMNFFKTEITLANGEIRKRPLIETNGETGEIVWDKGRDFATVRKVLSMPQVNIVKKTEVQTGGFSKESILPKRNSDKLIARKKDWDPKKYGGFDSPTVAYSVLVVAKVEKGKSKKLKSVKELLGITIMERSSFEKNPIDFLEAKGYKEVKKDLIIKLPKYSLFELENGRKRMLASAGELQKGNELALPSKYVNFLYLASHYEKLKGSPEDNEQKQLFVEQHKHYLDEIIEQISEFSKRVILADANLDKVLSAYNKHRDKPIREQAENIIHLFTLTNLGAPAAFKYFDTTIDRKRYTSTKEVLDATLIHQSITGLYETRIDLSQLGGDGGGSSEAAAKGGGGGTLNIEDEHRLHETSKEPDVSLGSTWLSDFPQAWAETGGMGLAVRQAPLIIPLKATSTPVSIKQYPMSQEARLGIKPHIQRLLDQGILVPCQSPWNTPLLPVKKPGTNDYRPVQDLREVNKRVEDIHPTVPNPYNLLSGLPPSHQWYTVLDLKDAFFCLRLHPTSQPLFAFEWRDPEMGISGQLTWTRLPQGFKNSPTLFNEALHRDLADFRIQHPDLILLQYVDDLLLAATSELDCQQGTRALLQTLGNLGYRASAKKAQICQKQVKYLGYLLKEGQRWLTEARKETVMGQPTPKTPRQLREFLGTAGFCRLWIPGFAEMAAPLYPLTKPGTLFNWGPDQQKAYQEIKQALLTAPALGLPDLTKPFELFVDEKQGYAKGVLTQKLGPWRRPVAYLSKKLDPVAAGWPPCLRMVAAIAVLTKDAGKLTMGQPLVILAPHAVEALVKQPPDRWLSNARMTHYQALLLDTDRVQFGPVVALNPATLLPLPEEGLQHNCLDILAEAHGTRPDLTDQPLPDADHTWYTDGSSLLQEGQRKAGAAVTTETEVIWAKALPAGTSAQRAELIALTQALKMAEGKKLNVYTDSRYAFATAHIHGEIYRRRGWLTSEGKEIKNKDEILALLKALFLPKRLSIIHCPGHQKGHSAEARGNRMADQAARKAAITETPDTSTLLAGKRTADGSEFEKRTADGSEFESPKKKAKVE

SEQ ID NO: 2733 - protein, 2091 aa, synthetic construct
MPAAKRVKLDGGDKKYSIGLDIGTNSVGWAVITDEYKVPSKKFKVLGNTDRHSIKKNLIGALLFDSGETAEATRLKRTARRRYTRRKNRICYLQEIFSNEMAKVDDSFFHRLEESFLVEEDKKHERHPIFGNIVDEVAYHEKYPTIYHLRKKLVDSTDKADLRLIYLALAHMIKFRGHFLIEGDLNPDNSDVDKLFIQLVQTYNQLFEENPINASGVDAKAILSARLSKSRRLENLIAQLPGEKKNGLFGNLIALSLGLTPNFKSNFDLAEDAKLQLSKDTYDDDLDNLLAQIGDQYADLFLAAKNLSDAILLSDILRVNTEITKAPLSASMIKRYDEHHQDLTLLKALVRQQLPEKYKEIFFDQSKNGYAGYIDGGASQEEFYKFIKPILEKMDGTEELLVKLNREDLLRKQRTFDNGSIPHQIHLGELHAILRRQEDFYPFLKDNREKIEKILTFRIPYYVGPLARGNSRFAWMTRKSEETITPWNFEEVVDKGASAQSFIERMTNFDKNLPNEKVLPKHSLLYEYFTVYNELTKVKYVTEGMRKPAFLSGEQKKAIVDLLFKTNRKVTVKQLKEDYFKKIECFDSVEISGVEDRFNASLGTYHDLLKIIKDKDFLDNEENEDILEDIVLTLTLFEDREMIEERLKTYAHLFDDKVMKQLKRRRYTGWGRLSRKLINGIRDKQSGKTILDFLKSDGFANRNFMQLIHDDSLTFKEDIQKAQVSGQGDSLHEHIANLAGSPAIKKGILQTVKVVDELVKVMGRHKPENIVIEMARENQTTQKGQKNSRERMKRIEEGIKELGSQILKEHPVENTQLQNEKLYLYYLQNGRDMYVDQELDINRLSDYDVDHIVPQSFLKDDSIDNKVLTRSDKARGKSDNVPSEEVVKKMKNYWRQLLNAKLITQRKFDNLTKAERGGLSELDKAGFIKRQLVETRQITKHVAQILDSRMNTKYDENDKLIREVKVITLKSKLVSDFRKDFQFYKVREINNYHHAHDAYLNAVVGTALIKKYPKLESEFVYGDYKVYDVRKMIAKSEQEIGKATAKYFFYSNIMNFFKTEITLANGEIRKRPLIETNGETGEIVWDKGRDFATVRKVLSMPQVNIVKKTEVQTGGFSKESILPKRNSDKLIARKKDWDPKKYGGFDSPTVAYSVLVVAKVEKGKSKKLKSVKELLGITIMERSSFEKNPIDFLEAKGYKEVKKDLIIKLPKYSLFELENGRKRMLASAGELQKGNELALPSKYVNFLYLASHYEKLKGSPEDNEQKQLFVEQHKHYLDEIIEQISEFSKRVILADANLDKVLSAYNKHRDKPIREQAENIIHLFTLTNLGAPAAFKYFDTTIDRKRYTSTKEVLDATLIHQSITGLYETRIDLSQLGGDGGPAPGGSGGTLNIEDEHRLHETSKEPDVSLGSTWLSDFPQAWAETGGMGLAVRQAPLIIPLKATSTPVSIKQYPMSQEARLGIKPHIQRLLDQGILVPCQSPWNTPLLPVKKPGTNDYRPVQDLREVNKRVEDIHPTVPNPYNLLSGLPPSHQWYTVLDLKDAFFCLRLHPTSQPLFAFEWRDPEMGISGQLTWTRLPQGFKNSPTLFNEALHRDLADFRIQHPDLILLQYVDDLLLAATSELDCQQGTRALLQTLGNLGYRASAKKAQICQKQVKYLGYLLKEGQRWLTEARKETVMGQPTPKTPRQLREFLGTAGFCRLWIPGFAEMAAPLYPLTKPGTLFNWGPDQQKAYQEIKQALLTAPALGLPDLTKPFELFVDEKQGYAKGVLTQKLGPWRRPVAYLSKKLDPVAAGWPPCLRMVAAIAVLTKDAGKLTMGQPLVILAPHAVEALVKQPPDRWLSNARMTHYQALLLDTDRVQFGPVVALNPATLLPLPEEGLQHNCLDILAEAHGTRPDLTDQPLPDADHTWYTDGSSLLQEGQRKAGAAVTTETEVIWAKALPAGTSAQRAELIALTQALKMAEGKKLNVYTDSRYAFATAHIHGEIYRRRGWLTSEGKEIKNKDEILALLKALFLPKRLSIIHCPGHQKGHSAEARGNRMADQAARKAAITETPDTSTLLAGKRTADGSEFEKRTADGSEFESPKKKAKVE

SEQ ID NO: 2734 - protein, 2118 aa, synthetic construct
MPAAKRVKLDGGDKKYSIGLDIGTNSVGWAVITDEYKVPSKKFKVLGNTDRHSIKKNLIGALLFDSGETAEATRLKRTARRRYTRRKNRICYLQEIFSNEMAKVDDSFFHRLEESFLVEEDKKHERHPIFGNIVDEVAYHEKYPTIYHLRKKLVDSTDKADLRLIYLALAHMIKFRGHFLIEGDLNPDNSDVDKLFIQLVQTYNQLFEENPINASGVDAKAILSARLSKSRRLENLIAQLPGEKKNGLFGNLIALSLGLTPNFKSNFDLAEDAKLQLSKDTYDDDLDNLLAQIGDQYADLFLAAKNLSDAILLSDILRVNTEITKAPLSASMIKRYDEHHQDLTLLKALVRQQLPEKYKEIFFDQSKNGYAGYIDGGASQEEFYKFIKPILEKMDGTEELLVKLNREDLLRKQRTFDNGSIPHQIHLGELHAILRRQEDFYPFLKDNREKIEKILTFRIPYYVGPLARGNSRFAWMTRKSEETITPWNFEEVVDKGASAQSFIERMTNFDKNLPNEKVLPKHSLLYEYFTVYNELTKVKYVTEGMRKPAFLSGEQKKAIVDLLFKTNRKVTVKQLKEDYFKKIECFDSVEISGVEDRFNASLGTYHDLLKIIKDKDFLDNEENEDILEDIVLTLTLFEDREMIEERLKTYAHLFDDKVMKQLKRRRYTGWGRLSRKLINGIRDKQSGKTILDFLKSDGFANRNFMQLIHDDSLTFKEDIQKAQVSGQGDSLHEHIANLAGSPAIKKGILQTVKVVDELVKVMGRHKPENIVIEMARENQTTQKGQKNSRERMKRIEEGIKELGSQILKEHPVENTQLQNEKLYLYYLQNGRDMYVDQELDINRLSDYDVDHIVPQSFLKDDSIDNKVLTRSDKARGKSDNVPSEEVVKKMKNYWRQLLNAKLITQRKFDNLTKAERGGLSELDKAGFIKRQLVETRQITKHVAQILDSRMNTKYDENDKLIREVKVITLKSKLVSDFRKDFQFYKVREINNYHHAHDAYLNAVVGTALIKKYPKLESEFVYGDYKVYDVRKMIAKSEQEIGKATAKYFFYSNIMNFFKTEITLANGEIRKRPLIETNGETGEIVWDKGRDFATVRKVLSMPQVNIVKKTEVQTGGFSKESILPKRNSDKLIARKKDWDPKKYGGFDSPTVAYSVLVVAKVEKGKSKKLKSVKELLGITIMERSSFEKNPIDFLEAKGYKEVKKDLIIKLPKYSLFELENGRKRMLASAGELQKGNELALPSKYVNFLYLASHYEKLKGSPEDNEQKQLFVEQHKHYLDEIIEQISEFSKRVILADANLDKVLSAYNKHRDKPIREQAENIIHLFTLTNLGAPAAFKYFDTTIDRKRYTSTKEVLDATLIHQSITGLYETRIDLSQLGGDGGSGGSSGGSSGSETPGTSESATPESSGGSSGGSSGGTLNIEDEHRLHETSKEPDVSLGSTWLSDFPQAWAETGGMGLAVRQAPLIIPLKATSTPVSIKQYPMSQEARLGIKPHIQRLLDQGILVPCQSPWNTPLLPVKKPGTNDYRPVQDLREVNKRVEDIHPTVPNPYNLLSGLPPSHQWYTVLDLKDAFFCLRLHPTSQPLFAFEWRDPEMGISGQLTWTRLPQGFKNSPTLFNEALHRDLADFRIQHPDLILLQYVDDLLLAATSELDCQQGTRALLQTLGNLGYRASAKKAQICQKQVKYLGYLLKEGQRWLTEARKETVMGQPTPKTPRQLREFLGTAGFCRLWIPGFAEMAAPLYPLTKPGTLFNWGPDQQKAYQEIKQALLTAPALGLPDLTKPFELFVDEKQGYAKGVLTQKLGPWRRPVAYLSKKLDPVAAGWPPCLRMVAAIAVLTKDAGKLTMGQPLVILAPHAVEALVKQPPDRWLSNARMTHYQALLLDTDRVQFGPVVALNPATLLPLPEEGLQHNCLDILAEAHGTRPDLTDQPLPDADHTWYTDGSSLLQEGQRKAGAAVTTETEVIWAKALPAGTSAQRAELIALTQALKMAEGKKLNVYTDSRYAFATAHIHGEIYRRRGWLTSEGKEIKNKDEILALLKALFLPKRLSIIHCPGHQKGHSAEARGNRMADQAARKAAITETPDTSTLLAGKRTADGSEFEKRTADGSEFESPKKKAKVE

SEQ ID NO: 2735 - protein, 2091 aa, synthetic construct
MPAAKRVKLDGGDKKYSIGLDIGTNSVGWAVITDEYKVPSKKFKVLGNTDRHSIKKNLIGALLFDSGETAEATRLKRTARRRYTRRKNRICYLQEIFSNEMAKVDDSFFHRLEESFLVEEDKKHERHPIFGNIVDEVAYHEKYPTIYHLRKKLVDSTDKADLRLIYLALAHMIKFRGHFLIEGDLNPDNSDVDKLFIQLVQTYNQLFEENPINASGVDAKAILSARLSKSRRLENLIAQLPGEKKNGLFGNLIALSLGLTPNFKSNFDLAEDAKLQLSKDTYDDDLDNLLAQIGDQYADLFLAAKNLSDAILLSDILRVNTEITKAPLSASMIKRYDEHHQDLTLLKALVRQQLPEKYKEIFFDQSKNGYAGYIDGGASQEEFYKFIKPILEKMDGTEELLVKLNREDLLRKQRTFDNGSIPHQIHLGELHAILRRQEDFYPFLKDNREKIEKILTFRIPYYVGPLARGNSRFAWMTRKSEETITPWNFEEVVDKGASAQSFIERMTNFDKNLPNEKVLPKHSLLYEYFTVYNELTKVKYVTEGMRKPAFLSGEQKKAIVDLLFKTNRKVTVKQLKEDYFKKIECFDSVEISGVEDRFNASLGTYHDLLKIIKDKDFLDNEENEDILEDIVLTLTLFEDREMIEERLKTYAHLFDDKVMKQLKRRRYTGWGRLSRKLINGIRDKQSGKTILDFLKSDGFANRNFMQLIHDDSLTFKEDIQKAQVSGQGDSLHEHIANLAGSPAIKKGILQTVKVVDELVKVMGRHKPENIVIEMARENQTTQKGQKNSRERMKRIEEGIKELGSQILKEHPVENTQLQNEKLYLYYLQNGRDMYVDQELDINRLSDYDVDHIVPQSFLKDDSIDNKVLTRSDKARGKSDNVPSEEVVKKMKNYWRQLLNAKLITQRKFDNLTKAERGGLSELDKAGFIKRQLVETRQITKHVAQILDSRMNTKYDENDKLIREVKVITLKSKLVSDFRKDFQFYKVREINNYHHAHDAYLNAVVGTALIKKYPKLESEFVYGDYKVYDVRKMIAKSEQEIGKATAKYFFYSNIMNFFKTEITLANGEIRKRPLIETNGETGEIVWDKGRDFATVRKVLSMPQVNIVKKTEVQTGGFSKESILPKRNSDKLIARKKDWDPKKYGGFDSPTVAYSVLVVAKVEKGKSKKLKSVKELLGITIMERSSFEKNPIDFLEAKGYKEVKKDLIIKLPKYSLFELENGRKRMLASAGELQKGNELALPSKYVNFLYLASHYEKLKGSPEDNEQKQLFVEQHKHYLDEIIEQISEFSKRVILADANLDKVLSAYNKHRDKPIREQAENIIHLFTLTNLGAPAAFKYFDTTIDRKRYTSTKEVLDATLIHQSITGLYETRIDLSQLGGDGGGGSPAPGGTLNIEDEHRLHETSKEPDVSLGSTWLSDFPQAWAETGGMGLAVRQAPLIIPLKATSTPVSIKQYPMSQEARLGIKPHIQRLLDQGILVPCQSPWNTPLLPVKKPGTNDYRPVQDLREVNKRVEDIHPTVPNPYNLLSGLPPSHQWYTVLDLKDAFFCLRLHPTSQPLFAFEWRDPEMGISGQLTWTRLPQGFKNSPTLFNEALHRDLADFRIQHPDLILLQYVDDLLLAATSELDCQQGTRALLQTLGNLGYRASAKKAQICQKQVKYLGYLLKEGQRWLTEARKETVMGQPTPKTPRQLREFLGTAGFCRLWIPGFAEMAAPLYPLTKPGTLFNWGPDQQKAYQEIKQALLTAPALGLPDLTKPFELFVDEKQGYAKGVLTQKLGPWRRPVAYLSKKLDPVAAGWPPCLRMVAAIAVLTKDAGKLTMGQPLVILAPHAVEALVKQPPDRWLSNARMTHYQALLLDTDRVQFGPVVALNPATLLPLPEEGLQHNCLDILAEAHGTRPDLTDQPLPDADHTWYTDGSSLLQEGQRKAGAAVTTETEVIWAKALPAGTSAQRAELIALTQALKMAEGKKLNVYTDSRYAFATAHIHGEIYRRRGWLTSEGKEIKNKDEILALLKALFLPKRLSIIHCPGHQKGHSAEARGNRMADQAARKAAITETPDTSTLLAGKRTADGSEFEKRTADGSEFESPKKKAKVE

SEQ ID NO: 2736 - protein, 2100 aa, synthetic construct
MPAAKRVKLDGGDKKYSIGLDIGTNSVGWAVITDEYKVPSKKFKVLGNTDRHSIKKNLIGALLFDSGETAEATRLKRTARRRYTRRKNRICYLQEIFSNEMAKVDDSFFHRLEESFLVEEDKKHERHPIFGNIVDEVAYHEKYPTIYHLRKKLVDSTDKADLRLIYLALAHMIKFRGHFLIEGDLNPDNSDVDKLFIQLVQTYNQLFEENPINASGVDAKAILSARLSKSRRLENLIAQLPGEKKNGLFGNLIALSLGLTPNFKSNFDLAEDAKLQLSKDTYDDDLDNLLAQIGDQYADLFLAAKNLSDAILLSDILRVNTEITKAPLSASMIKRYDEHHQDLTLLKALVRQQLPEKYKEIFFDQSKNGYAGYIDGGASQEEFYKFIKPILEKMDGTEELLVKLNREDLLRKQRTFDNGSIPHQIHLGELHAILRRQEDFYPFLKDNREKIEKILTFRIPYYVGPLARGNSRFAWMTRKSEETITPWNFEEVVDKGASAQSFIERMTNFDKNLPNEKVLPKHSLLYEYFTVYNELTKVKYVTEGMRKPAFLSGEQKKAIVDLLFKTNRKVTVKQLKEDYFKKIECFDSVEISGVEDRFNASLGTYHDLLKIIKDKDFLDNEENEDILEDIVLTLTLFEDREMIEERLKTYAHLFDDKVMKQLKRRRYTGWGRLSRKLINGIRDKQSGKTILDFLKSDGFANRNFMQLIHDDSLTFKEDIQKAQVSGQGDSLHEHIANLAGSPAIKKGILQTVKVVDELVKVMGRHKPENIVIEMARENQTTQKGQKNSRERMKRIEEGIKELGSQILKEHPVENTQLQNEKLYLYYLQNGRDMYVDQELDINRLSDYDVDHIVPQSFLKDDSIDNKVLTRSDKARGKSDNVPSEEVVKKMKNYWRQLLNAKLITQRKFDNLTKAERGGLSELDKAGFIKRQLVETRQITKHVAQILDSRMNTKYDENDKLIREVKVITLKSKLVSDFRKDFQFYKVREINNYHHAHDAYLNAVVGTALIKKYPKLESEFVYGDYKVYDVRKMIAKSEQEIGKATAKYFFYSNIMNFFKTEITLANGEIRKRPLIETNGETGEIVWDKGRDFATVRKVLSMPQVNIVKKTEVQTGGFSKESILPKRNSDKLIARKKDWDPKKYGGFDSPTVAYSVLVVAKVEKGKSKKLKSVKELLGITIMERSSFEKNPIDFLEAKGYKEVKKDLIIKLPKYSLFELENGRKRMLASAGELQKGNELALPSKYVNFLYLASHYEKLKGSPEDNEQKQLFVEQHKHYLDEIIEQISEFSKRVILADANLDKVLSAYNKHRDKPIREQAENIIHLFTLTNLGAPAAFKYFDTTIDRKRYTSTKEVLDATLIHQSITGLYETRIDLSQLGGDGGGGGGSGGGGSGGGGSGGTLNIEDEHRLHETSKEPDVSLGSTWLSDFPQAWAETGGMGLAVRQAPLIIPLKATSTPVSIKQYPMSQEARLGIKPHIQRLLDQGILVPCQSPWNTPLLPVKKPGTNDYRPVQDLREVNKRVEDIHPTVPNPYNLLSGLPPSHQWYTVLDLKDAFFCLRLHPTSQPLFAFEWRDPEMGISGQLTWTRLPQGFKNSPTLFNEALHRDLADFRIQHPDLILLQYVDDLLLAATSELDCQQGTRALLQTLGNLGYRASAKKAQICQKQVKYLGYLLKEGQRWLTEARKETVMGQPTPKTPRQLREFLGTAGFCRLWIPGFAEMAAPLYPLTKPGTLFNWGPDQQKAYQEIKQALLTAPALGLPDLTKPFELFVDEKQGYAKGVLTQKLGPWRRPVAYLSKKLDPVAAGWPPCLRMVAAIAVLTKDAGKLTMGQPLVILAPHAVEALVKQPPDRWLSNARMTHYQALLLDTDRVQFGPVVALNPATLLPLPEEGLQHNCLDILAEAHGTRPDLTDQPLPDADHTWYTDGSSLLQEGQRKAGAAVTTETEVIWAKALPAGTSAQRAELIALTQALKMAEGKKLNVYTDSRYAFATAHIHGEIYRRRGWLTSEGKEIKNKDEILALLKALFLPKRLSIIHCPGHQKGHSAEARGNRMADQAARKAAITETPDTSTLLAGKRTADGSEFEKRTADGSEFESPKKKAKVE

SEQ ID NO: 2737 - protein, 2093 aa, synthetic construct
MPAAKRVKLDGGDKKYSIGLDIGTNSVGWAVITDEYKVPSKKFKVLGNTDRHSIKKNLIGALLFDSGETAEATRLKRTARRRYTRRKNRICYLQEIFSNEMAKVDDSFFHRLEESFLVEEDKKHERHPIFGNIVDEVAYHEKYPTIYHLRKKLVDSTDKADLRLIYLALAHMIKFRGHFLIEGDLNPDNSDVDKLFIQLVQTYNQLFEENPINASGVDAKAILSARLSKSRRLENLIAQLPGEKKNGLFGNLIALSLGLTPNFKSNFDLAEDAKLQLSKDTYDDDLDNLLAQIGDQYADLFLAAKNLSDAILLSDILRVNTEITKAPLSASMIKRYDEHHQDLTLLKALVRQQLPEKYKEIFFDQSKNGYAGYIDGGASQEEFYKFIKPILEKMDGTEELLVKLNREDLLRKQRTFDNGSIPHQIHLGELHAILRRQEDFYPFLKDNREKIEKILTFRIPYYVGPLARGNSRFAWMTRKSEETITPWNFEEVVDKGASAQSFIERMTNFDKNLPNEKVLPKHSLLYEYFTVYNELTKVKYVTEGMRKPAFLSGEQKKAIVDLLFKTNRKVTVKQLKEDYFKKIECFDSVEISGVEDRFNASLGTYHDLLKIIKDKDFLDNEENEDILEDIVLTLTLFEDREMIEERLKTYAHLFDDKVMKQLKRRRYTGWGRLSRKLINGIRDKQSGKTILDFLKSDGFANRNFMQLIHDDSLTFKEDIQKAQVSGQGDSLHEHIANLAGSPAIKKGILQTVKVVDELVKVMGRHKPENIVIEMARENQTTQKGQKNSRERMKRIEEGIKELGSQILKEHPVENTQLQNEKLYLYYLQNGRDMYVDQELDINRLSDYDVDHIVPQSFLKDDSIDNKVLTRSDKARGKSDNVPSEEVVKKMKNYWRQLLNAKLITQRKFDNLTKAERGGLSELDKAGFIKRQLVETRQITKHVAQILDSRMNTKYDENDKLIREVKVITLKSKLVSDFRKDFQFYKVREINNYHHAHDAYLNAVVGTALIKKYPKLESEFVYGDYKVYDVRKMIAKSEQEIGKATAKYFFYSNIMNFFKTEITLANGEIRKRPLIETNGETGEIVWDKGRDFATVRKVLSMPQVNIVKKTEVQTGGFSKESILPKRNSDKLIARKKDWDPKKYGGFDSPTVAYSVLVVAKVEKGKSKKLKSVKELLGITIMERSSFEKNPIDFLEAKGYKEVKKDLIIKLPKYSLFELENGRKRMLASAGELQKGNELALPSKYVNFLYLASHYEKLKGSPEDNEQKQLFVEQHKHYLDEIIEQISEFSKRVILADANLDKVLSAYNKHRDKPIREQAENIIHLFTLTNLGAPAAFKYFDTTIDRKRYTSTKEVLDATLIHQSITGLYETRIDLSQLGGDGGEAAAKGSSGGTLNIEDEHRLHETSKEPDVSLGSTWLSDFPQAWAETGGMGLAVRQAPLIIPLKATSTPVSIKQYPMSQEARLGIKPHIQRLLDQGILVPCQSPWNTPLLPVKKPGTNDYRPVQDLREVNKRVEDIHPTVPNPYNLLSGLPPSHQWYTVLDLKDAFFCLRLHPTSQPLFAFEWRDPEMGISGQLTWTRLPQGFKNSPTLFNEALHRDLADFRIQHPDLILLQYVDDLLLAATSELDCQQGTRALLQTLGNLGYRASAKKAQICQKQVKYLGYLLKEGQRWLTEARKETVMGQPTPKTPRQLREFLGTAGFCRLWIPGFAEMAAPLYPLTKPGTLFNWGPDQQKAYQEIKQALLTAPALGLPDLTKPFELFVDEKQGYAKGVLTQKLGPWRRPVAYLSKKLDPVAAGWPPCLRMVAAIAVLTKDAGKLTMGQPLVILAPHAVEALVKQPPDRWLSNARMTHYQALLLDTDRVQFGPVVALNPATLLPLPEEGLQHNCLDILAEAHGTRPDLTDQPLPDADHTWYTDGSSLLQEGQRKAGAAVTTETEVIWAKALPAGTSAQRAELIALTQALKMAEGKKLNVYTDSRYAFATAHIHGEIYRRRGWLTSEGKEIKNKDEILALLKALFLPKRLSIIHCPGHQKGHSAEARGNRMADQAARKAAITETPDTSTLLAGKRTADGSEFEKRTADGSEFESPKKKAKVE

SEQ ID NO: 2738 - protein, 2094 aa, synthetic construct
MPAAKRVKLDGGDKKYSIGLDIGTNSVGWAVITDEYKVPSKKFKVLGNTDRHSIKKNLIGALLFDSGETAEATRLKRTARRRYTRRKNRICYLQEIFSNEMAKVDDSFFHRLEESFLVEEDKKHERHPIFGNIVDEVAYHEKYPTIYHLRKKLVDSTDKADLRLIYLALAHMIKFRGHFLIEGDLNPDNSDVDKLFIQLVQTYNQLFEENPINASGVDAKAILSARLSKSRRLENLIAQLPGEKKNGLFGNLIALSLGLTPNFKSNFDLAEDAKLQLSKDTYDDDLDNLLAQIGDQYADLFLAAKNLSDAILLSDILRVNTEITKAPLSASMIKRYDEHHQDLTLLKALVRQQLPEKYKEIFFDQSKNGYAGYIDGGASQEEFYKFIKPILEKMDGTEELLVKLNREDLLRKQRTFDNGSIPHQIHLGELHAILRRQEDFYPFLKDNREKIEKILTFRIPYYVGPLARGNSRFAWMTRKSEETITPWNFEEVVDKGASAQSFIERMTNFDKNLPNEKVLPKHSLLYEYFTVYNELTKVKYVTEGMRKPAFLSGEQKKAIVDLLFKTNRKVTVKQLKEDYFKKIECFDSVEISGVEDRFNASLGTYHDLLKIIKDKDFLDNEENEDILEDIVLTLTLFEDREMIEERLKTYAHLFDDKVMKQLKRRRYTGWGRLSRKLINGIRDKQSGKTILDFLKSDGFANRNFMQLIHDDSLTFKEDIQKAQVSGQGDSLHEHIANLAGSPAIKKGILQTVKVVDELVKVMGRHKPENIVIEMARENQTTQKGQKNSRERMKRIEEGIKELGSQILKEHPVENTQLQNEKLYLYYLQNGRDMYVDQELDINRLSDYDVDHIVPQSFLKDDSIDNKVLTRSDKARGKSDNVPSEEVVKKMKNYWRQLLNAKLITQRKFDNLTKAERGGLSELDKAGFIKRQLVETRQITKHVAQILDSRMNTKYDENDKLIREVKVITLKSKLVSDFRKDFQFYKVREINNYHHAHDAYLNAVVGTALIKKYPKLESEFVYGDYKVYDVRKMIAKSEQEIGKATAKYFFYSNIMNFFKTEITLANGEIRKRPLIETNGETGEIVWDKGRDFATVRKVLSMPQVNIVKKTEVQTGGFSKESILPKRNSDKLIARKKDWDPKKYGGFDSPTVAYSVLVVAKVEKGKSKKLKSVKELLGITIMERSSFEKNPIDFLEAKGYKEVKKDLIIKLPKYSLFELENGRKRMLASAGELQKGNELALPSKYVNFLYLASHYEKLKGSPEDNEQKQLFVEQHKHYLDEIIEQISEFSKRVILADANLDKVLSAYNKHRDKPIREQAENIIHLFTLTNLGAPAAFKYFDTTIDRKRYTSTKEVLDATLIHQSITGLYETRIDLSQLGGDGGPAPGGGGGSGGTLNIEDEHRLHETSKEPDVSLGSTWLSDFPQAWAETGGMGLAVRQAPLIIPLKATSTPVSIKQYPMSQEARLGIKPHIQRLLDQGILVPCQSPWNTPLLPVKKPGTNDYRPVQDLREVNKRVEDIHPTVPNPYNLLSGLPPSHQWYTVLDLKDAFFCLRLHPTSQPLFAFEWRDPEMGISGQLTWTRLPQGFKNSPTLFNEALHRDLADFRIQHPDLILLQYVDDLLLAATSELDCQQGTRALLQTLGNLGYRASAKKAQICQKQVKYLGYLLKEGQRWLTEARKETVMGQPTPKTPRQLREFLGTAGFCRLWIPGFAEMAAPLYPLTKPGTLFNWGPDQQKAYQEIKQALLTAPALGLPDLTKPFELFVDEKQGYAKGVLTQKLGPWRRPVAYLSKKLDPVAAGWPPCLRMVAAIAVLTKDAGKLTMGQPLVILAPHAVEALVKQPPDRWLSNARMTHYQALLLDTDRVQFGPVVALNPATLLPLPEEGLQHNCLDILAEAHGTRPDLTDQPLPDADHTWYTDGSSLLQEGQRKAGAAVTTETEVIWAKALPAGTSAQRAELIALTQALKMAEGKKLNVYTDSRYAFATAHIHGEIYRRRGWLTSEGKEIKNKDEILALLKALFLPKRLSIIHCPGHQKGHSAEARGNRMADQAARKAAITETPDTSTLLAGKRTADGSEFEKRTADGSEFESPKKKAKVE

SEQ ID NO: 2739 - protein, 2093 aa, synthetic construct
MPAAKRVKLDGGDKKYSIGLDIGTNSVGWAVITDEYKVPSKKFKVLGNTDRHSIKKNLIGALLFDSGETAEATRLKRTARRRYTRRKNRICYLQEIFSNEMAKVDDSFFHRLEESFLVEEDKKHERHPIFGNIVDEVAYHEKYPTIYHLRKKLVDSTDKADLRLIYLALAHMIKFRGHFLIEGDLNPDNSDVDKLFIQLVQTYNQLFEENPINASGVDAKAILSARLSKSRRLENLIAQLPGEKKNGLFGNLIALSLGLTPNFKSNFDLAEDAKLQLSKDTYDDDLDNLLAQIGDQYADLFLAAKNLSDAILLSDILRVNTEITKAPLSASMIKRYDEHHQDLTLLKALVRQQLPEKYKEIFFDQSKNGYAGYIDGGASQEEFYKFIKPILEKMDGTEELLVKLNREDLLRKQRTFDNGSIPHQIHLGELHAILRRQEDFYPFLKDNREKIEKILTFRIPYYVGPLARGNSRFAWMTRKSEETITPWNFEEVVDKGASAQSFIERMTNFDKNLPNEKVLPKHSLLYEYFTVYNELTKVKYVTEGMRKPAFLSGEQKKAIVDLLFKTNRKVTVKQLKEDYFKKIECFDSVEISGVEDRFNASLGTYHDLLKIIKDKDFLDNEENEDILEDIVLTLTLFEDREMIEERLKTYAHLFDDKVMKQLKRRRYTGWGRLSRKLINGIRDKQSGKTILDFLKSDGFANRNFMQLIHDDSLTFKEDIQKAQVSGQGDSLHEHIANLAGSPAIKKGILQTVKVVDELVKVMGRHKPENIVIEMARENQTTQKGQKNSRERMKRIEEGIKELGSQILKEHPVENTQLQNEKLYLYYLQNGRDMYVDQELDINRLSDYDVDHIVPQSFLKDDSIDNKVLTRSDKARGKSDNVPSEEVVKKMKNYWRQLLNAKLITQRKFDNLTKAERGGLSELDKAGFIKRQLVETRQITKHVAQILDSRMNTKYDENDKLIREVKVITLKSKLVSDFRKDFQFYKVREINNYHHAHDAYLNAVVGTALIKKYPKLESEFVYGDYKVYDVRKMIAKSEQEIGKATAKYFFYSNIMNFFKTEITLANGEIRKRPLIETNGETGEIVWDKGRDFATVRKVLSMPQVNIVKKTEVQTGGFSKESILPKRNSDKLIARKKDWDPKKYGGFDSPTVAYSVLVVAKVEKGKSKKLKSVKELLGITIMERSSFEKNPIDFLEAKGYKEVKKDLIIKLPKYSLFELENGRKRMLASAGELQKGNELALPSKYVNFLYLASHYEKLKGSPEDNEQKQLFVEQHKHYLDEIIEQISEFSKRVILADANLDKVLSAYNKHRDKPIREQAENIIHLFTLTNLGAPAAFKYFDTTIDRKRYTSTKEVLDATLIHQSITGLYETRIDLSQLGGDGGGGGGGGGGGGTLNIEDEHRLHETSKEPDVSLGSTWLSDFPQAWAETGGMGLAVRQAPLIIPLKATSTPVSIKQYPMSQEARLGIKPHIQRLLDQGILVPCQSPWNTPLLPVKKPGTNDYRPVQDLREVNKRVEDIHPTVPNPYNLLSGLPPSHQWYTVLDLKDAFFCLRLHPTSQPLFAFEWRDPEMGISGQLTWTRLPQGFKNSPTLFNEALHRDLADFRIQHPDLILLQYVDDLLLAATSELDCQQGTRALLQTLGNLGYRASAKKAQICQKQVKYLGYLLKEGQRWLTEARKETVMGQPTPKTPRQLREFLGTAGFCRLWIPGFAEMAAPLYPLTKPGTLFNWGPDQQKAYQEIKQALLTAPALGLPDLTKPFELFVDEKQGYAKGVLTQKLGPWRRPVAYLSKKLDPVAAGWPPCLRMVAAIAVLTKDAGKLTMGQPLVILAPHAVEALVKQPPDRWLSNARMTHYQALLLDTDRVQFGPVVALNPATLLPLPEEGLQHNCLDILAEAHGTRPDLTDQPLPDADHTWYTDGSSLLQEGQRKAGAAVTTETEVIWAKALPAGTSAQRAELIALTQALKMAEGKKLNVYTDSRYAFATAHIHGEIYRRRGWLTSEGKEIKNKDEILALLKALFLPKRLSIIHCPGHQKGHSAEARGNRMADQAARKAAITETPDTSTLLAGKRTADGSEFEKRTADGSEFESPKKKAKVE

SEQ ID NO: 2740 - protein, 2093 aa, synthetic construct
MPAAKRVKLDGGDKKYSIGLDIGTNSVGWAVITDEYKVPSKKFKVLGNTDRHSIKKNLIGALLFDSGETAEATRLKRTARRRYTRRKNRICYLQEIFSNEMAKVDDSFFHRLEESFLVEEDKKHERHPIFGNIVDEVAYHEKYPTIYHLRKKLVDSTDKADLRLIYLALAHMIKFRGHFLIEGDLNPDNSDVDKLFIQLVQTYNQLFEENPINASGVDAKAILSARLSKSRRLENLIAQLPGEKKNGLFGNLIALSLGLTPNFKSNFDLAEDAKLQLSKDTYDDDLDNLLAQIGDQYADLFLAAKNLSDAILLSDILRVNTEITKAPLSASMIKRYDEHHQDLTLLKALVRQQLPEKYKEIFFDQSKNGYAGYIDGGASQEEFYKFIKPILEKMDGTEELLVKLNREDLLRKQRTFDNGSIPHQIHLGELHAILRRQEDFYPFLKDNREKIEKILTFRIPYYVGPLARGNSRFAWMTRKSEETITPWNFEEVVDKGASAQSFIERMTNFDKNLPNEKVLPKHSLLYEYFTVYNELTKVKYVTEGMRKPAFLSGEQKKAIVDLLFKTNRKVTVKQLKEDYFKKIECFDSVEISGVEDRFNASLGTYHDLLKIIKDKDFLDNEENEDILEDIVLTLTLFEDREMIEERLKTYAHLFDDKVMKQLKRRRYTGWGRLSRKLINGIRDKQSGKTILDFLKSDGFANRNFMQLIHDDSLTFKEDIQKAQVSGQGDSLHEHIANLAGSPAIKKGILQTVKVVDELVKVMGRHKPENIVIEMARENQTTQKGQKNSRERMKRIEEGIKELGSQILKEHPVENTQLQNEKLYLYYLQNGRDMYVDQELDINRLSDYDVDHIVPQSFLKDDSIDNKVLTRSDKARGKSDNVPSEEVVKKMKNYWRQLLNAKLITQRKFDNLTKAERGGLSELDKAGFIKRQLVETRQITKHVAQILDSRMNTKYDENDKLIREVKVITLKSKLVSDFRKDFQFYKVREINNYHHAHDAYLNAVVGTALIKKYPKLESEFVYGDYKVYDVRKMIAKSEQEIGKATAKYFFYSNIMNFFKTEITLANGEIRKRPLIETNGETGEIVWDKGRDFATVRKVLSMPQVNIVKKTEVQTGGFSKESILPKRNSDKLIARKKDWDPKKYGGFDSPTVAYSVLVVAKVEKGKSKKLKSVKELLGITIMERSSFEKNPIDFLEAKGYKEVKKDLIIKLPKYSLFELENGRKRMLASAGELQKGNELALPSKYVNFLYLASHYEKLKGSPEDNEQKQLFVEQHKHYLDEIIEQISEFSKRVILADANLDKVLSAYNKHRDKPIREQAENIIHLFTLTNLGAPAAFKYFDTTIDRKRYTSTKEVLDATLIHQSITGLYETRIDLSQLGGDGGPAPEAAAKGGTLNIEDEHRLHETSKEPDVSLGSTWLSDFPQAWAETGGMGLAVRQAPLIIPLKATSTPVSIKQYPMSQEARLGIKPHIQRLLDQGILVPCQSPWNTPLLPVKKPGTNDYRPVQDLREVNKRVEDIHPTVPNPYNLLSGLPPSHQWYTVLDLKDAFFCLRLHPTSQPLFAFEWRDPEMGISGQLTWTRLPQGFKNSPTLFNEALHRDLADFRIQHPDLILLQYVDDLLLAATSELDCQQGTRALLQTLGNLGYRASAKKAQICQKQVKYLGYLLKEGQRWLTEARKETVMGQPTPKTPRQLREFLGTAGFCRLWIPGFAEMAAPLYPLTKPGTLFNWGPDQQKAYQEIKQALLTAPALGLPDLTKPFELFVDEKQGYAKGVLTQKLGPWRRPVAYLSKKLDPVAAGWPPCLRMVAAIAVLTKDAGKLTMGQPLVILAPHAVEALVKQPPDRWLSNARMTHYQALLLDTDRVQFGPVVALNPATLLPLPEEGLQHNCLDILAEAHGTRPDLTDQPLPDADHTWYTDGSSLLQEGQRKAGAAVTTETEVIWAKALPAGTSAQRAELIALTQALKMAEGKKLNVYTDSRYAFATAHIHGEIYRRRGWLTSEGKEIKNKDEILALLKALFLPKRLSIIHCPGHQKGHSAEARGNRMADQAARKAAITETPDTSTLLAGKRTADGSEFEKRTADGSEFESPKKKAKVE

SEQ ID NO: 2741 - protein, 2115 aa, synthetic construct
MPAAKRVKLDGGDKKYSIGLDIGTNSVGWAVITDEYKVPSKKFKVLGNTDRHSIKKNLIGALLFDSGETAEATRLKRTARRRYTRRKNRICYLQEIFSNEMAKVDDSFFHRLEESFLVEEDKKHERHPIFGNIVDEVAYHEKYPTIYHLRKKLVDSTDKADLRLIYLALAHMIKFRGHFLIEGDLNPDNSDVDKLFIQLVQTYNQLFEENPINASGVDAKAILSARLSKSRRLENLIAQLPGEKKNGLFGNLIALSLGLTPNFKSNFDLAEDAKLQLSKDTYDDDLDNLLAQIGDQYADLFLAAKNLSDAILLSDILRVNTEITKAPLSASMIKRYDEHHQDLTLLKALVRQQLPEKYKEIFFDQSKNGYAGYIDGGASQEEFYKFIKPILEKMDGTEELLVKLNREDLLRKQRTFDNGSIPHQIHLGELHAILRRQEDFYPFLKDNREKIEKILTFRIPYYVGPLARGNSRFAWMTRKSEETITPWNFEEVVDKGASAQSFIERMTNFDKNLPNEKVLPKHSLLYEYFTVYNELTKVKYVTEGMRKPAFLSGEQKKAIVDLLFKTNRKVTVKQLKEDYFKKIECFDSVEISGVEDRFNASLGTYHDLLKIIKDKDFLDNEENEDILEDIVLTLTLFEDREMIEERLKTYAHLFDDKVMKQLKRRRYTGWGRLSRKLINGIRDKQSGKTILDFLKSDGFANRNFMQLIHDDSLTFKEDIQKAQVSGQGDSLHEHIANLAGSPAIKKGILQTVKVVDELVKVMGRHKPENIVIEMARENQTTQKGQKNSRERMKRIEEGIKELGSQILKEHPVENTQLQNEKLYLYYLQNGRDMYVDQELDINRLSDYDVDHIVPQSFLKDDSIDNKVLTRSDKARGKSDNVPSEEVVKKMKNYWRQLLNAKLITQRKFDNLTKAERGGLSELDKAGFIKRQLVETRQITKHVAQILDSRMNTKYDENDKLIREVKVITLKSKLVSDFRKDFQFYKVREINNYHHAHDAYLNAVVGTALIKKYPKLESEFVYGDYKVYDVRKMIAKSEQEIGKATAKYFFYSNIMNFFKTEITLANGEIRKRPLIETNGETGEIVWDKGRDFATVRKVLSMPQVNIVKKTEVQTGGFSKESILPKRNSDKLIARKKDWDPKKYGGFDSPTVAYSVLVVAKVEKGKSKKLKSVKELLGITIMERSSFEKNPIDFLEAKGYKEVKKDLIIKLPKYSLFELENGRKRMLASAGELQKGNELALPSKYVNFLYLASHYEKLKGSPEDNEQKQLFVEQHKHYLDEIIEQISEFSKRVILADANLDKVLSAYNKHRDKPIREQAENIIHLFTLTNLGAPAAFKYFDTTIDRKRYTSTKEVLDATLIHQSITGLYETRIDLSQLGGDGGGGGGSGGGGSGGGGSGGGGSGGGGSGGGGSGGTLNIEDEHRLHETSKEPDVSLGSTWLSDFPQAWAETGGMGLAVRQAPLIIPLKATSTPVSIKQYPMSQEARLGIKPHIQRLLDQGILVPCQSPWNTPLLPVKKPGTNDYRPVQDLREVNKRVEDIHPTVPNPYNLLSGLPPSHQWYTVLDLKDAFFCLRLHPTSQPLFAFEWRDPEMGISGQLTWTRLPQGFKNSPTLFNEALHRDLADFRIQHPDLILLQYVDDLLLAATSELDCQQGTRALLQTLGNLGYRASAKKAQICQKQVKYLGYLLKEGQRWLTEARKETVMGQPTPKTPRQLREFLGTAGFCRLWIPGFAEMAAPLYPLTKPGTLFNWGPDQQKAYQEIKQALLTAPALGLPDLTKPFELFVDEKQGYAKGVLTQKLGPWRRPVAYLSKKLDPVAAGWPPCLRMVAAIAVLTKDAGKLTMGQPLVILAPHAVEALVKQPPDRWLSNARMTHYQALLLDTDRVQFGPVVALNPATLLPLPEEGLQHNCLDILAEAHGTRPDLTDQPLPDADHTWYTDGSSLLQEGQRKAGAAVTTETEVIWAKALPAGTSAQRAELIALTQALKMAEGKKLNVYTDSRYAFATAHIHGEIYRRRGWLTSEGKEIKNKDEILALLKALFLPKRLSIIHCPGHQKGHSAEARGNRMADQAARKAAITETPDTSTLLAGKRTADGSEFEKRTADGSEFESPKKKAKVE

SEQ ID NO: 2742 - protein, 2094 aa, synthetic construct
MPAAKRVKLDGGDKKYSIGLDIGTNSVGWAVITDEYKVPSKKFKVLGNTDRHSIKKNLIGALLFDSGETAEATRLKRTARRRYTRRKNRICYLQEIFSNEMAKVDDSFFHRLEESFLVEEDKKHERHPIFGNIVDEVAYHEKYPTIYHLRKKLVDSTDKADLRLIYLALAHMIKFRGHFLIEGDLNPDNSDVDKLFIQLVQTYNQLFEENPINASGVDAKAILSARLSKSRRLENLIAQLPGEKKNGLFGNLIALSLGLTPNFKSNFDLAEDAKLQLSKDTYDDDLDNLLAQIGDQYADLFLAAKNLSDAILLSDILRVNTEITKAPLSASMIKRYDEHHQDLTLLKALVRQQLPEKYKEIFFDQSKNGYAGYIDGGASQEEFYKFIKPILEKMDGTEELLVKLNREDLLRKQRTFDNGSIPHQIHLGELHAILRRQEDFYPFLKDNREKIEKILTFRIPYYVGPLARGNSRFAWMTRKSEETITPWNFEEVVDKGASAQSFIERMTNFDKNLPNEKVLPKHSLLYEYFTVYNELTKVKYVTEGMRKPAFLSGEQKKAIVDLLFKTNRKVTVKQLKEDYFKKIECFDSVEISGVEDRFNASLGTYHDLLKIIKDKDFLDNEENEDILEDIVLTLTLFEDREMIEERLKTYAHLFDDKVMKQLKRRRYTGWGRLSRKLINGIRDKQSGKTILDFLKSDGFANRNFMQLIHDDSLTFKEDIQKAQVSGQGDSLHEHIANLAGSPAIKKGILQTVKVVDELVKVMGRHKPENIVIEMARENQTTQKGQKNSRERMKRIEEGIKELGSQILKEHPVENTQLQNEKLYLYYLQNGRDMYVDQELDINRLSDYDVDHIVPQSFLKDDSIDNKVLTRSDKARGKSDNVPSEEVVKKMKNYWRQLLNAKLITQRKFDNLTKAERGGLSELDKAGFIKRQLVETRQITKHVAQILDSRMNTKYDENDKLIREVKVITLKSKLVSDFRKDFQFYKVREINNYHHAHDAYLNAVVGTALIKKYPKLESEFVYGDYKVYDVRKMIAKSEQEIGKATAKYFFYSNIMNFFKTEITLANGEIRKRPLIETNGETGEIVWDKGRDFATVRKVLSMPQVNIVKKTEVQTGGFSKESILPKRNSDKLIARKKDWDPKKYGGFDSPTVAYSVLVVAKVEKGKSKKLKSVKELLGITIMERSSFEKNPIDFLEAKGYKEVKKDLIIKLPKYSLFELENGRKRMLASAGELQKGNELALPSKYVNFLYLASHYEKLKGSPEDNEQKQLFVEQHKHYLDEIIEQISEFSKRVILADANLDKVLSAYNKHRDKPIREQAENIIHLFTLTNLGAPAAFKYFDTTIDRKRYTSTKEVLDATLIHQSITGLYETRIDLSQLGGDGGGGGPAPGGSGGTLNIEDEHRLHETSKEPDVSLGSTWLSDFPQAWAETGGMGLAVRQAPLIIPLKATSTPVSIKQYPMSQEARLGIKPHIQRLLDQGILVPCQSPWNTPLLPVKKPGTNDYRPVQDLREVNKRVEDIHPTVPNPYNLLSGLPPSHQWYTVLDLKDAFFCLRLHPTSQPLFAFEWRDPEMGISGQLTWTRLPQGFKNSPTLFNEALHRDLADFRIQHPDLILLQYVDDLLLAATSELDCQQGTRALLQTLGNLGYRASAKKAQICQKQVKYLGYLLKEGQRWLTEARKETVMGQPTPKTPRQLREFLGTAGFCRLWIPGFAEMAAPLYPLTKPGTLFNWGPDQQKAYQEIKQALLTAPALGLPDLTKPFELFVDEKQGYAKGVLTQKLGPWRRPVAYLSKKLDPVAAGWPPCLRMVAAIAVLTKDAGKLTMGQPLVILAPHAVEALVKQPPDRWLSNARMTHYQALLLDTDRVQFGPVVALNPATLLPLPEEGLQHNCLDILAEAHGTRPDLTDQPLPDADHTWYTDGSSLLQEGQRKAGAAVTTETEVIWAKALPAGTSAQRAELIALTQALKMAEGKKLNVYTDSRYAFATAHIHGEIYRRRGWLTSEGKEIKNKDEILALLKALFLPKRLSIIHCPGHQKGHSAEARGNRMADQAARKAAITETPDTSTLLAGKRTADGSEFEKRTADGSEFESPKKKAKVE

SEQ ID NO: 2743 - protein, 2091 aa, synthetic construct
MPAAKRVKLDGGDKKYSIGLDIGTNSVGWAVITDEYKVPSKKFKVLGNTDRHSIKKNLIGALLFDSGETAEATRLKRTARRRYTRRKNRICYLQEIFSNEMAKVDDSFFHRLEESFLVEEDKKHERHPIFGNIVDEVAYHEKYPTIYHLRKKLVDSTDKADLRLIYLALAHMIKFRGHFLIEGDLNPDNSDVDKLFIQLVQTYNQLFEENPINASGVDAKAILSARLSKSRRLENLIAQLPGEKKNGLFGNLIALSLGLTPNFKSNFDLAEDAKLQLSKDTYDDDLDNLLAQIGDQYADLFLAAKNLSDAILLSDILRVNTEITKAPLSASMIKRYDEHHQDLTLLKALVRQQLPEKYKEIFFDQSKNGYAGYIDGGASQEEFYKFIKPILEKMDGTEELLVKLNREDLLRKQRTFDNGSIPHQIHLGELHAILRRQEDFYPFLKDNREKIEKILTFRIPYYVGPLARGNSRFAWMTRKSEETITPWNFEEVVDKGASAQSFIERMTNFDKNLPNEKVLPKHSLLYEYFTVYNELTKVKYVTEGMRKPAFLSGEQKKAIVDLLFKTNRKVTVKQLKEDYFKKIECFDSVEISGVEDRFNASLGTYHDLLKIIKDKDFLDNEENEDILEDIVLTLTLFEDREMIEERLKTYAHLFDDKVMKQLKRRRYTGWGRLSRKLINGIRDKQSGKTILDFLKSDGFANRNFMQLIHDDSLTFKEDIQKAQVSGQGDSLHEHIANLAGSPAIKKGILQTVKVVDELVKVMGRHKPENIVIEMARENQTTQKGQKNSRERMKRIEEGIKELGSQILKEHPVENTQLQNEKLYLYYLQNGRDMYVDQELDINRLSDYDVDHIVPQSFLKDDSIDNKVLTRSDKARGKSDNVPSEEVVKKMKNYWRQLLNAKLITQRKFDNLTKAERGGLSELDKAGFIKRQLVETRQITKHVAQILDSRMNTKYDENDKLIREVKVITLKSKLVSDFRKDFQFYKVREINNYHHAHDAYLNAVVGTALIKKYPKLESEFVYGDYKVYDVRKMIAKSEQEIGKATAKYFFYSNIMNFFKTEITLANGEIRKRPLIETNGETGEIVWDKGRDFATVRKVLSMPQVNIVKKTEVQTGGFSKESILPKRNSDKLIARKKDWDPKKYGGFDSPTVAYSVLVVAKVEKGKSKKLKSVKELLGITIMERSSFEKNPIDFLEAKGYKEVKKDLIIKLPKYSLFELENGRKRMLASAGELQKGNELALPSKYVNFLYLASHYEKLKGSPEDNEQKQLFVEQHKHYLDEIIEQISEFSKRVILADANLDKVLSAYNKHRDKPIREQAENIIHLFTLTNLGAPAAFKYFDTTIDRKRYTSTKEVLDATLIHQSITGLYETRIDLSQLGGDGGPAPGGGGGTLNIEDEHRLHETSKEPDVSLGSTWLSDFPQAWAETGGMGLAVRQAPLIIPLKATSTPVSIKQYPMSQEARLGIKPHIQRLLDQGILVPCQSPWNTPLLPVKKPGTNDYRPVQDLREVNKRVEDIHPTVPNPYNLLSGLPPSHQWYTVLDLKDAFFCLRLHPTSQPLFAFEWRDPEMGISGQLTWTRLPQGFKNSPTLFNEALHRDLADFRIQHPDLILLQYVDDLLLAATSELDCQQGTRALLQTLGNLGYRASAKKAQICQKQVKYLGYLLKEGQRWLTEARKETVMGQPTPKTPRQLREFLGTAGFCRLWIPGFAEMAAPLYPLTKPGTLFNWGPDQQKAYQEIKQALLTAPALGLPDLTKPFELFVDEKQGYAKGVLTQKLGPWRRPVAYLSKKLDPVAAGWPPCLRMVAAIAVLTKDAGKLTMGQPLVILAPHAVEALVKQPPDRWLSNARMTHYQALLLDTDRVQFGPVVALNPATLLPLPEEGLQHNCLDILAEAHGTRPDLTDQPLPDADHTWYTDGSSLLQEGQRKAGAAVTTETEVIWAKALPAGTSAQRAELIALTQALKMAEGKKLNVYTDSRYAFATAHIHGEIYRRRGWLTSEGKEIKNKDEILALLKALFLPKRLSIIHCPGHQKGHSAEARGNRMADQAARKAAITETPDTSTLLAGKRTADGSEFEKRTADGSEFESPKKKAKVE

SEQ ID NO: 2744 - protein, 2096 aa, synthetic construct
MPAAKRVKLDGGDKKYSIGLDIGTNSVGWAVITDEYKVPSKKFKVLGNTDRHSIKKNLIGALLFDSGETAEATRLKRTARRRYTRRKNRICYLQEIFSNEMAKVDDSFFHRLEESFLVEEDKKHERHPIFGNIVDEVAYHEKYPTIYHLRKKLVDSTDKADLRLIYLALAHMIKFRGHFLIEGDLNPDNSDVDKLFIQLVQTYNQLFEENPINASGVDAKAILSARLSKSRRLENLIAQLPGEKKNGLFGNLIALSLGLTPNFKSNFDLAEDAKLQLSKDTYDDDLDNLLAQIGDQYADLFLAAKNLSDAILLSDILRVNTEITKAPLSASMIKRYDEHHQDLTLLKALVRQQLPEKYKEIFFDQSKNGYAGYIDGGASQEEFYKFIKPILEKMDGTEELLVKLNREDLLRKQRTFDNGSIPHQIHLGELHAILRRQEDFYPFLKDNREKIEKILTFRIPYYVGPLARGNSRFAWMTRKSEETITPWNFEEVVDKGASAQSFIERMTNFDKNLPNEKVLPKHSLLYEYFTVYNELTKVKYVTEGMRKPAFLSGEQKKAIVDLLFKTNRKVTVKQLKEDYFKKIECFDSVEISGVEDRFNASLGTYHDLLKIIKDKDFLDNEENEDILEDIVLTLTLFEDREMIEERLKTYAHLFDDKVMKQLKRRRYTGWGRLSRKLINGIRDKQSGKTILDFLKSDGFANRNFMQLIHDDSLTFKEDIQKAQVSGQGDSLHEHIANLAGSPAIKKGILQTVKVVDELVKVMGRHKPENIVIEMARENQTTQKGQKNSRERMKRIEEGIKELGSQILKEHPVENTQLQNEKLYLYYLQNGRDMYVDQELDINRLSDYDVDHIVPQSFLKDDSIDNKVLTRSDKARGKSDNVPSEEVVKKMKNYWRQLLNAKLITQRKFDNLTKAERGGLSELDKAGFIKRQLVETRQITKHVAQILDSRMNTKYDENDKLIREVKVITLKSKLVSDFRKDFQFYKVREINNYHHAHDAYLNAVVGTALIKKYPKLESEFVYGDYKVYDVRKMIAKSEQEIGKATAKYFFYSNIMNFFKTEITLANGEIRKRPLIETNGETGEIVWDKGRDFATVRKVLSMPQVNIVKKTEVQTGGFSKESILPKRNSDKLIARKKDWDPKKYGGFDSPTVAYSVLVVAKVEKGKSKKLKSVKELLGITIMERSSFEKNPIDFLEAKGYKEVKKDLIIKLPKYSLFELENGRKRMLASAGELQKGNELALPSKYVNFLYLASHYEKLKGSPEDNEQKQLFVEQHKHYLDEIIEQISEFSKRVILADANLDKVLSAYNKHRDKPIREQAENIIHLFTLTNLGAPAAFKYFDTTIDRKRYTSTKEVLDATLIHQSITGLYETRIDLSQLGGDGGGGSEAAAKPAPGGTLNIEDEHRLHETSKEPDVSLGSTWLSDFPQAWAETGGMGLAVRQAPLIIPLKATSTPVSIKQYPMSQEARLGIKPHIQRLLDQGILVPCQSPWNTPLLPVKKPGTNDYRPVQDLREVNKRVEDIHPTVPNPYNLLSGLPPSHQWYTVLDLKDAFFCLRLHPTSQPLFAFEWRDPEMGISGQLTWTRLPQGFKNSPTLFNEALHRDLADFRIQHPDLILLQYVDDLLLAATSELDCQQGTRALLQTLGNLGYRASAKKAQICQKQVKYLGYLLKEGQRWLTEARKETVMGQPTPKTPRQLREFLGTAGFCRLWIPGFAEMAAPLYPLTKPGTLFNWGPDQQKAYQEIKQALLTAPALGLPDLTKPFELFVDEKQGYAKGVLTQKLGPWRRPVAYLSKKLDPVAAGWPPCLRMVAAIAVLTKDAGKLTMGQPLVILAPHAVEALVKQPPDRWLSNARMTHYQALLLDTDRVQFGPVVALNPATLLPLPEEGLQHNCLDILAEAHGTRPDLTDQPLPDADHTWYTDGSSLLQEGQRKAGAAVTTETEVIWAKALPAGTSAQRAELIALTQALKMAEGKKLNVYTDSRYAFATAHIHGEIYRRRGWLTSEGKEIKNKDEILALLKALFLPKRLSIIHCPGHQKGHSAEARGNRMADQAARKAAITETPDTSTLLAGKRTADGSEFEKRTADGSEFESPKKKAKVE

SEQ ID NO: 2745 - protein, 2096 aa, synthetic construct
MPAAKRVKLDGGDKKYSIGLDIGTNSVGWAVITDEYKVPSKKFKVLGNTDRHSIKKNLIGALLFDSGETAEATRLKRTARRRYTRRKNRICYLQEIFSNEMAKVDDSFFHRLEESFLVEEDKKHERHPIFGNIVDEVAYHEKYPTIYHLRKKLVDSTDKADLRLIYLALAHMIKFRGHFLIEGDLNPDNSDVDKLFIQLVQTYNQLFEENPINASGVDAKAILSARLSKSRRLENLIAQLPGEKKNGLFGNLIALSLGLTPNFKSNFDLAEDAKLQLSKDTYDDDLDNLLAQIGDQYADLFLAAKNLSDAILLSDILRVNTEITKAPLSASMIKRYDEHHQDLTLLKALVRQQLPEKYKEIFFDQSKNGYAGYIDGGASQEEFYKFIKPILEKMDGTEELLVKLNREDLLRKQRTFDNGSIPHQIHLGELHAILRRQEDFYPFLKDNREKIEKILTFRIPYYVGPLARGNSRFAWMTRKSEETITPWNFEEVVDKGASAQSFIERMTNFDKNLPNEKVLPKHSLLYEYFTVYNELTKVKYVTEGMRKPAFLSGEQKKAIVDLLFKTNRKVTVKQLKEDYFKKIECFDSVEISGVEDRFNASLGTYHDLLKIIKDKDFLDNEENEDILEDIVLTLTLFEDREMIEERLKTYAHLFDDKVMKQLKRRRYTGWGRLSRKLINGIRDKQSGKTILDFLKSDGFANRNFMQLIHDDSLTFKEDIQKAQVSGQGDSLHEHIANLAGSPAIKKGILQTVKVVDELVKVMGRHKPENIVIEMARENQTTQKGQKNSRERMKRIEEGIKELGSQILKEHPVENTQLQNEKLYLYYLQNGRDMYVDQELDINRLSDYDVDHIVPQSFLKDDSIDNKVLTRSDKARGKSDNVPSEEVVKKMKNYWRQLLNAKLITQRKFDNLTKAERGGLSELDKAGFIKRQLVETRQITKHVAQILDSRMNTKYDENDKLIREVKVITLKSKLVSDFRKDFQFYKVREINNYHHAHDAYLNAVVGTALIKKYPKLESEFVYGDYKVYDVRKMIAKSEQEIGKATAKYFFYSNIMNFFKTEITLANGEIRKRPLIETNGETGEIVWDKGRDFATVRKVLSMPQVNIVKKTEVQTGGFSKESILPKRNSDKLIARKKDWDPKKYGGFDSPTVAYSVLVVAKVEKGKSKKLKSVKELLGITIMERSSFEKNPIDFLEAKGYKEVKKDLIIKLPKYSLFELENGRKRMLASAGELQKGNELALPSKYVNFLYLASHYEKLKGSPEDNEQKQLFVEQHKHYLDEIIEQISEFSKRVILADANLDKVLSAYNKHRDKPIREQAENIIHLFTLTNLGAPAAFKYFDTTIDRKRYTSTKEVLDATLIHQSITGLYETRIDLSQLGGDGGEAAAKGGGGGSGGTLNIEDEHRLHETSKEPDVSLGSTWLSDFPQAWAETGGMGLAVRQAPLIIPLKATSTPVSIKQYPMSQEARLGIKPHIQRLLDQGILVPCQSPWNTPLLPVKKPGTNDYRPVQDLREVNKRVEDIHPTVPNPYNLLSGLPPSHQWYTVLDLKDAFFCLRLHPTSQPLFAFEWRDPEMGISGQLTWTRLPQGFKNSPTLFNEALHRDLADFRIQHPDLILLQYVDDLLLAATSELDCQQGTRALLQTLGNLGYRASAKKAQICQKQVKYLGYLLKEGQRWLTEARKETVMGQPTPKTPRQLREFLGTAGFCRLWIPGFAEMAAPLYPLTKPGTLFNWGPDQQKAYQEIKQALLTAPALGLPDLTKPFELFVDEKQGYAKGVLTQKLGPWRRPVAYLSKKLDPVAAGWPPCLRMVAAIAVLTKDAGKLTMGQPLVILAPHAVEALVKQPPDRWLSNARMTHYQALLLDTDRVQFGPVVALNPATLLPLPEEGLQHNCLDILAEAHGTRPDLTDQPLPDADHTWYTDGSSLLQEGQRKAGAAVTTETEVIWAKALPAGTSAQRAELIALTQALKMAEGKKLNVYTDSRYAFATAHIHGEIYRRRGWLTSEGKEIKNKDEILALLKALFLPKRLSIIHCPGHQKGHSAEARGNRMADQAARKAAITETPDTSTLLAGKRTADGSEFEKRTADGSEFESPKKKAKVE

SEQ ID NO: 2746 - protein, 2093 aa, synthetic construct
MPAAKRVKLDGGDKKYSIGLDIGTNSVGWAVITDEYKVPSKKFKVLGNTDRHSIKKNLIGALLFDSGETAEATRLKRTARRRYTRRKNRICYLQEIFSNEMAKVDDSFFHRLEESFLVEEDKKHERHPIFGNIVDEVAYHEKYPTIYHLRKKLVDSTDKADLRLIYLALAHMIKFRGHFLIEGDLNPDNSDVDKLFIQLVQTYNQLFEENPINASGVDAKAILSARLSKSRRLENLIAQLPGEKKNGLFGNLIALSLGLTPNFKSNFDLAEDAKLQLSKDTYDDDLDNLLAQIGDQYADLFLAAKNLSDAILLSDILRVNTEITKAPLSASMIKRYDEHHQDLTLLKALVRQQLPEKYKEIFFDQSKNGYAGYIDGGASQEEFYKFIKPILEKMDGTEELLVKLNREDLLRKQRTFDNGSIPHQIHLGELHAILRRQEDFYPFLKDNREKIEKILTFRIPYYVGPLARGNSRFAWMTRKSEETITPWNFEEVVDKGASAQSFIERMTNFDKNLPNEKVLPKHSLLYEYFTVYNELTKVKYVTEGMRKPAFLSGEQKKAIVDLLFKTNRKVTVKQLKEDYFKKIECFDSVEISGVEDRFNASLGTYHDLLKIIKDKDFLDNEENEDILEDIVLTLTLFEDREMIEERLKTYAHLFDDKVMKQLKRRRYTGWGRLSRKLINGIRDKQSGKTILDFLKSDGFANRNFMQLIHDDSLTFKEDIQKAQVSGQGDSLHEHIANLAGSPAIKKGILQTVKVVDELVKVMGRHKPENIVIEMARENQTTQKGQKNSRERMKRIEEGIKELGSQILKEHPVENTQLQNEKLYLYYLQNGRDMYVDQELDINRLSDYDVDHIVPQSFLKDDSIDNKVLTRSDKARGKSDNVPSEEVVKKMKNYWRQLLNAKLITQRKFDNLTKAERGGLSELDKAGFIKRQLVETRQITKHVAQILDSRMNTKYDENDKLIREVKVITLKSKLVSDFRKDFQFYKVREINNYHHAHDAYLNAVVGTALIKKYPKLESEFVYGDYKVYDVRKMIAKSEQEIGKATAKYFFYSNIMNFFKTEITLANGEIRKRPLIETNGETGEIVWDKGRDFATVRKVLSMPQVNIVKKTEVQTGGFSKESILPKRNSDKLIARKKDWDPKKYGGFDSPTVAYSVLVVAKVEKGKSKKLKSVKELLGITIMERSSFEKNPIDFLEAKGYKEVKKDLIIKLPKYSLFELENGRKRMLASAGELQKGNELALPSKYVNFLYLASHYEKLKGSPEDNEQKQLFVEQHKHYLDEIIEQISEFSKRVILADANLDKVLSAYNKHRDKPIREQAENIIHLFTLTNLGAPAAFKYFDTTIDRKRYTSTKEVLDATLIHQSITGLYETRIDLSQLGGDGGGGGEAAAKGGTLNIEDEHRLHETSKEPDVSLGSTWLSDFPQAWAETGGMGLAVRQAPLIIPLKATSTPVSIKQYPMSQEARLGIKPHIQRLLDQGILVPCQSPWNTPLLPVKKPGTNDYRPVQDLREVNKRVEDIHPTVPNPYNLLSGLPPSHQWYTVLDLKDAFFCLRLHPTSQPLFAFEWRDPEMGISGQLTWTRLPQGFKNSPTLFNEALHRDLADFRIQHPDLILLQYVDDLLLAATSELDCQQGTRALLQTLGNLGYRASAKKAQICQKQVKYLGYLLKEGQRWLTEARKETVMGQPTPKTPRQLREFLGTAGFCRLWIPGFAEMAAPLYPLTKPGTLFNWGPDQQKAYQEIKQALLTAPALGLPDLTKPFELFVDEKQGYAKGVLTQKLGPWRRPVAYLSKKLDPVAAGWPPCLRMVAAIAVLTKDAGKLTMGQPLVILAPHAVEALVKQPPDRWLSNARMTHYQALLLDTDRVQFGPVVALNPATLLPLPEEGLQHNCLDILAEAHGTRPDLTDQPLPDADHTWYTDGSSLLQEGQRKAGAAVTTETEVIWAKALPAGTSAQRAELIALTQALKMAEGKKLNVYTDSRYAFATAHIHGEIYRRRGWLTSEGKEIKNKDEILALLKALFLPKRLSIIHCPGHQKGHSAEARGNRMADQAARKAAITETPDTSTLLAGKRTADGSEFEKRTADGSEFESPKKKAKVE

SEQ ID NO: 2747 - protein, 2096 aa, synthetic construct
MPAAKRVKLDGGDKKYSIGLDIGTNSVGWAVITDEYKVPSKKFKVLGNTDRHSIKKNLIGALLFDSGETAEATRLKRTARRRYTRRKNRICYLQEIFSNEMAKVDDSFFHRLEESFLVEEDKKHERHPIFGNIVDEVAYHEKYPTIYHLRKKLVDSTDKADLRLIYLALAHMIKFRGHFLIEGDLNPDNSDVDKLFIQLVQTYNQLFEENPINASGVDAKAILSARLSKSRRLENLIAQLPGEKKNGLFGNLIALSLGLTPNFKSNFDLAEDAKLQLSKDTYDDDLDNLLAQIGDQYADLFLAAKNLSDAILLSDILRVNTEITKAPLSASMIKRYDEHHQDLTLLKALVRQQLPEKYKEIFFDQSKNGYAGYIDGGASQEEFYKFIKPILEKMDGTEELLVKLNREDLLRKQRTFDNGSIPHQIHLGELHAILRRQEDFYPFLKDNREKIEKILTFRIPYYVGPLARGNSRFAWMTRKSEETITPWNFEEVVDKGASAQSFIERMTNFDKNLPNEKVLPKHSLLYEYFTVYNELTKVKYVTEGMRKPAFLSGEQKKAIVDLLFKTNRKVTVKQLKEDYFKKIECFDSVEISGVEDRFNASLGTYHDLLKIIKDKDFLDNEENEDILEDIVLTLTLFEDREMIEERLKTYAHLFDDKVMKQLKRRRYTGWGRLSRKLINGIRDKQSGKTILDFLKSDGFANRNFMQLIHDDSLTFKEDIQKAQVSGQGDSLHEHIANLAGSPAIKKGILQTVKVVDELVKVMGRHKPENIVIEMARENQTTQKGQKNSRERMKRIEEGIKELGSQILKEHPVENTQLQNEKLYLYYLQNGRDMYVDQELDINRLSDYDVDHIVPQSFLKDDSIDNKVLTRSDKARGKSDNVPSEEVVKKMKNYWRQLLNAKLITQRKFDNLTKAERGGLSELDKAGFIKRQLVETRQITKHVAQILDSRMNTKYDENDKLIREVKVITLKSKLVSDFRKDFQFYKVREINNYHHAHDAYLNAVVGTALIKKYPKLESEFVYGDYKVYDVRKMIAKSEQEIGKATAKYFFYSNIMNFFKTEITLANGEIRKRPLIETNGETGEIVWDKGRDFATVRKVLSMPQVNIVKKTEVQTGGFSKESILPKRNSDKLIARKKDWDPKKYGGFDSPTVAYSVLVVAKVEKGKSKKLKSVKELLGITIMERSSFEKNPIDFLEAKGYKEVKKDLIIKLPKYSLFELENGRKRMLASAGELQKGNELALPSKYVNFLYLASHYEKLKGSPEDNEQKQLFVEQHKHYLDEIIEQISEFSKRVILADANLDKVLSAYNKHRDKPIREQAENIIHLFTLTNLGAPAAFKYFDTTIDRKRYTSTKEVLDATLIHQSITGLYETRIDLSQLGGDGGGGSGSSEAAAKGGTLNIEDEHRLHETSKEPDVSLGSTWLSDFPQAWAETGGMGLAVRQAPLIIPLKATSTPVSIKQYPMSQEARLGIKPHIQRLLDQGILVPCQSPWNTPLLPVKKPGTNDYRPVQDLREVNKRVEDIHPTVPNPYNLLSGLPPSHQWYTVLDLKDAFFCLRLHPTSQPLFAFEWRDPEMGISGQLTWTRLPQGFKNSPTLFNEALHRDLADFRIQHPDLILLQYVDDLLLAATSELDCQQGTRALLQTLGNLGYRASAKKAQICQKQVKYLGYLLKEGQRWLTEARKETVMGQPTPKTPRQLREFLGTAGFCRLWIPGFAEMAAPLYPLTKPGTLFNWGPDQQKAYQEIKQALLTAPALGLPDLTKPFELFVDEKQGYAKGVLTQKLGPWRRPVAYLSKKLDPVAAGWPPCLRMVAAIAVLTKDAGKLTMGQPLVILAPHAVEALVKQPPDRWLSNARMTHYQALLLDTDRVQFGPVVALNPATLLPLPEEGLQHNCLDILAEAHGTRPDLTDQPLPDADHTWYTDGSSLLQEGQRKAGAAVTTETEVIWAKALPAGTSAQRAELIALTQALKMAEGKKLNVYTDSRYAFATAHIHGEIYRRRGWLTSEGKEIKNKDEILALLKALFLPKRLSIIHCPGHQKGHSAEARGNRMADQAARKAAITETPDTSTLLAGKRTADGSEFEKRTADGSEFESPKKKAKVE

SEQ ID NO: 2748 - protein, 2096 aa, synthetic construct
MPAAKRVKLDGGDKKYSIGLDIGTNSVGWAVITDEYKVPSKKFKVLGNTDRHSIKKNLIGALLFDSGETAEATRLKRTARRRYTRRKNRICYLQEIFSNEMAKVDDSFFHRLEESFLVEEDKKHERHPIFGNIVDEVAYHEKYPTIYHLRKKLVDSTDKADLRLIYLALAHMIKFRGHFLIEGDLNPDNSDVDKLFIQLVQTYNQLFEENPINASGVDAKAILSARLSKSRRLENLIAQLPGEKKNGLFGNLIALSLGLTPNFKSNFDLAEDAKLQLSKDTYDDDLDNLLAQIGDQYADLFLAAKNLSDAILLSDILRVNTEITKAPLSASMIKRYDEHHQDLTLLKALVRQQLPEKYKEIFFDQSKNGYAGYIDGGASQEEFYKFIKPILEKMDGTEELLVKLNREDLLRKQRTFDNGSIPHQIHLGELHAILRRQEDFYPFLKDNREKIEKILTFRIPYYVGPLARGNSRFAWMTRKSEETITPWNFEEVVDKGASAQSFIERMTNFDKNLPNEKVLPKHSLLYEYFTVYNELTKVKYVTEGMRKPAFLSGEQKKAIVDLLFKTNRKVTVKQLKEDYFKKIECFDSVEISGVEDRFNASLGTYHDLLKIIKDKDFLDNEENEDILEDIVLTLTLFEDREMIEERLKTYAHLFDDKVMKQLKRRRYTGWGRLSRKLINGIRDKQSGKTILDFLKSDGFANRNFMQLIHDDSLTFKEDIQKAQVSGQGDSLHEHIANLAGSPAIKKGILQTVKVVDELVKVMGRHKPENIVIEMARENQTTQKGQKNSRERMKRIEEGIKELGSQILKEHPVENTQLQNEKLYLYYLQNGRDMYVDQELDINRLSDYDVDHIVPQSFLKDDSIDNKVLTRSDKARGKSDNVPSEEVVKKMKNYWRQLLNAKLITQRKFDNLTKAERGGLSELDKAGFIKRQLVETRQITKHVAQILDSRMNTKYDENDKLIREVKVITLKSKLVSDFRKDFQFYKVREINNYHHAHDAYLNAVVGTALIKKYPKLESEFVYGDYKVYDVRKMIAKSEQEIGKATAKYFFYSNIMNFFKTEITLANGEIRKRPLIETNGETGEIVWDKGRDFATVRKVLSMPQVNIVKKTEVQTGGFSKESILPKRNSDKLIARKKDWDPKKYGGFDSPTVAYSVLVVAKVEKGKSKKLKSVKELLGITIMERSSFEKNPIDFLEAKGYKEVKKDLIIKLPKYSLFELENGRKRMLASAGELQKGNELALPSKYVNFLYLASHYEKLKGSPEDNEQKQLFVEQHKHYLDEIIEQISEFSKRVILADANLDKVLSAYNKHRDKPIREQAENIIHLFTLTNLGAPAAFKYFDTTIDRKRYTSTKEVLDATLIHQSITGLYETRIDLSQLGGDGGPAPGSSEAAAKGGTLNIEDEHRLHETSKEPDVSLGSTWLSDFPQAWAETGGMGLAVRQAPLIIPLKATSTPVSIKQYPMSQEARLGIKPHIQRLLDQGILVPCQSPWNTPLLPVKKPGTNDYRPVQDLREVNKRVEDIHPTVPNPYNLLSGLPPSHQWYTVLDLKDAFFCLRLHPTSQPLFAFEWRDPEMGISGQLTWTRLPQGFKNSPTLFNEALHRDLADFRIQHPDLILLQYVDDLLLAATSELDCQQGTRALLQTLGNLGYRASAKKAQICQKQVKYLGYLLKEGQRWLTEARKETVMGQPTPKTPRQLREFLGTAGFCRLWIPGFAEMAAPLYPLTKPGTLFNWGPDQQKAYQEIKQALLTAPALGLPDLTKPFELFVDEKQGYAKGVLTQKLGPWRRPVAYLSKKLDPVAAGWPPCLRMVAAIAVLTKDAGKLTMGQPLVILAPHAVEALVKQPPDRWLSNARMTHYQALLLDTDRVQFGPVVALNPATLLPLPEEGLQHNCLDILAEAHGTRPDLTDQPLPDADHTWYTDGSSLLQEGQRKAGAAVTTETEVIWAKALPAGTSAQRAELIALTQALKMAEGKKLNVYTDSRYAFATAHIHGEIYRRRGWLTSEGKEIKNKDEILALLKALFLPKRLSIIHCPGHQKGHSAEARGNRMADQAARKAAITETPDTSTLLAGKRTADGSEFEKRTADGSEFESPKKKAKVE

SEQ ID NO: 2749 - protein, 2095 aa, synthetic construct
MPAAKRVKLDGGDKKYSIGLDIGTNSVGWAVITDEYKVPSKKFKVLGNTDRHSIKKNLIGALLFDSGETAEATRLKRTARRRYTRRKNRICYLQEIFSNEMAKVDDSFFHRLEESFLVEEDKKHERHPIFGNIVDEVAYHEKYPTIYHLRKKLVDSTDKADLRLIYLALAHMIKFRGHFLIEGDLNPDNSDVDKLFIQLVQTYNQLFEENPINASGVDAKAILSARLSKSRRLENLIAQLPGEKKNGLFGNLIALSLGLTPNFKSNFDLAEDAKLQLSKDTYDDDLDNLLAQIGDQYADLFLAAKNLSDAILLSDILRVNTEITKAPLSASMIKRYDEHHQDLTLLKALVRQQLPEKYKEIFFDQSKNGYAGYIDGGASQEEFYKFIKPILEKMDGTEELLVKLNREDLLRKQRTFDNGSIPHQIHLGELHAILRRQEDFYPFLKDNREKIEKILTFRIPYYVGPLARGNSRFAWMTRKSEETITPWNFEEVVDKGASAQSFIERMTNFDKNLPNEKVLPKHSLLYEYFTVYNELTKVKYVTEGMRKPAFLSGEQKKAIVDLLFKTNRKVTVKQLKEDYFKKIECFDSVEISGVEDRFNASLGTYHDLLKIIKDKDFLDNEENEDILEDIVLTLTLFEDREMIEERLKTYAHLFDDKVMKQLKRRRYTGWGRLSRKLINGIRDKQSGKTILDFLKSDGFANRNFMQLIHDDSLTFKEDIQKAQVSGQGDSLHEHIANLAGSPAIKKGILQTVKVVDELVKVMGRHKPENIVIEMARENQTTQKGQKNSRERMKRIEEGIKELGSQILKEHPVENTQLQNEKLYLYYLQNGRDMYVDQELDINRLSDYDVDHIVPQSFLKDDSIDNKVLTRSDKARGKSDNVPSEEVVKKMKNYWRQLLNAKLITQRKFDNLTKAERGGLSELDKAGFIKRQLVETRQITKHVAQILDSRMNTKYDENDKLIREVKVITLKSKLVSDFRKDFQFYKVREINNYHHAHDAYLNAVVGTALIKKYPKLESEFVYGDYKVYDVRKMIAKSEQEIGKATAKYFFYSNIMNFFKTEITLANGEIRKRPLIETNGETGEIVWDKGRDFATVRKVLSMPQVNIVKKTEVQTGGFSKESILPKRNSDKLIARKKDWDPKKYGGFDSPTVAYSVLVVAKVEKGKSKKLKSVKELLGITIMERSSFEKNPIDFLEAKGYKEVKKDLIIKLPKYSLFELENGRKRMLASAGELQKGNELALPSKYVNFLYLASHYEKLKGSPEDNEQKQLFVEQHKHYLDEIIEQISEFSKRVILADANLDKVLSAYNKHRDKPIREQAENIIHLFTLTNLGAPAAFKYFDTTIDRKRYTSTKEVLDATLIHQSITGLYETRIDLSQLGGDGGGGGGSGGGGSGGTLNIEDEHRLHETSKEPDVSLGSTWLSDFPQAWAETGGMGLAVRQAPLIIPLKATSTPVSIKQYPMSQEARLGIKPHIQRLLDQGILVPCQSPWNTPLLPVKKPGTNDYRPVQDLREVNKRVEDIHPTVPNPYNLLSGLPPSHQWYTVLDLKDAFFCLRLHPTSQPLFAFEWRDPEMGISGQLTWTRLPQGFKNSPTLFNEALHRDLADFRIQHPDLILLQYVDDLLLAATSELDCQQGTRALLQTLGNLGYRASAKKAQICQKQVKYLGYLLKEGQRWLTEARKETVMGQPTPKTPRQLREFLGTAGFCRLWIPGFAEMAAPLYPLTKPGTLFNWGPDQQKAYQEIKQALLTAPALGLPDLTKPFELFVDEKQGYAKGVLTQKLGPWRRPVAYLSKKLDPVAAGWPPCLRMVAAIAVLTKDAGKLTMGQPLVILAPHAVEALVKQPPDRWLSNARMTHYQALLLDTDRVQFGPVVALNPATLLPLPEEGLQHNCLDILAEAHGTRPDLTDQPLPDADHTWYTDGSSLLQEGQRKAGAAVTTETEVIWAKALPAGTSAQRAELIALTQALKMAEGKKLNVYTDSRYAFATAHIHGEIYRRRGWLTSEGKEIKNKDEILALLKALFLPKRLSIIHCPGHQKGHSAEARGNRMADQAARKAAITETPDTSTLLAGKRTADGSEFEKRTADGSEFESPKKKAKVE

SEQ ID NO: 2750 - protein, 2091 aa, synthetic construct
MPAAKRVKLDGGDKKYSIGLDIGTNSVGWAVITDEYKVPSKKFKVLGNTDRHSIKKNLIGALLFDSGETAEATRLKRTARRRYTRRKNRICYLQEIFSNEMAKVDDSFFHRLEESFLVEEDKKHERHPIFGNIVDEVAYHEKYPTIYHLRKKLVDSTDKADLRLIYLALAHMIKFRGHFLIEGDLNPDNSDVDKLFIQLVQTYNQLFEENPINASGVDAKAILSARLSKSRRLENLIAQLPGEKKNGLFGNLIALSLGLTPNFKSNFDLAEDAKLQLSKDTYDDDLDNLLAQIGDQYADLFLAAKNLSDAILLSDILRVNTEITKAPLSASMIKRYDEHHQDLTLLKALVRQQLPEKYKEIFFDQSKNGYAGYIDGGASQEEFYKFIKPILEKMDGTEELLVKLNREDLLRKQRTFDNGSIPHQIHLGELHAILRRQEDFYPFLKDNREKIEKILTFRIPYYVGPLARGNSRFAWMTRKSEETITPWNFEEVVDKGASAQSFIERMTNFDKNLPNEKVLPKHSLLYEYFTVYNELTKVKYVTEGMRKPAFLSGEQKKAIVDLLFKTNRKVTVKQLKEDYFKKIECFDSVEISGVEDRFNASLGTYHDLLKIIKDKDFLDNEENEDILEDIVLTLTLFEDREMIEERLKTYAHLFDDKVMKQLKRRRYTGWGRLSRKLINGIRDKQSGKTILDFLKSDGFANRNFMQLIHDDSLTFKEDIQKAQVSGQGDSLHEHIANLAGSPAIKKGILQTVKVVDELVKVMGRHKPENIVIEMARENQTTQKGQKNSRERMKRIEEGIKELGSQILKEHPVENTQLQNEKLYLYYLQNGRDMYVDQELDINRLSDYDVDHIVPQSFLKDDSIDNKVLTRSDKARGKSDNVPSEEVVKKMKNYWRQLLNAKLITQRKFDNLTKAERGGLSELDKAGFIKRQLVETRQITKHVAQILDSRMNTKYDENDKLIREVKVITLKSKLVSDFRKDFQFYKVREINNYHHAHDAYLNAVVGTALIKKYPKLESEFVYGDYKVYDVRKMIAKSEQEIGKATAKYFFYSNIMNFFKTEITLANGEIRKRPLIETNGETGEIVWDKGRDFATVRKVLSMPQVNIVKKTEVQTGGFSKESILPKRNSDKLIARKKDWDPKKYGGFDSPTVAYSVLVVAKVEKGKSKKLKSVKELLGITIMERSSFEKNPIDFLEAKGYKEVKKDLIIKLPKYSLFELENGRKRMLASAGELQKGNELALPSKYVNFLYLASHYEKLKGSPEDNEQKQLFVEQHKHYLDEIIEQISEFSKRVILADANLDKVLSAYNKHRDKPIREQAENIIHLFTLTNLGAPAAFKYFDTTIDRKRYTSTKEVLDATLIHQSITGLYETRIDLSQLGGDGGGSSPAPGGTLNIEDEHRLHETSKEPDVSLGSTWLSDFPQAWAETGGMGLAVRQAPLIIPLKATSTPVSIKQYPMSQEARLGIKPHIQRLLDQGILVPCQSPWNTPLLPVKKPGTNDYRPVQDLREVNKRVEDIHPTVPNPYNLLSGLPPSHQWYTVLDLKDAFFCLRLHPTSQPLFAFEWRDPEMGISGQLTWTRLPQGFKNSPTLFNEALHRDLADFRIQHPDLILLQYVDDLLLAATSELDCQQGTRALLQTLGNLGYRASAKKAQICQKQVKYLGYLLKEGQRWLTEARKETVMGQPTPKTPRQLREFLGTAGFCRLWIPGFAEMAAPLYPLTKPGTLFNWGPDQQKAYQEIKQALLTAPALGLPDLTKPFELFVDEKQGYAKGVLTQKLGPWRRPVAYLSKKLDPVAAGWPPCLRMVAAIAVLTKDAGKLTMGQPLVILAPHAVEALVKQPPDRWLSNARMTHYQALLLDTDRVQFGPVVALNPATLLPLPEEGLQHNCLDILAEAHGTRPDLTDQPLPDADHTWYTDGSSLLQEGQRKAGAAVTTETEVIWAKALPAGTSAQRAELIALTQALKMAEGKKLNVYTDSRYAFATAHIHGEIYRRRGWLTSEGKEIKNKDEILALLKALFLPKRLSIIHCPGHQKGHSAEARGNRMADQAARKAAITETPDTSTLLAGKRTADGSEFEKRTADGSEFESPKKKAKVE

SEQ ID NO: 2751 - protein, 2096 aa, synthetic construct
MPAAKRVKLDGGDKKYSIGLDIGTNSVGWAVITDEYKVPSKKFKVLGNTDRHSIKKNLIGALLFDSGETAEATRLKRTARRRYTRRKNRICYLQEIFSNEMAKVDDSFFHRLEESFLVEEDKKHERHPIFGNIVDEVAYHEKYPTIYHLRKKLVDSTDKADLRLIYLALAHMIKFRGHFLIEGDLNPDNSDVDKLFIQLVQTYNQLFEENPINASGVDAKAILSARLSKSRRLENLIAQLPGEKKNGLFGNLIALSLGLTPNFKSNFDLAEDAKLQLSKDTYDDDLDNLLAQIGDQYADLFLAAKNLSDAILLSDILRVNTEITKAPLSASMIKRYDEHHQDLTLLKALVRQQLPEKYKEIFFDQSKNGYAGYIDGGASQEEFYKFIKPILEKMDGTEELLVKLNREDLLRKQRTFDNGSIPHQIHLGELHAILRRQEDFYPFLKDNREKIEKILTFRIPYYVGPLARGNSRFAWMTRKSEETITPWNFEEVVDKGASAQSFIERMTNFDKNLPNEKVLPKHSLLYEYFTVYNELTKVKYVTEGMRKPAFLSGEQKKAIVDLLFKTNRKVTVKQLKEDYFKKIECFDSVEISGVEDRFNASLGTYHDLLKIIKDKDFLDNEENEDILEDIVLTLTLFEDREMIEERLKTYAHLFDDKVMKQLKRRRYTGWGRLSRKLINGIRDKQSGKTILDFLKSDGFANRNFMQLIHDDSLTFKEDIQKAQVSGQGDSLHEHIANLAGSPAIKKGILQTVKVVDELVKVMGRHKPENIVIEMARENQTTQKGQKNSRERMKRIEEGIKELGSQILKEHPVENTQLQNEKLYLYYLQNGRDMYVDQELDINRLSDYDVDHIVPQSFLKDDSIDNKVLTRSDKARGKSDNVPSEEVVKKMKNYWRQLLNAKLITQRKFDNLTKAERGGLSELDKAGFIKRQLVETRQITKHVAQILDSRMNTKYDENDKLIREVKVITLKSKLVSDFRKDFQFYKVREINNYHHAHDAYLNAVVGTALIKKYPKLESEFVYGDYKVYDVRKMIAKSEQEIGKATAKYFFYSNIMNFFKTEITLANGEIRKRPLIETNGETGEIVWDKGRDFATVRKVLSMPQVNIVKKTEVQTGGFSKESILPKRNSDKLIARKKDWDPKKYGGFDSPTVAYSVLVVAKVEKGKSKKLKSVKELLGITIMERSSFEKNPIDFLEAKGYKEVKKDLIIKLPKYSLFELENGRKRMLASAGELQKGNELALPSKYVNFLYLASHYEKLKGSPEDNEQKQLFVEQHKHYLDEIIEQISEFSKRVILADANLDKVLSAYNKHRDKPIREQAENIIHLFTLTNLGAPAAFKYFDTTIDRKRYTSTKEVLDATLIHQSITGLYETRIDLSQLGGDGGGGSGGGEAAAKGGTLNIEDEHRLHETSKEPDVSLGSTWLSDFPQAWAETGGMGLAVRQAPLIIPLKATSTPVSIKQYPMSQEARLGIKPHIQRLLDQGILVPCQSPWNTPLLPVKKPGTNDYRPVQDLREVNKRVEDIHPTVPNPYNLLSGLPPSHQWYTVLDLKDAFFCLRLHPTSQPLFAFEWRDPEMGISGQLTWTRLPQGFKNSPTLFNEALHRDLADFRIQHPDLILLQYVDDLLLAATSELDCQQGTRALLQTLGNLGYRASAKKAQICQKQVKYLGYLLKEGQRWLTEARKETVMGQPTPKTPRQLREFLGTAGFCRLWIPGFAEMAAPLYPLTKPGTLFNWGPDQQKAYQEIKQALLTAPALGLPDLTKPFELFVDEKQGYAKGVLTQKLGPWRRPVAYLSKKLDPVAAGWPPCLRMVAAIAVLTKDAGKLTMGQPLVILAPHAVEALVKQPPDRWLSNARMTHYQALLLDTDRVQFGPVVALNPATLLPLPEEGLQHNCLDILAEAHGTRPDLTDQPLPDADHTWYTDGSSLLQEGQRKAGAAVTTETEVIWAKALPAGTSAQRAELIALTQALKMAEGKKLNVYTDSRYAFATAHIHGEIYRRRGWLTSEGKEIKNKDEILALLKALFLPKRLSIIHCPGHQKGHSAEARGNRMADQAARKAAITETPDTSTLLAGKRTADGSEFEKRTADGSEFESPKKKAKVE

SEQ ID NO: 2752 - protein, 2094 aa, synthetic construct
MPAAKRVKLDGGDKKYSIGLDIGTNSVGWAVITDEYKVPSKKFKVLGNTDRHSIKKNLIGALLFDSGETAEATRLKRTARRRYTRRKNRICYLQEIFSNEMAKVDDSFFHRLEESFLVEEDKKHERHPIFGNIVDEVAYHEKYPTIYHLRKKLVDSTDKADLRLIYLALAHMIKFRGHFLIEGDLNPDNSDVDKLFIQLVQTYNQLFEENPINASGVDAKAILSARLSKSRRLENLIAQLPGEKKNGLFGNLIALSLGLTPNFKSNFDLAEDAKLQLSKDTYDDDLDNLLAQIGDQYADLFLAAKNLSDAILLSDILRVNTEITKAPLSASMIKRYDEHHQDLTLLKALVRQQLPEKYKEIFFDQSKNGYAGYIDGGASQEEFYKFIKPILEKMDGTEELLVKLNREDLLRKQRTFDNGSIPHQIHLGELHAILRRQEDFYPFLKDNREKIEKILTFRIPYYVGPLARGNSRFAWMTRKSEETITPWNFEEVVDKGASAQSFIERMTNFDKNLPNEKVLPKHSLLYEYFTVYNELTKVKYVTEGMRKPAFLSGEQKKAIVDLLFKTNRKVTVKQLKEDYFKKIECFDSVEISGVEDRFNASLGTYHDLLKIIKDKDFLDNEENEDILEDIVLTLTLFEDREMIEERLKTYAHLFDDKVMKQLKRRRYTGWGRLSRKLINGIRDKQSGKTILDFLKSDGFANRNFMQLIHDDSLTFKEDIQKAQVSGQGDSLHEHIANLAGSPAIKKGILQTVKVVDELVKVMGRHKPENIVIEMARENQTTQKGQKNSRERMKRIEEGIKELGSQILKEHPVENTQLQNEKLYLYYLQNGRDMYVDQELDINRLSDYDVDHIVPQSFLKDDSIDNKVLTRSDKARGKSDNVPSEEVVKKMKNYWRQLLNAKLITQRKFDNLTKAERGGLSELDKAGFIKRQLVETRQITKHVAQILDSRMNTKYDENDKLIREVKVITLKSKLVSDFRKDFQFYKVREINNYHHAHDAYLNAVVGTALIKKYPKLESEFVYGDYKVYDVRKMIAKSEQEIGKATAKYFFYSNIMNFFKTEITLANGEIRKRPLIETNGETGEIVWDKGRDFATVRKVLSMPQVNIVKKTEVQTGGFSKESILPKRNSDKLIARKKDWDPKKYGGFDSPTVAYSVLVVAKVEKGKSKKLKSVKELLGITIMERSSFEKNPIDFLEAKGYKEVKKDLIIKLPKYSLFELENGRKRMLASAGELQKGNELALPSKYVNFLYLASHYEKLKGSPEDNEQKQLFVEQHKHYLDEIIEQISEFSKRVILADANLDKVLSAYNKHRDKPIREQAENIIHLFTLTNLGAPAAFKYFDTTIDRKRYTSTKEVLDATLIHQSITGLYETRIDLSQLGGDGGGGSPAPGSSGGTLNIEDEHRLHETSKEPDVSLGSTWLSDFPQAWAETGGMGLAVRQAPLIIPLKATSTPVSIKQYPMSQEARLGIKPHIQRLLDQGILVPCQSPWNTPLLPVKKPGTNDYRPVQDLREVNKRVEDIHPTVPNPYNLLSGLPPSHQWYTVLDLKDAFFCLRLHPTSQPLFAFEWRDPEMGISGQLTWTRLPQGFKNSPTLFNEALHRDLADFRIQHPDLILLQYVDDLLLAATSELDCQQGTRALLQTLGNLGYRASAKKAQICQKQVKYLGYLLKEGQRWLTEARKETVMGQPTPKTPRQLREFLGTAGFCRLWIPGFAEMAAPLYPLTKPGTLFNWGPDQQKAYQEIKQALLTAPALGLPDLTKPFELFVDEKQGYAKGVLTQKLGPWRRPVAYLSKKLDPVAAGWPPCLRMVAAIAVLTKDAGKLTMGQPLVILAPHAVEALVKQPPDRWLSNARMTHYQALLLDTDRVQFGPVVALNPATLLPLPEEGLQHNCLDILAEAHGTRPDLTDQPLPDADHTWYTDGSSLLQEGQRKAGAAVTTETEVIWAKALPAGTSAQRAELIALTQALKMAEGKKLNVYTDSRYAFATAHIHGEIYRRRGWLTSEGKEIKNKDEILALLKALFLPKRLSIIHCPGHQKGHSAEARGNRMADQAARKAAITETPDTSTLLAGKRTADGSEFEKRTADGSEFESPKKKAKVE

SEQ ID NO: 2753 - protein, 2096 aa, synthetic construct
MPAAKRVKLDGGDKKYSIGLDIGTNSVGWAVITDEYKVPSKKFKVLGNTDRHSIKKNLIGALLFDSGETAEATRLKRTARRRYTRRKNRICYLQEIFSNEMAKVDDSFFHRLEESFLVEEDKKHERHPIFGNIVDEVAYHEKYPTIYHLRKKLVDSTDKADLRLIYLALAHMIKFRGHFLIEGDLNPDNSDVDKLFIQLVQTYNQLFEENPINASGVDAKAILSARLSKSRRLENLIAQLPGEKKNGLFGNLIALSLGLTPNFKSNFDLAEDAKLQLSKDTYDDDLDNLLAQIGDQYADLFLAAKNLSDAILLSDILRVNTEITKAPLSASMIKRYDEHHQDLTLLKALVRQQLPEKYKEIFFDQSKNGYAGYIDGGASQEEFYKFIKPILEKMDGTEELLVKLNREDLLRKQRTFDNGSIPHQIHLGELHAILRRQEDFYPFLKDNREKIEKILTFRIPYYVGPLARGNSRFAWMTRKSEETITPWNFEEVVDKGASAQSFIERMTNFDKNLPNEKVLPKHSLLYEYFTVYNELTKVKYVTEGMRKPAFLSGEQKKAIVDLLFKTNRKVTVKQLKEDYFKKIECFDSVEISGVEDRFNASLGTYHDLLKIIKDKDFLDNEENEDILEDIVLTLTLFEDREMIEERLKTYAHLFDDKVMKQLKRRRYTGWGRLSRKLINGIRDKQSGKTILDFLKSDGFANRNFMQLIHDDSLTFKEDIQKAQVSGQGDSLHEHIANLAGSPAIKKGILQTVKVVDELVKVMGRHKPENIVIEMARENQTTQKGQKNSRERMKRIEEGIKELGSQILKEHPVENTQLQNEKLYLYYLQNGRDMYVDQELDINRLSDYDVDHIVPQSFLKDDSIDNKVLTRSDKARGKSDNVPSEEVVKKMKNYWRQLLNAKLITQRKFDNLTKAERGGLSELDKAGFIKRQLVETRQITKHVAQILDSRMNTKYDENDKLIREVKVITLKSKLVSDFRKDFQFYKVREINNYHHAHDAYLNAVVGTALIKKYPKLESEFVYGDYKVYDVRKMIAKSEQEIGKATAKYFFYSNIMNFFKTEITLANGEIRKRPLIETNGETGEIVWDKGRDFATVRKVLSMPQVNIVKKTEVQTGGFSKESILPKRNSDKLIARKKDWDPKKYGGFDSPTVAYSVLVVAKVEKGKSKKLKSVKELLGITIMERSSFEKNPIDFLEAKGYKEVKKDLIIKLPKYSLFELENGRKRMLASAGELQKGNELALPSKYVNFLYLASHYEKLKGSPEDNEQKQLFVEQHKHYLDEIIEQISEFSKRVILADANLDKVLSAYNKHRDKPIREQAENIIHLFTLTNLGAPAAFKYFDTTIDRKRYTSTKEVLDATLIHQSITGLYETRIDLSQLGGDGGPAPGGSEAAAKGGTLNIEDEHRLHETSKEPDVSLGSTWLSDFPQAWAETGGMGLAVRQAPLIIPLKATSTPVSIKQYPMSQEARLGIKPHIQRLLDQGILVPCQSPWNTPLLPVKKPGTNDYRPVQDLREVNKRVEDIHPTVPNPYNLLSGLPPSHQWYTVLDLKDAFFCLRLHPTSQPLFAFEWRDPEMGISGQLTWTRLPQGFKNSPTLFNEALHRDLADFRIQHPDLILLQYVDDLLLAATSELDCQQGTRALLQTLGNLGYRASAKKAQICQKQVKYLGYLLKEGQRWLTEARKETVMGQPTPKTPRQLREFLGTAGFCRLWIPGFAEMAAPLYPLTKPGTLFNWGPDQQKAYQEIKQALLTAPALGLPDLTKPFELFVDEKQGYAKGVLTQKLGPWRRPVAYLSKKLDPVAAGWPPCLRMVAAIAVLTKDAGKLTMGQPLVILAPHAVEALVKQPPDRWLSNARMTHYQALLLDTDRVQFGPVVALNPATLLPLPEEGLQHNCLDILAEAHGTRPDLTDQPLPDADHTWYTDGSSLLQEGQRKAGAAVTTETEVIWAKALPAGTSAQRAELIALTQALKMAEGKKLNVYTDSRYAFATAHIHGEIYRRRGWLTSEGKEIKNKDEILALLKALFLPKRLSIIHCPGHQKGHSAEARGNRMADQAARKAAITETPDTSTLLAGKRTADGSEFEKRTADGSEFESPKKKAKVE

SEQ ID NO: 2754 - protein, 2090 aa, synthetic construct
MPAAKRVKLDGGDKKYSIGLDIGTNSVGWAVITDEYKVPSKKFKVLGNTDRHSIKKNLIGALLFDSGETAEATRLKRTARRRYTRRKNRICYLQEIFSNEMAKVDDSFFHRLEESFLVEEDKKHERHPIFGNIVDEVAYHEKYPTIYHLRKKLVDSTDKADLRLIYLALAHMIKFRGHFLIEGDLNPDNSDVDKLFIQLVQTYNQLFEENPINASGVDAKAILSARLSKSRRLENLIAQLPGEKKNGLFGNLIALSLGLTPNFKSNFDLAEDAKLQLSKDTYDDDLDNLLAQIGDQYADLFLAAKNLSDAILLSDILRVNTEITKAPLSASMIKRYDEHHQDLTLLKALVRQQLPEKYKEIFFDQSKNGYAGYIDGGASQEEFYKFIKPILEKMDGTEELLVKLNREDLLRKQRTFDNGSIPHQIHLGELHAILRRQEDFYPFLKDNREKIEKILTFRIPYYVGPLARGNSRFAWMTRKSEETITPWNFEEVVDKGASAQSFIERMTNFDKNLPNEKVLPKHSLLYEYFTVYNELTKVKYVTEGMRKPAFLSGEQKKAIVDLLFKTNRKVTVKQLKEDYFKKIECFDSVEISGVEDRFNASLGTYHDLLKIIKDKDFLDNEENEDILEDIVLTLTLFEDREMIEERLKTYAHLFDDKVMKQLKRRRYTGWGRLSRKLINGIRDKQSGKTILDFLKSDGFANRNFMQLIHDDSLTFKEDIQKAQVSGQGDSLHEHIANLAGSPAIKKGILQTVKVVDELVKVMGRHKPENIVIEMARENQTTQKGQKNSRERMKRIEEGIKELGSQILKEHPVENTQLQNEKLYLYYLQNGRDMYVDQELDINRLSDYDVDHIVPQSFLKDDSIDNKVLTRSDKARGKSDNVPSEEVVKKMKNYWRQLLNAKLITQRKFDNLTKAERGGLSELDKAGFIKRQLVETRQITKHVAQILDSRMNTKYDENDKLIREVKVITLKSKLVSDFRKDFQFYKVREINNYHHAHDAYLNAVVGTALIKKYPKLESEFVYGDYKVYDVRKMIAKSEQEIGKATAKYFFYSNIMNFFKTEITLANGEIRKRPLIETNGETGEIVWDKGRDFATVRKVLSMPQVNIVKKTEVQTGGFSKESILPKRNSDKLIARKKDWDPKKYGGFDSPTVAYSVLVVAKVEKGKSKKLKSVKELLGITIMERSSFEKNPIDFLEAKGYKEVKKDLIIKLPKYSLFELENGRKRMLASAGELQKGNELALPSKYVNFLYLASHYEKLKGSPEDNEQKQLFVEQHKHYLDEIIEQISEFSKRVILADANLDKVLSAYNKHRDKPIREQAENIIHLFTLTNLGAPAAFKYFDTTIDRKRYTSTKEVLDATLIHQSITGLYETRIDLSQLGGDGGGGGGSGGTLNIEDEHRLHETSKEPDVSLGSTWLSDFPQAWAETGGMGLAVRQAPLIIPLKATSTPVSIKQYPMSQEARLGIKPHIQRLLDQGILVPCQSPWNTPLLPVKKPGTNDYRPVQDLREVNKRVEDIHPTVPNPYNLLSGLPPSHQWYTVLDLKDAFFCLRLHPTSQPLFAFEWRDPEMGISGQLTWTRLPQGFKNSPTLFNEALHRDLADFRIQHPDLILLQYVDDLLLAATSELDCQQGTRALLQTLGNLGYRASAKKAQICQKQVKYLGYLLKEGQRWLTEARKETVMGQPTPKTPRQLREFLGTAGFCRLWIPGFAEMAAPLYPLTKPGTLFNWGPDQQKAYQEIKQALLTAPALGLPDLTKPFELFVDEKQGYAKGVLTQKLGPWRRPVAYLSKKLDPVAAGWPPCLRMVAAIAVLTKDAGKLTMGQPLVILAPHAVEALVKQPPDRWLSNARMTHYQALLLDTDRVQFGPVVALNPATLLPLPEEGLQHNCLDILAEAHGTRPDLTDQPLPDADHTWYTDGSSLLQEGQRKAGAAVTTETEVIWAKALPAGTSAQRAELIALTQALKMAEGKKLNVYTDSRYAFATAHIHGEIYRRRGWLTSEGKEIKNKDEILALLKALFLPKRLSIIHCPGHQKGHSAEARGNRMADQAARKAAITETPDTSTLLAGKRTADGSEFEKRTADGSEFESPKKKAKVE

SEQ ID NO: 2755 - protein, 2096 aa, synthetic construct
MPAAKRVKLDGGDKKYSIGLDIGTNSVGWAVITDEYKVPSKKFKVLGNTDRHSIKKNLIGALLFDSGETAEATRLKRTARRRYTRRKNRICYLQEIFSNEMAKVDDSFFHRLEESFLVEEDKKHERHPIFGNIVDEVAYHEKYPTIYHLRKKLVDSTDKADLRLIYLALAHMIKFRGHFLIEGDLNPDNSDVDKLFIQLVQTYNQLFEENPINASGVDAKAILSARLSKSRRLENLIAQLPGEKKNGLFGNLIALSLGLTPNFKSNFDLAEDAKLQLSKDTYDDDLDNLLAQIGDQYADLFLAAKNLSDAILLSDILRVNTEITKAPLSASMIKRYDEHHQDLTLLKALVRQQLPEKYKEIFFDQSKNGYAGYIDGGASQEEFYKFIKPILEKMDGTEELLVKLNREDLLRKQRTFDNGSIPHQIHLGELHAILRRQEDFYPFLKDNREKIEKILTFRIPYYVGPLARGNSRFAWMTRKSEETITPWNFEEVVDKGASAQSFIERMTNFDKNLPNEKVLPKHSLLYEYFTVYNELTKVKYVTEGMRKPAFLSGEQKKAIVDLLFKTNRKVTVKQLKEDYFKKIECFDSVEISGVEDRFNASLGTYHDLLKIIKDKDFLDNEENEDILEDIVLTLTLFEDREMIEERLKTYAHLFDDKVMKQLKRRRYTGWGRLSRKLINGIRDKQSGKTILDFLKSDGFANRNFMQLIHDDSLTFKEDIQKAQVSGQGDSLHEHIANLAGSPAIKKGILQTVKVVDELVKVMGRHKPENIVIEMARENQTTQKGQKNSRERMKRIEEGIKELGSQILKEHPVENTQLQNEKLYLYYLQNGRDMYVDQELDINRLSDYDVDHIVPQSFLKDDSIDNKVLTRSDKARGKSDNVPSEEVVKKMKNYWRQLLNAKLITQRKFDNLTKAERGGLSELDKAGFIKRQLVETRQITKHVAQILDSRMNTKYDENDKLIREVKVITLKSKLVSDFRKDFQFYKVREINNYHHAHDAYLNAVVGTALIKKYPKLESEFVYGDYKVYDVRKMIAKSEQEIGKATAKYFFYSNIMNFFKTEITLANGEIRKRPLIETNGETGEIVWDKGRDFATVRKVLSMPQVNIVKKTEVQTGGFSKESILPKRNSDKLIARKKDWDPKKYGGFDSPTVAYSVLVVAKVEKGKSKKLKSVKELLGITIMERSSFEKNPIDFLEAKGYKEVKKDLIIKLPKYSLFELENGRKRMLASAGELQKGNELALPSKYVNFLYLASHYEKLKGSPEDNEQKQLFVEQHKHYLDEIIEQISEFSKRVILADANLDKVLSAYNKHRDKPIREQAENIIHLFTLTNLGAPAAFKYFDTTIDRKRYTSTKEVLDATLIHQSITGLYETRIDLSQLGGDGGEAAAKGGSPAPGGTLNIEDEHRLHETSKEPDVSLGSTWLSDFPQAWAETGGMGLAVRQAPLIIPLKATSTPVSIKQYPMSQEARLGIKPHIQRLLDQGILVPCQSPWNTPLLPVKKPGTNDYRPVQDLREVNKRVEDIHPTVPNPYNLLSGLPPSHQWYTVLDLKDAFFCLRLHPTSQPLFAFEWRDPEMGISGQLTWTRLPQGFKNSPTLFNEALHRDLADFRIQHPDLILLQYVDDLLLAATSELDCQQGTRALLQTLGNLGYRASAKKAQICQKQVKYLGYLLKEGQRWLTEARKETVMGQPTPKTPRQLREFLGTAGFCRLWIPGFAEMAAPLYPLTKPGTLFNWGPDQQKAYQEIKQALLTAPALGLPDLTKPFELFVDEKQGYAKGVLTQKLGPWRRPVAYLSKKLDPVAAGWPPCLRMVAAIAVLTKDAGKLTMGQPLVILAPHAVEALVKQPPDRWLSNARMTHYQALLLDTDRVQFGPVVALNPATLLPLPEEGLQHNCLDILAEAHGTRPDLTDQPLPDADHTWYTDGSSLLQEGQRKAGAAVTTETEVIWAKALPAGTSAQRAELIALTQALKMAEGKKLNVYTDSRYAFATAHIHGEIYRRRGWLTSEGKEIKNKDEILALLKALFLPKRLSIIHCPGHQKGHSAEARGNRMADQAARKAAITETPDTSTLLAGKRTADGSEFEKRTADGSEFESPKKKAKVE

SEQ ID NO: 2756 - protein, 2096 aa, synthetic construct
MPAAKRVKLDGGDKKYSIGLDIGTNSVGWAVITDEYKVPSKKFKVLGNTDRHSIKKNLIGALLFDSGETAEATRLKRTARRRYTRRKNRICYLQEIFSNEMAKVDDSFFHRLEESFLVEEDKKHERHPIFGNIVDEVAYHEKYPTIYHLRKKLVDSTDKADLRLIYLALAHMIKFRGHFLIEGDLNPDNSDVDKLFIQLVQTYNQLFEENPINASGVDAKAILSARLSKSRRLENLIAQLPGEKKNGLFGNLIALSLGLTPNFKSNFDLAEDAKLQLSKDTYDDDLDNLLAQIGDQYADLFLAAKNLSDAILLSDILRVNTEITKAPLSASMIKRYDEHHQDLTLLKALVRQQLPEKYKEIFFDQSKNGYAGYIDGGASQEEFYKFIKPILEKMDGTEELLVKLNREDLLRKQRTFDNGSIPHQIHLGELHAILRRQEDFYPFLKDNREKIEKILTFRIPYYVGPLARGNSRFAWMTRKSEETITPWNFEEVVDKGASAQSFIERMTNFDKNLPNEKVLPKHSLLYEYFTVYNELTKVKYVTEGMRKPAFLSGEQKKAIVDLLFKTNRKVTVKQLKEDYFKKIECFDSVEISGVEDRFNASLGTYHDLLKIIKDKDFLDNEENEDILEDIVLTLTLFEDREMIEERLKTYAHLFDDKVMKQLKRRRYTGWGRLSRKLINGIRDKQSGKTILDFLKSDGFANRNFMQLIHDDSLTFKEDIQKAQVSGQGDSLHEHIANLAGSPAIKKGILQTVKVVDELVKVMGRHKPENIVIEMARENQTTQKGQKNSRERMKRIEEGIKELGSQILKEHPVENTQLQNEKLYLYYLQNGRDMYVDQELDINRLSDYDVDHIVPQSFLKDDSIDNKVLTRSDKARGKSDNVPSEEVVKKMKNYWRQLLNAKLITQRKFDNLTKAERGGLSELDKAGFIKRQLVETRQITKHVAQILDSRMNTKYDENDKLIREVKVITLKSKLVSDFRKDFQFYKVREINNYHHAHDAYLNAVVGTALIKKYPKLESEFVYGDYKVYDVRKMIAKSEQEIGKATAKYFFYSNIMNFFKTEITLANGEIRKRPLIETNGETGEIVWDKGRDFATVRKVLSMPQVNIVKKTEVQTGGFSKESILPKRNSDKLIARKKDWDPKKYGGFDSPTVAYSVLVVAKVEKGKSKKLKSVKELLGITIMERSSFEKNPIDFLEAKGYKEVKKDLIIKLPKYSLFELENGRKRMLASAGELQKGNELALPSKYVNFLYLASHYEKLKGSPEDNEQKQLFVEQHKHYLDEIIEQISEFSKRVILADANLDKVLSAYNKHRDKPIREQAENIIHLFTLTNLGAPAAFKYFDTTIDRKRYTSTKEVLDATLIHQSITGLYETRIDLSQLGGDGGPAPEAAAKGGSGGTLNIEDEHRLHETSKEPDVSLGSTWLSDFPQAWAETGGMGLAVRQAPLIIPLKATSTPVSIKQYPMSQEARLGIKPHIQRLLDQGILVPCQSPWNTPLLPVKKPGTNDYRPVQDLREVNKRVEDIHPTVPNPYNLLSGLPPSHQWYTVLDLKDAFFCLRLHPTSQPLFAFEWRDPEMGISGQLTWTRLPQGFKNSPTLFNEALHRDLADFRIQHPDLILLQYVDDLLLAATSELDCQQGTRALLQTLGNLGYRASAKKAQICQKQVKYLGYLLKEGQRWLTEARKETVMGQPTPKTPRQLREFLGTAGFCRLWIPGFAEMAAPLYPLTKPGTLFNWGPDQQKAYQEIKQALLTAPALGLPDLTKPFELFVDEKQGYAKGVLTQKLGPWRRPVAYLSKKLDPVAAGWPPCLRMVAAIAVLTKDAGKLTMGQPLVILAPHAVEALVKQPPDRWLSNARMTHYQALLLDTDRVQFGPVVALNPATLLPLPEEGLQHNCLDILAEAHGTRPDLTDQPLPDADHTWYTDGSSLLQEGQRKAGAAVTTETEVIWAKALPAGTSAQRAELIALTQALKMAEGKKLNVYTDSRYAFATAHIHGEIYRRRGWLTSEGKEIKNKDEILALLKALFLPKRLSIIHCPGHQKGHSAEARGNRMADQAARKAAITETPDTSTLLAGKRTADGSEFEKRTADGSEFESPKKKAKVE

SEQ ID NO: 2757 - protein, 2094 aa, synthetic construct
MPAAKRVKLDGGDKKYSIGLDIGTNSVGWAVITDEYKVPSKKFKVLGNTDRHSIKKNLIGALLFDSGETAEATRLKRTARRRYTRRKNRICYLQEIFSNEMAKVDDSFFHRLEESFLVEEDKKHERHPIFGNIVDEVAYHEKYPTIYHLRKKLVDSTDKADLRLIYLALAHMIKFRGHFLIEGDLNPDNSDVDKLFIQLVQTYNQLFEENPINASGVDAKAILSARLSKSRRLENLIAQLPGEKKNGLFGNLIALSLGLTPNFKSNFDLAEDAKLQLSKDTYDDDLDNLLAQIGDQYADLFLAAKNLSDAILLSDILRVNTEITKAPLSASMIKRYDEHHQDLTLLKALVRQQLPEKYKEIFFDQSKNGYAGYIDGGASQEEFYKFIKPILEKMDGTEELLVKLNREDLLRKQRTFDNGSIPHQIHLGELHAILRRQEDFYPFLKDNREKIEKILTFRIPYYVGPLARGNSRFAWMTRKSEETITPWNFEEVVDKGASAQSFIERMTNFDKNLPNEKVLPKHSLLYEYFTVYNELTKVKYVTEGMRKPAFLSGEQKKAIVDLLFKTNRKVTVKQLKEDYFKKIECFDSVEISGVEDRFNASLGTYHDLLKIIKDKDFLDNEENEDILEDIVLTLTLFEDREMIEERLKTYAHLFDDKVMKQLKRRRYTGWGRLSRKLINGIRDKQSGKTILDFLKSDGFANRNFMQLIHDDSLTFKEDIQKAQVSGQGDSLHEHIANLAGSPAIKKGILQTVKVVDELVKVMGRHKPENIVIEMARENQTTQKGQKNSRERMKRIEEGIKELGSQILKEHPVENTQLQNEKLYLYYLQNGRDMYVDQELDINRLSDYDVDHIVPQSFLKDDSIDNKVLTRSDKARGKSDNVPSEEVVKKMKNYWRQLLNAKLITQRKFDNLTKAERGGLSELDKAGFIKRQLVETRQITKHVAQILDSRMNTKYDENDKLIREVKVITLKSKLVSDFRKDFQFYKVREINNYHHAHDAYLNAVVGTALIKKYPKLESEFVYGDYKVYDVRKMIAKSEQEIGKATAKYFFYSNIMNFFKTEITLANGEIRKRPLIETNGETGEIVWDKGRDFATVRKVLSMPQVNIVKKTEVQTGGFSKESILPKRNSDKLIARKKDWDPKKYGGFDSPTVAYSVLVVAKVEKGKSKKLKSVKELLGITIMERSSFEKNPIDFLEAKGYKEVKKDLIIKLPKYSLFELENGRKRMLASAGELQKGNELALPSKYVNFLYLASHYEKLKGSPEDNEQKQLFVEQHKHYLDEIIEQISEFSKRVILADANLDKVLSAYNKHRDKPIREQAENIIHLFTLTNLGAPAAFKYFDTTIDRKRYTSTKEVLDATLIHQSITGLYETRIDLSQLGGDGGPAPGSSGGSGGTLNIEDEHRLHETSKEPDVSLGSTWLSDFPQAWAETGGMGLAVRQAPLIIPLKATSTPVSIKQYPMSQEARLGIKPHIQRLLDQGILVPCQSPWNTPLLPVKKPGTNDYRPVQDLREVNKRVEDIHPTVPNPYNLLSGLPPSHQWYTVLDLKDAFFCLRLHPTSQPLFAFEWRDPEMGISGQLTWTRLPQGFKNSPTLFNEALHRDLADFRIQHPDLILLQYVDDLLLAATSELDCQQGTRALLQTLGNLGYRASAKKAQICQKQVKYLGYLLKEGQRWLTEARKETVMGQPTPKTPRQLREFLGTAGFCRLWIPGFAEMAAPLYPLTKPGTLFNWGPDQQKAYQEIKQALLTAPALGLPDLTKPFELFVDEKQGYAKGVLTQKLGPWRRPVAYLSKKLDPVAAGWPPCLRMVAAIAVLTKDAGKLTMGQPLVILAPHAVEALVKQPPDRWLSNARMTHYQALLLDTDRVQFGPVVALNPATLLPLPEEGLQHNCLDILAEAHGTRPDLTDQPLPDADHTWYTDGSSLLQEGQRKAGAAVTTETEVIWAKALPAGTSAQRAELIALTQALKMAEGKKLNVYTDSRYAFATAHIHGEIYRRRGWLTSEGKEIKNKDEILALLKALFLPKRLSIIHCPGHQKGHSAEARGNRMADQAARKAAITETPDTSTLLAGKRTADGSEFEKRTADGSEFESPKKKAKVE

SEQ ID NO: 2758 - protein, 2096 aa, synthetic construct
MPAAKRVKLDGGDKKYSIGLDIGTNSVGWAVITDEYKVPSKKFKVLGNTDRHSIKKNLIGALLFDSGETAEATRLKRTARRRYTRRKNRICYLQEIFSNEMAKVDDSFFHRLEESFLVEEDKKHERHPIFGNIVDEVAYHEKYPTIYHLRKKLVDSTDKADLRLIYLALAHMIKFRGHFLIEGDLNPDNSDVDKLFIQLVQTYNQLFEENPINASGVDAKAILSARLSKSRRLENLIAQLPGEKKNGLFGNLIALSLGLTPNFKSNFDLAEDAKLQLSKDTYDDDLDNLLAQIGDQYADLFLAAKNLSDAILLSDILRVNTEITKAPLSASMIKRYDEHHQDLTLLKALVRQQLPEKYKEIFFDQSKNGYAGYIDGGASQEEFYKFIKPILEKMDGTEELLVKLNREDLLRKQRTFDNGSIPHQIHLGELHAILRRQEDFYPFLKDNREKIEKILTFRIPYYVGPLARGNSRFAWMTRKSEETITPWNFEEVVDKGASAQSFIERMTNFDKNLPNEKVLPKHSLLYEYFTVYNELTKVKYVTEGMRKPAFLSGEQKKAIVDLLFKTNRKVTVKQLKEDYFKKIECFDSVEISGVEDRFNASLGTYHDLLKIIKDKDFLDNEENEDILEDIVLTLTLFEDREMIEERLKTYAHLFDDKVMKQLKRRRYTGWGRLSRKLINGIRDKQSGKTILDFLKSDGFANRNFMQLIHDDSLTFKEDIQKAQVSGQGDSLHEHIANLAGSPAIKKGILQTVKVVDELVKVMGRHKPENIVIEMARENQTTQKGQKNSRERMKRIEEGIKELGSQILKEHPVENTQLQNEKLYLYYLQNGRDMYVDQELDINRLSDYDVDHIVPQSFLKDDSIDNKVLTRSDKARGKSDNVPSEEVVKKMKNYWRQLLNAKLITQRKFDNLTKAERGGLSELDKAGFIKRQLVETRQITKHVAQILDSRMNTKYDENDKLIREVKVITLKSKLVSDFRKDFQFYKVREINNYHHAHDAYLNAVVGTALIKKYPKLESEFVYGDYKVYDVRKMIAKSEQEIGKATAKYFFYSNIMNFFKTEITLANGEIRKRPLIETNGETGEIVWDKGRDFATVRKVLSMPQVNIVKKTEVQTGGFSKESILPKRNSDKLIARKKDWDPKKYGGFDSPTVAYSVLVVAKVEKGKSKKLKSVKELLGITIMERSSFEKNPIDFLEAKGYKEVKKDLIIKLPKYSLFELENGRKRMLASAGELQKGNELALPSKYVNFLYLASHYEKLKGSPEDNEQKQLFVEQHKHYLDEIIEQISEFSKRVILADANLDKVLSAYNKHRDKPIREQAENIIHLFTLTNLGAPAAFKYFDTTIDRKRYTSTKEVLDATLIHQSITGLYETRIDLSQLGGDGGGSSPAPEAAAKGGTLNIEDEHRLHETSKEPDVSLGSTWLSDFPQAWAETGGMGLAVRQAPLIIPLKATSTPVSIKQYPMSQEARLGIKPHIQRLLDQGILVPCQSPWNTPLLPVKKPGTNDYRPVQDLREVNKRVEDIHPTVPNPYNLLSGLPPSHQWYTVLDLKDAFFCLRLHPTSQPLFAFEWRDPEMGISGQLTWTRLPQGFKNSPTLFNEALHRDLADFRIQHPDLILLQYVDDLLLAATSELDCQQGTRALLQTLGNLGYRASAKKAQICQKQVKYLGYLLKEGQRWLTEARKETVMGQPTPKTPRQLREFLGTAGFCRLWIPGFAEMAAPLYPLTKPGTLFNWGPDQQKAYQEIKQALLTAPALGLPDLTKPFELFVDEKQGYAKGVLTQKLGPWRRPVAYLSKKLDPVAAGWPPCLRMVAAIAVLTKDAGKLTMGQPLVILAPHAVEALVKQPPDRWLSNARMTHYQALLLDTDRVQFGPVVALNPATLLPLPEEGLQHNCLDILAEAHGTRPDLTDQPLPDADHTWYTDGSSLLQEGQRKAGAAVTTETEVIWAKALPAGTSAQRAELIALTQALKMAEGKKLNVYTDSRYAFATAHIHGEIYRRRGWLTSEGKEIKNKDEILALLKALFLPKRLSIIHCPGHQKGHSAEARGNRMADQAARKAAITETPDTSTLLAGKRTADGSEFEKRTADGSEFESPKKKAKVE

SEQ ID NO: 2759 - protein, 2096 aa, synthetic construct
MPAAKRVKLDGGDKKYSIGLDIGTNSVGWAVITDEYKVPSKKFKVLGNTDRHSIKKNLIGALLFDSGETAEATRLKRTARRRYTRRKNRICYLQEIFSNEMAKVDDSFFHRLEESFLVEEDKKHERHPIFGNIVDEVAYHEKYPTIYHLRKKLVDSTDKADLRLIYLALAHMIKFRGHFLIEGDLNPDNSDVDKLFIQLVQTYNQLFEENPINASGVDAKAILSARLSKSRRLENLIAQLPGEKKNGLFGNLIALSLGLTPNFKSNFDLAEDAKLQLSKDTYDDDLDNLLAQIGDQYADLFLAAKNLSDAILLSDILRVNTEITKAPLSASMIKRYDEHHQDLTLLKALVRQQLPEKYKEIFFDQSKNGYAGYIDGGASQEEFYKFIKPILEKMDGTEELLVKLNREDLLRKQRTFDNGSIPHQIHLGELHAILRRQEDFYPFLKDNREKIEKILTFRIPYYVGPLARGNSRFAWMTRKSEETITPWNFEEVVDKGASAQSFIERMTNFDKNLPNEKVLPKHSLLYEYFTVYNELTKVKYVTEGMRKPAFLSGEQKKAIVDLLFKTNRKVTVKQLKEDYFKKIECFDSVEISGVEDRFNASLGTYHDLLKIIKDKDFLDNEENEDILEDIVLTLTLFEDREMIEERLKTYAHLFDDKVMKQLKRRRYTGWGRLSRKLINGIRDKQSGKTILDFLKSDGFANRNFMQLIHDDSLTFKEDIQKAQVSGQGDSLHEHIANLAGSPAIKKGILQTVKVVDELVKVMGRHKPENIVIEMARENQTTQKGQKNSRERMKRIEEGIKELGSQILKEHPVENTQLQNEKLYLYYLQNGRDMYVDQELDINRLSDYDVDHIVPQSFLKDDSIDNKVLTRSDKARGKSDNVPSEEVVKKMKNYWRQLLNAKLITQRKFDNLTKAERGGLSELDKAGFIKRQLVETRQITKHVAQILDSRMNTKYDENDKLIREVKVITLKSKLVSDFRKDFQFYKVREINNYHHAHDAYLNAVVGTALIKKYPKLESEFVYGDYKVYDVRKMIAKSEQEIGKATAKYFFYSNIMNFFKTEITLANGEIRKRPLIETNGETGEIVWDKGRDFATVRKVLSMPQVNIVKKTEVQTGGFSKESILPKRNSDKLIARKKDWDPKKYGGFDSPTVAYSVLVVAKVEKGKSKKLKSVKELLGITIMERSSFEKNPIDFLEAKGYKEVKKDLIIKLPKYSLFELENGRKRMLASAGELQKGNELALPSKYVNFLYLASHYEKLKGSPEDNEQKQLFVEQHKHYLDEIIEQISEFSKRVILADANLDKVLSAYNKHRDKPIREQAENIIHLFTLTNLGAPAAFKYFDTTIDRKRYTSTKEVLDATLIHQSITGLYETRIDLSQLGGDGGPAPEAAAKGSSGGTLNIEDEHRLHETSKEPDVSLGSTWLSDFPQAWAETGGMGLAVRQAPLIIPLKATSTPVSIKQYPMSQEARLGIKPHIQRLLDQGILVPCQSPWNTPLLPVKKPGTNDYRPVQDLREVNKRVEDIHPTVPNPYNLLSGLPPSHQWYTVLDLKDAFFCLRLHPTSQPLFAFEWRDPEMGISGQLTWTRLPQGFKNSPTLFNEALHRDLADFRIQHPDLILLQYVDDLLLAATSELDCQQGTRALLQTLGNLGYRASAKKAQICQKQVKYLGYLLKEGQRWLTEARKETVMGQPTPKTPRQLREFLGTAGFCRLWIPGFAEMAAPLYPLTKPGTLFNWGPDQQKAYQEIKQALLTAPALGLPDLTKPFELFVDEKQGYAKGVLTQKLGPWRRPVAYLSKKLDPVAAGWPPCLRMVAAIAVLTKDAGKLTMGQPLVILAPHAVEALVKQPPDRWLSNARMTHYQALLLDTDRVQFGPVVALNPATLLPLPEEGLQHNCLDILAEAHGTRPDLTDQPLPDADHTWYTDGSSLLQEGQRKAGAAVTTETEVIWAKALPAGTSAQRAELIALTQALKMAEGKKLNVYTDSRYAFATAHIHGEIYRRRGWLTSEGKEIKNKDEILALLKALFLPKRLSIIHCPGHQKGHSAEARGNRMADQAARKAAITETPDTSTLLAGKRTADGSEFEKRTADGSEFESPKKKAKVE

SEQ ID NO: 2760 - protein, 2096 aa, synthetic construct
MPAAKRVKLDGGDKKYSIGLDIGTNSVGWAVITDEYKVPSKKFKVLGNTDRHSIKKNLIGALLFDSGETAEATRLKRTARRRYTRRKNRICYLQEIFSNEMAKVDDSFFHRLEESFLVEEDKKHERHPIFGNIVDEVAYHEKYPTIYHLRKKLVDSTDKADLRLIYLALAHMIKFRGHFLIEGDLNPDNSDVDKLFIQLVQTYNQLFEENPINASGVDAKAILSARLSKSRRLENLIAQLPGEKKNGLFGNLIALSLGLTPNFKSNFDLAEDAKLQLSKDTYDDDLDNLLAQIGDQYADLFLAAKNLSDAILLSDILRVNTEITKAPLSASMIKRYDEHHQDLTLLKALVRQQLPEKYKEIFFDQSKNGYAGYIDGGASQEEFYKFIKPILEKMDGTEELLVKLNREDLLRKQRTFDNGSIPHQIHLGELHAILRRQEDFYPFLKDNREKIEKILTFRIPYYVGPLARGNSRFAWMTRKSEETITPWNFEEVVDKGASAQSFIERMTNFDKNLPNEKVLPKHSLLYEYFTVYNELTKVKYVTEGMRKPAFLSGEQKKAIVDLLFKTNRKVTVKQLKEDYFKKIECFDSVEISGVEDRFNASLGTYHDLLKIIKDKDFLDNEENEDILEDIVLTLTLFEDREMIEERLKTYAHLFDDKVMKQLKRRRYTGWGRLSRKLINGIRDKQSGKTILDFLKSDGFANRNFMQLIHDDSLTFKEDIQKAQVSGQGDSLHEHIANLAGSPAIKKGILQTVKVVDELVKVMGRHKPENIVIEMARENQTTQKGQKNSRERMKRIEEGIKELGSQILKEHPVENTQLQNEKLYLYYLQNGRDMYVDQELDINRLSDYDVDHIVPQSFLKDDSIDNKVLTRSDKARGKSDNVPSEEVVKKMKNYWRQLLNAKLITQRKFDNLTKAERGGLSELDKAGFIKRQLVETRQITKHVAQILDSRMNTKYDENDKLIREVKVITLKSKLVSDFRKDFQFYKVREINNYHHAHDAYLNAVVGTALIKKYPKLESEFVYGDYKVYDVRKMIAKSEQEIGKATAKYFFYSNIMNFFKTEITLANGEIRKRPLIETNGETGEIVWDKGRDFATVRKVLSMPQVNIVKKTEVQTGGFSKESILPKRNSDKLIARKKDWDPKKYGGFDSPTVAYSVLVVAKVEKGKSKKLKSVKELLGITIMERSSFEKNPIDFLEAKGYKEVKKDLIIKLPKYSLFELENGRKRMLASAGELQKGNELALPSKYVNFLYLASHYEKLKGSPEDNEQKQLFVEQHKHYLDEIIEQISEFSKRVILADANLDKVLSAYNKHRDKPIREQAENIIHLFTLTNLGAPAAFKYFDTTIDRKRYTSTKEVLDATLIHQSITGLYETRIDLSQLGGDGGGSSGGSEAAAKGGTLNIEDEHRLHETSKEPDVSLGSTWLSDFPQAWAETGGMGLAVRQAPLIIPLKATSTPVSIKQYPMSQEARLGIKPHIQRLLDQGILVPCQSPWNTPLLPVKKPGTNDYRPVQDLREVNKRVEDIHPTVPNPYNLLSGLPPSHQWYTVLDLKDAFFCLRLHPTSQPLFAFEWRDPEMGISGQLTWTRLPQGFKNSPTLFNEALHRDLADFRIQHPDLILLQYVDDLLLAATSELDCQQGTRALLQTLGNLGYRASAKKAQICQKQVKYLGYLLKEGQRWLTEARKETVMGQPTPKTPRQLREFLGTAGFCRLWIPGFAEMAAPLYPLTKPGTLFNWGPDQQKAYQEIKQALLTAPALGLPDLTKPFELFVDEKQGYAKGVLTQKLGPWRRPVAYLSKKLDPVAAGWPPCLRMVAAIAVLTKDAGKLTMGQPLVILAPHAVEALVKQPPDRWLSNARMTHYQALLLDTDRVQFGPVVALNPATLLPLPEEGLQHNCLDILAEAHGTRPDLTDQPLPDADHTWYTDGSSLLQEGQRKAGAAVTTETEVIWAKALPAGTSAQRAELIALTQALKMAEGKKLNVYTDSRYAFATAHIHGEIYRRRGWLTSEGKEIKNKDEILALLKALFLPKRLSIIHCPGHQKGHSAEARGNRMADQAARKAAITETPDTSTLLAGKRTADGSEFEKRTADGSEFESPKKKAKVE

SEQ ID NO: 2761 - protein, 2096 aa, synthetic construct
MPAAKRVKLDGGDKKYSIGLDIGTNSVGWAVITDEYKVPSKKFKVLGNTDRHSIKKNLIGALLFDSGETAEATRLKRTARRRYTRRKNRICYLQEIFSNEMAKVDDSFFHRLEESFLVEEDKKHERHPIFGNIVDEVAYHEKYPTIYHLRKKLVDSTDKADLRLIYLALAHMIKFRGHFLIEGDLNPDNSDVDKLFIQLVQTYNQLFEENPINASGVDAKAILSARLSKSRRLENLIAQLPGEKKNGLFGNLIALSLGLTPNFKSNFDLAEDAKLQLSKDTYDDDLDNLLAQIGDQYADLFLAAKNLSDAILLSDILRVNTEITKAPLSASMIKRYDEHHQDLTLLKALVRQQLPEKYKEIFFDQSKNGYAGYIDGGASQEEFYKFIKPILEKMDGTEELLVKLNREDLLRKQRTFDNGSIPHQIHLGELHAILRRQEDFYPFLKDNREKIEKILTFRIPYYVGPLARGNSRFAWMTRKSEETITPWNFEEVVDKGASAQSFIERMTNFDKNLPNEKVLPKHSLLYEYFTVYNELTKVKYVTEGMRKPAFLSGEQKKAIVDLLFKTNRKVTVKQLKEDYFKKIECFDSVEISGVEDRFNASLGTYHDLLKIIKDKDFLDNEENEDILEDIVLTLTLFEDREMIEERLKTYAHLFDDKVMKQLKRRRYTGWGRLSRKLINGIRDKQSGKTILDFLKSDGFANRNFMQLIHDDSLTFKEDIQKAQVSGQGDSLHEHIANLAGSPAIKKGILQTVKVVDELVKVMGRHKPENIVIEMARENQTTQKGQKNSRERMKRIEEGIKELGSQILKEHPVENTQLQNEKLYLYYLQNGRDMYVDQELDINRLSDYDVDHIVPQSFLKDDSIDNKVLTRSDKARGKSDNVPSEEVVKKMKNYWRQLLNAKLITQRKFDNLTKAERGGLSELDKAGFIKRQLVETRQITKHVAQILDSRMNTKYDENDKLIREVKVITLKSKLVSDFRKDFQFYKVREINNYHHAHDAYLNAVVGTALIKKYPKLESEFVYGDYKVYDVRKMIAKSEQEIGKATAKYFFYSNIMNFFKTEITLANGEIRKRPLIETNGETGEIVWDKGRDFATVRKVLSMPQVNIVKKTEVQTGGFSKESILPKRNSDKLIARKKDWDPKKYGGFDSPTVAYSVLVVAKVEKGKSKKLKSVKELLGITIMERSSFEKNPIDFLEAKGYKEVKKDLIIKLPKYSLFELENGRKRMLASAGELQKGNELALPSKYVNFLYLASHYEKLKGSPEDNEQKQLFVEQHKHYLDEIIEQISEFSKRVILADANLDKVLSAYNKHRDKPIREQAENIIHLFTLTNLGAPAAFKYFDTTIDRKRYTSTKEVLDATLIHQSITGLYETRIDLSQLGGDGGGGSEAAAKGSSGGTLNIEDEHRLHETSKEPDVSLGSTWLSDFPQAWAETGGMGLAVRQAPLIIPLKATSTPVSIKQYPMSQEARLGIKPHIQRLLDQGILVPCQSPWNTPLLPVKKPGTNDYRPVQDLREVNKRVEDIHPTVPNPYNLLSGLPPSHQWYTVLDLKDAFFCLRLHPTSQPLFAFEWRDPEMGISGQLTWTRLPQGFKNSPTLFNEALHRDLADFRIQHPDLILLQYVDDLLLAATSELDCQQGTRALLQTLGNLGYRASAKKAQICQKQVKYLGYLLKEGQRWLTEARKETVMGQPTPKTPRQLREFLGTAGFCRLWIPGFAEMAAPLYPLTKPGTLFNWGPDQQKAYQEIKQALLTAPALGLPDLTKPFELFVDEKQGYAKGVLTQKLGPWRRPVAYLSKKLDPVAAGWPPCLRMVAAIAVLTKDAGKLTMGQPLVILAPHAVEALVKQPPDRWLSNARMTHYQALLLDTDRVQFGPVVALNPATLLPLPEEGLQHNCLDILAEAHGTRPDLTDQPLPDADHTWYTDGSSLLQEGQRKAGAAVTTETEVIWAKALPAGTSAQRAELIALTQALKMAEGKKLNVYTDSRYAFATAHIHGEIYRRRGWLTSEGKEIKNKDEILALLKALFLPKRLSIIHCPGHQKGHSAEARGNRMADQAARKAAITETPDTSTLLAGKRTADGSEFEKRTADGSEFESPKKKAKVE

SEQ ID NO: 2762 - protein, 2094 aa, synthetic construct
MPAAKRVKLDGGDKKYSIGLDIGTNSVGWAVITDEYKVPSKKFKVLGNTDRHSIKKNLIGALLFDSGETAEATRLKRTARRRYTRRKNRICYLQEIFSNEMAKVDDSFFHRLEESFLVEEDKKHERHPIFGNIVDEVAYHEKYPTIYHLRKKLVDSTDKADLRLIYLALAHMIKFRGHFLIEGDLNPDNSDVDKLFIQLVQTYNQLFEENPINASGVDAKAILSARLSKSRRLENLIAQLPGEKKNGLFGNLIALSLGLTPNFKSNFDLAEDAKLQLSKDTYDDDLDNLLAQIGDQYADLFLAAKNLSDAILLSDILRVNTEITKAPLSASMIKRYDEHHQDLTLLKALVRQQLPEKYKEIFFDQSKNGYAGYIDGGASQEEFYKFIKPILEKMDGTEELLVKLNREDLLRKQRTFDNGSIPHQIHLGELHAILRRQEDFYPFLKDNREKIEKILTFRIPYYVGPLARGNSRFAWMTRKSEETITPWNFEEVVDKGASAQSFIERMTNFDKNLPNEKVLPKHSLLYEYFTVYNELTKVKYVTEGMRKPAFLSGEQKKAIVDLLFKTNRKVTVKQLKEDYFKKIECFDSVEISGVEDRFNASLGTYHDLLKIIKDKDFLDNEENEDILEDIVLTLTLFEDREMIEERLKTYAHLFDDKVMKQLKRRRYTGWGRLSRKLINGIRDKQSGKTILDFLKSDGFANRNFMQLIHDDSLTFKEDIQKAQVSGQGDSLHEHIANLAGSPAIKKGILQTVKVVDELVKVMGRHKPENIVIEMARENQTTQKGQKNSRERMKRIEEGIKELGSQILKEHPVENTQLQNEKLYLYYLQNGRDMYVDQELDINRLSDYDVDHIVPQSFLKDDSIDNKVLTRSDKARGKSDNVPSEEVVKKMKNYWRQLLNAKLITQRKFDNLTKAERGGLSELDKAGFIKRQLVETRQITKHVAQILDSRMNTKYDENDKLIREVKVITLKSKLVSDFRKDFQFYKVREINNYHHAHDAYLNAVVGTALIKKYPKLESEFVYGDYKVYDVRKMIAKSEQEIGKATAKYFFYSNIMNFFKTEITLANGEIRKRPLIETNGETGEIVWDKGRDFATVRKVLSMPQVNIVKKTEVQTGGFSKESILPKRNSDKLIARKKDWDPKKYGGFDSPTVAYSVLVVAKVEKGKSKKLKSVKELLGITIMERSSFEKNPIDFLEAKGYKEVKKDLIIKLPKYSLFELENGRKRMLASAGELQKGNELALPSKYVNFLYLASHYEKLKGSPEDNEQKQLFVEQHKHYLDEIIEQISEFSKRVILADANLDKVLSAYNKHRDKPIREQAENIIHLFTLTNLGAPAAFKYFDTTIDRKRYTSTKEVLDATLIHQSITGLYETRIDLSQLGGDGGGGSPAPGGGGGTLNIEDEHRLHETSKEPDVSLGSTWLSDFPQAWAETGGMGLAVRQAPLIIPLKATSTPVSIKQYPMSQEARLGIKPHIQRLLDQGILVPCQSPWNTPLLPVKKPGTNDYRPVQDLREVNKRVEDIHPTVPNPYNLLSGLPPSHQWYTVLDLKDAFFCLRLHPTSQPLFAFEWRDPEMGISGQLTWTRLPQGFKNSPTLFNEALHRDLADFRIQHPDLILLQYVDDLLLAATSELDCQQGTRALLQTLGNLGYRASAKKAQICQKQVKYLGYLLKEGQRWLTEARKETVMGQPTPKTPRQLREFLGTAGFCRLWIPGFAEMAAPLYPLTKPGTLFNWGPDQQKAYQEIKQALLTAPALGLPDLTKPFELFVDEKQGYAKGVLTQKLGPWRRPVAYLSKKLDPVAAGWPPCLRMVAAIAVLTKDAGKLTMGQPLVILAPHAVEALVKQPPDRWLSNARMTHYQALLLDTDRVQFGPVVALNPATLLPLPEEGLQHNCLDILAEAHGTRPDLTDQPLPDADHTWYTDGSSLLQEGQRKAGAAVTTETEVIWAKALPAGTSAQRAELIALTQALKMAEGKKLNVYTDSRYAFATAHIHGEIYRRRGWLTSEGKEIKNKDEILALLKALFLPKRLSIIHCPGHQKGHSAEARGNRMADQAARKAAITETPDTSTLLAGKRTADGSEFEKRTADGSEFESPKKKAKVE

SEQ ID NO: 2763 - protein, 2097 aa, synthetic construct
MPAAKRVKLDGGDKKYSIGLDIGTNSVGWAVITDEYKVPSKKFKVLGNTDRHSIKKNLIGALLFDSGETAEATRLKRTARRRYTRRKNRICYLQEIFSNEMAKVDDSFFHRLEESFLVEEDKKHERHPIFGNIVDEVAYHEKYPTIYHLRKKLVDSTDKADLRLIYLALAHMIKFRGHFLIEGDLNPDNSDVDKLFIQLVQTYNQLFEENPINASGVDAKAILSARLSKSRRLENLIAQLPGEKKNGLFGNLIALSLGLTPNFKSNFDLAEDAKLQLSKDTYDDDLDNLLAQIGDQYADLFLAAKNLSDAILLSDILRVNTEITKAPLSASMIKRYDEHHQDLTLLKALVRQQLPEKYKEIFFDQSKNGYAGYIDGGASQEEFYKFIKPILEKMDGTEELLVKLNREDLLRKQRTFDNGSIPHQIHLGELHAILRRQEDFYPFLKDNREKIEKILTFRIPYYVGPLARGNSRFAWMTRKSEETITPWNFEEVVDKGASAQSFIERMTNFDKNLPNEKVLPKHSLLYEYFTVYNELTKVKYVTEGMRKPAFLSGEQKKAIVDLLFKTNRKVTVKQLKEDYFKKIECFDSVEISGVEDRFNASLGTYHDLLKIIKDKDFLDNEENEDILEDIVLTLTLFEDREMIEERLKTYAHLFDDKVMKQLKRRRYTGWGRLSRKLINGIRDKQSGKTILDFLKSDGFANRNFMQLIHDDSLTFKEDIQKAQVSGQGDSLHEHIANLAGSPAIKKGILQTVKVVDELVKVMGRHKPENIVIEMARENQTTQKGQKNSRERMKRIEEGIKELGSQILKEHPVENTQLQNEKLYLYYLQNGRDMYVDQELDINRLSDYDVDHIVPQSFLKDDSIDNKVLTRSDKARGKSDNVPSEEVVKKMKNYWRQLLNAKLITQRKFDNLTKAERGGLSELDKAGFIKRQLVETRQITKHVAQILDSRMNTKYDENDKLIREVKVITLKSKLVSDFRKDFQFYKVREINNYHHAHDAYLNAVVGTALIKKYPKLESEFVYGDYKVYDVRKMIAKSEQEIGKATAKYFFYSNIMNFFKTEITLANGEIRKRPLIETNGETGEIVWDKGRDFATVRKVLSMPQVNIVKKTEVQTGGFSKESILPKRNSDKLIARKKDWDPKKYGGFDSPTVAYSVLVVAKVEKGKSKKLKSVKELLGITIMERSSFEKNPIDFLEAKGYKEVKKDLIIKLPKYSLFELENGRKRMLASAGELQKGNELALPSKYVNFLYLASHYEKLKGSPEDNEQKQLFVEQHKHYLDEIIEQISEFSKRVILADANLDKVLSAYNKHRDKPIREQAENIIHLFTLTNLGAPAAFKYFDTTIDRKRYTSTKEVLDATLIHQSITGLYETRIDLSQLGGDGGGGSGGSGGSGGSGGTLNIEDEHRLHETSKEPDVSLGSTWLSDFPQAWAETGGMGLAVRQAPLIIPLKATSTPVSIKQYPMSQEARLGIKPHIQRLLDQGILVPCQSPWNTPLLPVKKPGTNDYRPVQDLREVNKRVEDIHPTVPNPYNLLSGLPPSHQWYTVLDLKDAFFCLRLHPTSQPLFAFEWRDPEMGISGQLTWTRLPQGFKNSPTLFNEALHRDLADFRIQHPDLILLQYVDDLLLAATSELDCQQGTRALLQTLGNLGYRASAKKAQICQKQVKYLGYLLKEGQRWLTEARKETVMGQPTPKTPRQLREFLGTAGFCRLWIPGFAEMAAPLYPLTKPGTLFNWGPDQQKAYQEIKQALLTAPALGLPDLTKPFELFVDEKQGYAKGVLTQKLGPWRRPVAYLSKKLDPVAAGWPPCLRMVAAIAVLTKDAGKLTMGQPLVILAPHAVEALVKQPPDRWLSNARMTHYQALLLDTDRVQFGPVVALNPATLLPLPEEGLQHNCLDILAEAHGTRPDLTDQPLPDADHTWYTDGSSLLQEGQRKAGAAVTTETEVIWAKALPAGTSAQRAELIALTQALKMAEGKKLNVYTDSRYAFATAHIHGEIYRRRGWLTSEGKEIKNKDEILALLKALFLPKRLSIIHCPGHQKGHSAEARGNRMADQAARKAAITETPDTSTLLAGKRTADGSEFEKRTADGSEFESPKKKAKVE

SEQ ID NO: 2764 - protein, 2096 aa, synthetic construct
MPAAKRVKLDGGDKKYSIGLDIGTNSVGWAVITDEYKVPSKKFKVLGNTDRHSIKKNLIGALLFDSGETAEATRLKRTARRRYTRRKNRICYLQEIFSNEMAKVDDSFFHRLEESFLVEEDKKHERHPIFGNIVDEVAYHEKYPTIYHLRKKLVDSTDKADLRLIYLALAHMIKFRGHFLIEGDLNPDNSDVDKLFIQLVQTYNQLFEENPINASGVDAKAILSARLSKSRRLENLIAQLPGEKKNGLFGNLIALSLGLTPNFKSNFDLAEDAKLQLSKDTYDDDLDNLLAQIGDQYADLFLAAKNLSDAILLSDILRVNTEITKAPLSASMIKRYDEHHQDLTLLKALVRQQLPEKYKEIFFDQSKNGYAGYIDGGASQEEFYKFIKPILEKMDGTEELLVKLNREDLLRKQRTFDNGSIPHQIHLGELHAILRRQEDFYPFLKDNREKIEKILTFRIPYYVGPLARGNSRFAWMTRKSEETITPWNFEEVVDKGASAQSFIERMTNFDKNLPNEKVLPKHSLLYEYFTVYNELTKVKYVTEGMRKPAFLSGEQKKAIVDLLFKTNRKVTVKQLKEDYFKKIECFDSVEISGVEDRFNASLGTYHDLLKIIKDKDFLDNEENEDILEDIVLTLTLFEDREMIEERLKTYAHLFDDKVMKQLKRRRYTGWGRLSRKLINGIRDKQSGKTILDFLKSDGFANRNFMQLIHDDSLTFKEDIQKAQVSGQGDSLHEHIANLAGSPAIKKGILQTVKVVDELVKVMGRHKPENIVIEMARENQTTQKGQKNSRERMKRIEEGIKELGSQILKEHPVENTQLQNEKLYLYYLQNGRDMYVDQELDINRLSDYDVDHIVPQSFLKDDSIDNKVLTRSDKARGKSDNVPSEEVVKKMKNYWRQLLNAKLITQRKFDNLTKAERGGLSELDKAGFIKRQLVETRQITKHVAQILDSRMNTKYDENDKLIREVKVITLKSKLVSDFRKDFQFYKVREINNYHHAHDAYLNAVVGTALIKKYPKLESEFVYGDYKVYDVRKMIAKSEQEIGKATAKYFFYSNIMNFFKTEITLANGEIRKRPLIETNGETGEIVWDKGRDFATVRKVLSMPQVNIVKKTEVQTGGFSKESILPKRNSDKLIARKKDWDPKKYGGFDSPTVAYSVLVVAKVEKGKSKKLKSVKELLGITIMERSSFEKNPIDFLEAKGYKEVKKDLIIKLPKYSLFELENGRKRMLASAGELQKGNELALPSKYVNFLYLASHYEKLKGSPEDNEQKQLFVEQHKHYLDEIIEQISEFSKRVILADANLDKVLSAYNKHRDKPIREQAENIIHLFTLTNLGAPAAFKYFDTTIDRKRYTSTKEVLDATLIHQSITGLYETRIDLSQLGGDGGGGGGSSEAAAKGGTLNIEDEHRLHETSKEPDVSLGSTWLSDFPQAWAETGGMGLAVRQAPLIIPLKATSTPVSIKQYPMSQEARLGIKPHIQRLLDQGILVPCQSPWNTPLLPVKKPGTNDYRPVQDLREVNKRVEDIHPTVPNPYNLLSGLPPSHQWYTVLDLKDAFFCLRLHPTSQPLFAFEWRDPEMGISGQLTWTRLPQGFKNSPTLFNEALHRDLADFRIQHPDLILLQYVDDLLLAATSELDCQQGTRALLQTLGNLGYRASAKKAQICQKQVKYLGYLLKEGQRWLTEARKETVMGQPTPKTPRQLREFLGTAGFCRLWIPGFAEMAAPLYPLTKPGTLFNWGPDQQKAYQEIKQALLTAPALGLPDLTKPFELFVDEKQGYAKGVLTQKLGPWRRPVAYLSKKLDPVAAGWPPCLRMVAAIAVLTKDAGKLTMGQPLVILAPHAVEALVKQPPDRWLSNARMTHYQALLLDTDRVQFGPVVALNPATLLPLPEEGLQHNCLDILAEAHGTRPDLTDQPLPDADHTWYTDGSSLLQEGQRKAGAAVTTETEVIWAKALPAGTSAQRAELIALTQALKMAEGKKLNVYTDSRYAFATAHIHGEIYRRRGWLTSEGKEIKNKDEILALLKALFLPKRLSIIHCPGHQKGHSAEARGNRMADQAARKAAITETPDTSTLLAGKRTADGSEFEKRTADGSEFESPKKKAKVE

SEQ ID NO: 2765 - protein, 2096 aa, synthetic construct
MPAAKRVKLDGGDKKYSIGLDIGTNSVGWAVITDEYKVPSKKFKVLGNTDRHSIKKNLIGALLFDSGETAEATRLKRTARRRYTRRKNRICYLQEIFSNEMAKVDDSFFHRLEESFLVEEDKKHERHPIFGNIVDEVAYHEKYPTIYHLRKKLVDSTDKADLRLIYLALAHMIKFRGHFLIEGDLNPDNSDVDKLFIQLVQTYNQLFEENPINASGVDAKAILSARLSKSRRLENLIAQLPGEKKNGLFGNLIALSLGLTPNFKSNFDLAEDAKLQLSKDTYDDDLDNLLAQIGDQYADLFLAAKNLSDAILLSDILRVNTEITKAPLSASMIKRYDEHHQDLTLLKALVRQQLPEKYKEIFFDQSKNGYAGYIDGGASQEEFYKFIKPILEKMDGTEELLVKLNREDLLRKQRTFDNGSIPHQIHLGELHAILRRQEDFYPFLKDNREKIEKILTFRIPYYVGPLARGNSRFAWMTRKSEETITPWNFEEVVDKGASAQSFIERMTNFDKNLPNEKVLPKHSLLYEYFTVYNELTKVKYVTEGMRKPAFLSGEQKKAIVDLLFKTNRKVTVKQLKEDYFKKIECFDSVEISGVEDRFNASLGTYHDLLKIIKDKDFLDNEENEDILEDIVLTLTLFEDREMIEERLKTYAHLFDDKVMKQLKRRRYTGWGRLSRKLINGIRDKQSGKTILDFLKSDGFANRNFMQLIHDDSLTFKEDIQKAQVSGQGDSLHEHIANLAGSPAIKKGILQTVKVVDELVKVMGRHKPENIVIEMARENQTTQKGQKNSRERMKRIEEGIKELGSQILKEHPVENTQLQNEKLYLYYLQNGRDMYVDQELDINRLSDYDVDHIVPQSFLKDDSIDNKVLTRSDKARGKSDNVPSEEVVKKMKNYWRQLLNAKLITQRKFDNLTKAERGGLSELDKAGFIKRQLVETRQITKHVAQILDSRMNTKYDENDKLIREVKVITLKSKLVSDFRKDFQFYKVREINNYHHAHDAYLNAVVGTALIKKYPKLESEFVYGDYKVYDVRKMIAKSEQEIGKATAKYFFYSNIMNFFKTEITLANGEIRKRPLIETNGETGEIVWDKGRDFATVRKVLSMPQVNIVKKTEVQTGGFSKESILPKRNSDKLIARKKDWDPKKYGGFDSPTVAYSVLVVAKVEKGKSKKLKSVKELLGITIMERSSFEKNPIDFLEAKGYKEVKKDLIIKLPKYSLFELENGRKRMLASAGELQKGNELALPSKYVNFLYLASHYEKLKGSPEDNEQKQLFVEQHKHYLDEIIEQISEFSKRVILADANLDKVLSAYNKHRDKPIREQAENIIHLFTLTNLGAPAAFKYFDTTIDRKRYTSTKEVLDATLIHQSITGLYETRIDLSQLGGDGGEAAAKPAPGGGGGTLNIEDEHRLHETSKEPDVSLGSTWLSDFPQAWAETGGMGLAVRQAPLIIPLKATSTPVSIKQYPMSQEARLGIKPHIQRLLDQGILVPCQSPWNTPLLPVKKPGTNDYRPVQDLREVNKRVEDIHPTVPNPYNLLSGLPPSHQWYTVLDLKDAFFCLRLHPTSQPLFAFEWRDPEMGISGQLTWTRLPQGFKNSPTLFNEALHRDLADFRIQHPDLILLQYVDDLLLAATSELDCQQGTRALLQTLGNLGYRASAKKAQICQKQVKYLGYLLKEGQRWLTEARKETVMGQPTPKTPRQLREFLGTAGFCRLWIPGFAEMAAPLYPLTKPGTLFNWGPDQQKAYQEIKQALLTAPALGLPDLTKPFELFVDEKQGYAKGVLTQKLGPWRRPVAYLSKKLDPVAAGWPPCLRMVAAIAVLTKDAGKLTMGQPLVILAPHAVEALVKQPPDRWLSNARMTHYQALLLDTDRVQFGPVVALNPATLLPLPEEGLQHNCLDILAEAHGTRPDLTDQPLPDADHTWYTDGSSLLQEGQRKAGAAVTTETEVIWAKALPAGTSAQRAELIALTQALKMAEGKKLNVYTDSRYAFATAHIHGEIYRRRGWLTSEGKEIKNKDEILALLKALFLPKRLSIIHCPGHQKGHSAEARGNRMADQAARKAAITETPDTSTLLAGKRTADGSEFEKRTADGSEFESPKKKAKVE

SEQ ID NO: 2766 - protein, 2094 aa, synthetic construct
MPAAKRVKLDGGDKKYSIGLDIGTNSVGWAVITDEYKVPSKKFKVLGNTDRHSIKKNLIGALLFDSGETAEATRLKRTARRRYTRRKNRICYLQEIFSNEMAKVDDSFFHRLEESFLVEEDKKHERHPIFGNIVDEVAYHEKYPTIYHLRKKLVDSTDKADLRLIYLALAHMIKFRGHFLIEGDLNPDNSDVDKLFIQLVQTYNQLFEENPINASGVDAKAILSARLSKSRRLENLIAQLPGEKKNGLFGNLIALSLGLTPNFKSNFDLAEDAKLQLSKDTYDDDLDNLLAQIGDQYADLFLAAKNLSDAILLSDILRVNTEITKAPLSASMIKRYDEHHQDLTLLKALVRQQLPEKYKEIFFDQSKNGYAGYIDGGASQEEFYKFIKPILEKMDGTEELLVKLNREDLLRKQRTFDNGSIPHQIHLGELHAILRRQEDFYPFLKDNREKIEKILTFRIPYYVGPLARGNSRFAWMTRKSEETITPWNFEEVVDKGASAQSFIERMTNFDKNLPNEKVLPKHSLLYEYFTVYNELTKVKYVTEGMRKPAFLSGEQKKAIVDLLFKTNRKVTVKQLKEDYFKKIECFDSVEISGVEDRFNASLGTYHDLLKIIKDKDFLDNEENEDILEDIVLTLTLFEDREMIEERLKTYAHLFDDKVMKQLKRRRYTGWGRLSRKLINGIRDKQSGKTILDFLKSDGFANRNFMQLIHDDSLTFKEDIQKAQVSGQGDSLHEHIANLAGSPAIKKGILQTVKVVDELVKVMGRHKPENIVIEMARENQTTQKGQKNSRERMKRIEEGIKELGSQILKEHPVENTQLQNEKLYLYYLQNGRDMYVDQELDINRLSDYDVDHIVPQSFLKDDSIDNKVLTRSDKARGKSDNVPSEEVVKKMKNYWRQLLNAKLITQRKFDNLTKAERGGLSELDKAGFIKRQLVETRQITKHVAQILDSRMNTKYDENDKLIREVKVITLKSKLVSDFRKDFQFYKVREINNYHHAHDAYLNAVVGTALIKKYPKLESEFVYGDYKVYDVRKMIAKSEQEIGKATAKYFFYSNIMNFFKTEITLANGEIRKRPLIETNGETGEIVWDKGRDFATVRKVLSMPQVNIVKKTEVQTGGFSKESILPKRNSDKLIARKKDWDPKKYGGFDSPTVAYSVLVVAKVEKGKSKKLKSVKELLGITIMERSSFEKNPIDFLEAKGYKEVKKDLIIKLPKYSLFELENGRKRMLASAGELQKGNELALPSKYVNFLYLASHYEKLKGSPEDNEQKQLFVEQHKHYLDEIIEQISEFSKRVILADANLDKVLSAYNKHRDKPIREQAENIIHLFTLTNLGAPAAFKYFDTTIDRKRYTSTKEVLDATLIHQSITGLYETRIDLSQLGGDGGGGSGGGPAPGGTLNIEDEHRLHETSKEPDVSLGSTWLSDFPQAWAETGGMGLAVRQAPLIIPLKATSTPVSIKQYPMSQEARLGIKPHIQRLLDQGILVPCQSPWNTPLLPVKKPGTNDYRPVQDLREVNKRVEDIHPTVPNPYNLLSGLPPSHQWYTVLDLKDAFFCLRLHPTSQPLFAFEWRDPEMGISGQLTWTRLPQGFKNSPTLFNEALHRDLADFRIQHPDLILLQYVDDLLLAATSELDCQQGTRALLQTLGNLGYRASAKKAQICQKQVKYLGYLLKEGQRWLTEARKETVMGQPTPKTPRQLREFLGTAGFCRLWIPGFAEMAAPLYPLTKPGTLFNWGPDQQKAYQEIKQALLTAPALGLPDLTKPFELFVDEKQGYAKGVLTQKLGPWRRPVAYLSKKLDPVAAGWPPCLRMVAAIAVLTKDAGKLTMGQPLVILAPHAVEALVKQPPDRWLSNARMTHYQALLLDTDRVQFGPVVALNPATLLPLPEEGLQHNCLDILAEAHGTRPDLTDQPLPDADHTWYTDGSSLLQEGQRKAGAAVTTETEVIWAKALPAGTSAQRAELIALTQALKMAEGKKLNVYTDSRYAFATAHIHGEIYRRRGWLTSEGKEIKNKDEILALLKALFLPKRLSIIHCPGHQKGHSAEARGNRMADQAARKAAITETPDTSTLLAGKRTADGSEFEKRTADGSEFESPKKKAKVE

SEQ ID NO: 2767 - protein, 2096 aa, synthetic construct
MPAAKRVKLDGGDKKYSIGLDIGTNSVGWAVITDEYKVPSKKFKVLGNTDRHSIKKNLIGALLFDSGETAEATRLKRTARRRYTRRKNRICYLQEIFSNEMAKVDDSFFHRLEESFLVEEDKKHERHPIFGNIVDEVAYHEKYPTIYHLRKKLVDSTDKADLRLIYLALAHMIKFRGHFLIEGDLNPDNSDVDKLFIQLVQTYNQLFEENPINASGVDAKAILSARLSKSRRLENLIAQLPGEKKNGLFGNLIALSLGLTPNFKSNFDLAEDAKLQLSKDTYDDDLDNLLAQIGDQYADLFLAAKNLSDAILLSDILRVNTEITKAPLSASMIKRYDEHHQDLTLLKALVRQQLPEKYKEIFFDQSKNGYAGYIDGGASQEEFYKFIKPILEKMDGTEELLVKLNREDLLRKQRTFDNGSIPHQIHLGELHAILRRQEDFYPFLKDNREKIEKILTFRIPYYVGPLARGNSRFAWMTRKSEETITPWNFEEVVDKGASAQSFIERMTNFDKNLPNEKVLPKHSLLYEYFTVYNELTKVKYVTEGMRKPAFLSGEQKKAIVDLLFKTNRKVTVKQLKEDYFKKIECFDSVEISGVEDRFNASLGTYHDLLKIIKDKDFLDNEENEDILEDIVLTLTLFEDREMIEERLKTYAHLFDDKVMKQLKRRRYTGWGRLSRKLINGIRDKQSGKTILDFLKSDGFANRNFMQLIHDDSLTFKEDIQKAQVSGQGDSLHEHIANLAGSPAIKKGILQTVKVVDELVKVMGRHKPENIVIEMARENQTTQKGQKNSRERMKRIEEGIKELGSQILKEHPVENTQLQNEKLYLYYLQNGRDMYVDQELDINRLSDYDVDHIVPQSFLKDDSIDNKVLTRSDKARGKSDNVPSEEVVKKMKNYWRQLLNAKLITQRKFDNLTKAERGGLSELDKAGFIKRQLVETRQITKHVAQILDSRMNTKYDENDKLIREVKVITLKSKLVSDFRKDFQFYKVREINNYHHAHDAYLNAVVGTALIKKYPKLESEFVYGDYKVYDVRKMIAKSEQEIGKATAKYFFYSNIMNFFKTEITLANGEIRKRPLIETNGETGEIVWDKGRDFATVRKVLSMPQVNIVKKTEVQTGGFSKESILPKRNSDKLIARKKDWDPKKYGGFDSPTVAYSVLVVAKVEKGKSKKLKSVKELLGITIMERSSFEKNPIDFLEAKGYKEVKKDLIIKLPKYSLFELENGRKRMLASAGELQKGNELALPSKYVNFLYLASHYEKLKGSPEDNEQKQLFVEQHKHYLDEIIEQISEFSKRVILADANLDKVLSAYNKHRDKPIREQAENIIHLFTLTNLGAPAAFKYFDTTIDRKRYTSTKEVLDATLIHQSITGLYETRIDLSQLGGDGGEAAAKGGSGGGGGTLNIEDEHRLHETSKEPDVSLGSTWLSDFPQAWAETGGMGLAVRQAPLIIPLKATSTPVSIKQYPMSQEARLGIKPHIQRLLDQGILVPCQSPWNTPLLPVKKPGTNDYRPVQDLREVNKRVEDIHPTVPNPYNLLSGLPPSHQWYTVLDLKDAFFCLRLHPTSQPLFAFEWRDPEMGISGQLTWTRLPQGFKNSPTLFNEALHRDLADFRIQHPDLILLQYVDDLLLAATSELDCQQGTRALLQTLGNLGYRASAKKAQICQKQVKYLGYLLKEGQRWLTEARKETVMGQPTPKTPRQLREFLGTAGFCRLWIPGFAEMAAPLYPLTKPGTLFNWGPDQQKAYQEIKQALLTAPALGLPDLTKPFELFVDEKQGYAKGVLTQKLGPWRRPVAYLSKKLDPVAAGWPPCLRMVAAIAVLTKDAGKLTMGQPLVILAPHAVEALVKQPPDRWLSNARMTHYQALLLDTDRVQFGPVVALNPATLLPLPEEGLQHNCLDILAEAHGTRPDLTDQPLPDADHTWYTDGSSLLQEGQRKAGAAVTTETEVIWAKALPAGTSAQRAELIALTQALKMAEGKKLNVYTDSRYAFATAHIHGEIYRRRGWLTSEGKEIKNKDEILALLKALFLPKRLSIIHCPGHQKGHSAEARGNRMADQAARKAAITETPDTSTLLAGKRTADGSEFEKRTADGSEFESPKKKAKVE

SEQ ID NO: 2768 - protein, 2094 aa, synthetic construct
MPAAKRVKLDGGDKKYSIGLDIGTNSVGWAVITDEYKVPSKKFKVLGNTDRHSIKKNLIGALLFDSGETAEATRLKRTARRRYTRRKNRICYLQEIFSNEMAKVDDSFFHRLEESFLVEEDKKHERHPIFGNIVDEVAYHEKYPTIYHLRKKLVDSTDKADLRLIYLALAHMIKFRGHFLIEGDLNPDNSDVDKLFIQLVQTYNQLFEENPINASGVDAKAILSARLSKSRRLENLIAQLPGEKKNGLFGNLIALSLGLTPNFKSNFDLAEDAKLQLSKDTYDDDLDNLLAQIGDQYADLFLAAKNLSDAILLSDILRVNTEITKAPLSASMIKRYDEHHQDLTLLKALVRQQLPEKYKEIFFDQSKNGYAGYIDGGASQEEFYKFIKPILEKMDGTEELLVKLNREDLLRKQRTFDNGSIPHQIHLGELHAILRRQEDFYPFLKDNREKIEKILTFRIPYYVGPLARGNSRFAWMTRKSEETITPWNFEEVVDKGASAQSFIERMTNFDKNLPNEKVLPKHSLLYEYFTVYNELTKVKYVTEGMRKPAFLSGEQKKAIVDLLFKTNRKVTVKQLKEDYFKKIECFDSVEISGVEDRFNASLGTYHDLLKIIKDKDFLDNEENEDILEDIVLTLTLFEDREMIEERLKTYAHLFDDKVMKQLKRRRYTGWGRLSRKLINGIRDKQSGKTILDFLKSDGFANRNFMQLIHDDSLTFKEDIQKAQVSGQGDSLHEHIANLAGSPAIKKGILQTVKVVDELVKVMGRHKPENIVIEMARENQTTQKGQKNSRERMKRIEEGIKELGSQILKEHPVENTQLQNEKLYLYYLQNGRDMYVDQELDINRLSDYDVDHIVPQSFLKDDSIDNKVLTRSDKARGKSDNVPSEEVVKKMKNYWRQLLNAKLITQRKFDNLTKAERGGLSELDKAGFIKRQLVETRQITKHVAQILDSRMNTKYDENDKLIREVKVITLKSKLVSDFRKDFQFYKVREINNYHHAHDAYLNAVVGTALIKKYPKLESEFVYGDYKVYDVRKMIAKSEQEIGKATAKYFFYSNIMNFFKTEITLANGEIRKRPLIETNGETGEIVWDKGRDFATVRKVLSMPQVNIVKKTEVQTGGFSKESILPKRNSDKLIARKKDWDPKKYGGFDSPTVAYSVLVVAKVEKGKSKKLKSVKELLGITIMERSSFEKNPIDFLEAKGYKEVKKDLIIKLPKYSLFELENGRKRMLASAGELQKGNELALPSKYVNFLYLASHYEKLKGSPEDNEQKQLFVEQHKHYLDEIIEQISEFSKRVILADANLDKVLSAYNKHRDKPIREQAENIIHLFTLTNLGAPAAFKYFDTTIDRKRYTSTKEVLDATLIHQSITGLYETRIDLSQLGGDGGGSSGGSPAPGGTLNIEDEHRLHETSKEPDVSLGSTWLSDFPQAWAETGGMGLAVRQAPLIIPLKATSTPVSIKQYPMSQEARLGIKPHIQRLLDQGILVPCQSPWNTPLLPVKKPGTNDYRPVQDLREVNKRVEDIHPTVPNPYNLLSGLPPSHQWYTVLDLKDAFFCLRLHPTSQPLFAFEWRDPEMGISGQLTWTRLPQGFKNSPTLFNEALHRDLADFRIQHPDLILLQYVDDLLLAATSELDCQQGTRALLQTLGNLGYRASAKKAQICQKQVKYLGYLLKEGQRWLTEARKETVMGQPTPKTPRQLREFLGTAGFCRLWIPGFAEMAAPLYPLTKPGTLFNWGPDQQKAYQEIKQALLTAPALGLPDLTKPFELFVDEKQGYAKGVLTQKLGPWRRPVAYLSKKLDPVAAGWPPCLRMVAAIAVLTKDAGKLTMGQPLVILAPHAVEALVKQPPDRWLSNARMTHYQALLLDTDRVQFGPVVALNPATLLPLPEEGLQHNCLDILAEAHGTRPDLTDQPLPDADHTWYTDGSSLLQEGQRKAGAAVTTETEVIWAKALPAGTSAQRAELIALTQALKMAEGKKLNVYTDSRYAFATAHIHGEIYRRRGWLTSEGKEIKNKDEILALLKALFLPKRLSIIHCPGHQKGHSAEARGNRMADQAARKAAITETPDTSTLLAGKRTADGSEFEKRTADGSEFESPKKKAKVE

SEQ ID NO: 2769 - protein, 2094 aa, synthetic construct
MPAAKRVKLDGGDKKYSIGLDIGTNSVGWAVITDEYKVPSKKFKVLGNTDRHSIKKNLIGALLFDSGETAEATRLKRTARRRYTRRKNRICYLQEIFSNEMAKVDDSFFHRLEESFLVEEDKKHERHPIFGNIVDEVAYHEKYPTIYHLRKKLVDSTDKADLRLIYLALAHMIKFRGHFLIEGDLNPDNSDVDKLFIQLVQTYNQLFEENPINASGVDAKAILSARLSKSRRLENLIAQLPGEKKNGLFGNLIALSLGLTPNFKSNFDLAEDAKLQLSKDTYDDDLDNLLAQIGDQYADLFLAAKNLSDAILLSDILRVNTEITKAPLSASMIKRYDEHHQDLTLLKALVRQQLPEKYKEIFFDQSKNGYAGYIDGGASQEEFYKFIKPILEKMDGTEELLVKLNREDLLRKQRTFDNGSIPHQIHLGELHAILRRQEDFYPFLKDNREKIEKILTFRIPYYVGPLARGNSRFAWMTRKSEETITPWNFEEVVDKGASAQSFIERMTNFDKNLPNEKVLPKHSLLYEYFTVYNELTKVKYVTEGMRKPAFLSGEQKKAIVDLLFKTNRKVTVKQLKEDYFKKIECFDSVEISGVEDRFNASLGTYHDLLKIIKDKDFLDNEENEDILEDIVLTLTLFEDREMIEERLKTYAHLFDDKVMKQLKRRRYTGWGRLSRKLINGIRDKQSGKTILDFLKSDGFANRNFMQLIHDDSLTFKEDIQKAQVSGQGDSLHEHIANLAGSPAIKKGILQTVKVVDELVKVMGRHKPENIVIEMARENQTTQKGQKNSRERMKRIEEGIKELGSQILKEHPVENTQLQNEKLYLYYLQNGRDMYVDQELDINRLSDYDVDHIVPQSFLKDDSIDNKVLTRSDKARGKSDNVPSEEVVKKMKNYWRQLLNAKLITQRKFDNLTKAERGGLSELDKAGFIKRQLVETRQITKHVAQILDSRMNTKYDENDKLIREVKVITLKSKLVSDFRKDFQFYKVREINNYHHAHDAYLNAVVGTALIKKYPKLESEFVYGDYKVYDVRKMIAKSEQEIGKATAKYFFYSNIMNFFKTEITLANGEIRKRPLIETNGETGEIVWDKGRDFATVRKVLSMPQVNIVKKTEVQTGGFSKESILPKRNSDKLIARKKDWDPKKYGGFDSPTVAYSVLVVAKVEKGKSKKLKSVKELLGITIMERSSFEKNPIDFLEAKGYKEVKKDLIIKLPKYSLFELENGRKRMLASAGELQKGNELALPSKYVNFLYLASHYEKLKGSPEDNEQKQLFVEQHKHYLDEIIEQISEFSKRVILADANLDKVLSAYNKHRDKPIREQAENIIHLFTLTNLGAPAAFKYFDTTIDRKRYTSTKEVLDATLIHQSITGLYETRIDLSQLGGDGGGGGGGSPAPGGTLNIEDEHRLHETSKEPDVSLGSTWLSDFPQAWAETGGMGLAVRQAPLIIPLKATSTPVSIKQYPMSQEARLGIKPHIQRLLDQGILVPCQSPWNTPLLPVKKPGTNDYRPVQDLREVNKRVEDIHPTVPNPYNLLSGLPPSHQWYTVLDLKDAFFCLRLHPTSQPLFAFEWRDPEMGISGQLTWTRLPQGFKNSPTLFNEALHRDLADFRIQHPDLILLQYVDDLLLAATSELDCQQGTRALLQTLGNLGYRASAKKAQICQKQVKYLGYLLKEGQRWLTEARKETVMGQPTPKTPRQLREFLGTAGFCRLWIPGFAEMAAPLYPLTKPGTLFNWGPDQQKAYQEIKQALLTAPALGLPDLTKPFELFVDEKQGYAKGVLTQKLGPWRRPVAYLSKKLDPVAAGWPPCLRMVAAIAVLTKDAGKLTMGQPLVILAPHAVEALVKQPPDRWLSNARMTHYQALLLDTDRVQFGPVVALNPATLLPLPEEGLQHNCLDILAEAHGTRPDLTDQPLPDADHTWYTDGSSLLQEGQRKAGAAVTTETEVIWAKALPAGTSAQRAELIALTQALKMAEGKKLNVYTDSRYAFATAHIHGEIYRRRGWLTSEGKEIKNKDEILALLKALFLPKRLSIIHCPGHQKGHSAEARGNRMADQAARKAAITETPDTSTLLAGKRTADGSEFEKRTADGSEFESPKKKAKVE

SEQ ID NO: 2770 - protein, 2094 aa, synthetic construct
MPAAKRVKLDGGDKKYSIGLDIGTNSVGWAVITDEYKVPSKKFKVLGNTDRHSIKKNLIGALLFDSGETAEATRLKRTARRRYTRRKNRICYLQEIFSNEMAKVDDSFFHRLEESFLVEEDKKHERHPIFGNIVDEVAYHEKYPTIYHLRKKLVDSTDKADLRLIYLALAHMIKFRGHFLIEGDLNPDNSDVDKLFIQLVQTYNQLFEENPINASGVDAKAILSARLSKSRRLENLIAQLPGEKKNGLFGNLIALSLGLTPNFKSNFDLAEDAKLQLSKDTYDDDLDNLLAQIGDQYADLFLAAKNLSDAILLSDILRVNTEITKAPLSASMIKRYDEHHQDLTLLKALVRQQLPEKYKEIFFDQSKNGYAGYIDGGASQEEFYKFIKPILEKMDGTEELLVKLNREDLLRKQRTFDNGSIPHQIHLGELHAILRRQEDFYPFLKDNREKIEKILTFRIPYYVGPLARGNSRFAWMTRKSEETITPWNFEEVVDKGASAQSFIERMTNFDKNLPNEKVLPKHSLLYEYFTVYNELTKVKYVTEGMRKPAFLSGEQKKAIVDLLFKTNRKVTVKQLKEDYFKKIECFDSVEISGVEDRFNASLGTYHDLLKIIKDKDFLDNEENEDILEDIVLTLTLFEDREMIEERLKTYAHLFDDKVMKQLKRRRYTGWGRLSRKLINGIRDKQSGKTILDFLKSDGFANRNFMQLIHDDSLTFKEDIQKAQVSGQGDSLHEHIANLAGSPAIKKGILQTVKVVDELVKVMGRHKPENIVIEMARENQTTQKGQKNSRERMKRIEEGIKELGSQILKEHPVENTQLQNEKLYLYYLQNGRDMYVDQELDINRLSDYDVDHIVPQSFLKDDSIDNKVLTRSDKARGKSDNVPSEEVVKKMKNYWRQLLNAKLITQRKFDNLTKAERGGLSELDKAGFIKRQLVETRQITKHVAQILDSRMNTKYDENDKLIREVKVITLKSKLVSDFRKDFQFYKVREINNYHHAHDAYLNAVVGTALIKKYPKLESEFVYGDYKVYDVRKMIAKSEQEIGKATAKYFFYSNIMNFFKTEITLANGEIRKRPLIETNGETGEIVWDKGRDFATVRKVLSMPQVNIVKKTEVQTGGFSKESILPKRNSDKLIARKKDWDPKKYGGFDSPTVAYSVLVVAKVEKGKSKKLKSVKELLGITIMERSSFEKNPIDFLEAKGYKEVKKDLIIKLPKYSLFELENGRKRMLASAGELQKGNELALPSKYVNFLYLASHYEKLKGSPEDNEQKQLFVEQHKHYLDEIIEQISEFSKRVILADANLDKVLSAYNKHRDKPIREQAENIIHLFTLTNLGAPAAFKYFDTTIDRKRYTSTKEVLDATLIHQSITGLYETRIDLSQLGGDGGGGGGSSPAPGGTLNIEDEHRLHETSKEPDVSLGSTWLSDFPQAWAETGGMGLAVRQAPLIIPLKATSTPVSIKQYPMSQEARLGIKPHIQRLLDQGILVPCQSPWNTPLLPVKKPGTNDYRPVQDLREVNKRVEDIHPTVPNPYNLLSGLPPSHQWYTVLDLKDAFFCLRLHPTSQPLFAFEWRDPEMGISGQLTWTRLPQGFKNSPTLFNEALHRDLADFRIQHPDLILLQYVDDLLLAATSELDCQQGTRALLQTLGNLGYRASAKKAQICQKQVKYLGYLLKEGQRWLTEARKETVMGQPTPKTPRQLREFLGTAGFCRLWIPGFAEMAAPLYPLTKPGTLFNWGPDQQKAYQEIKQALLTAPALGLPDLTKPFELFVDEKQGYAKGVLTQKLGPWRRPVAYLSKKLDPVAAGWPPCLRMVAAIAVLTKDAGKLTMGQPLVILAPHAVEALVKQPPDRWLSNARMTHYQALLLDTDRVQFGPVVALNPATLLPLPEEGLQHNCLDILAEAHGTRPDLTDQPLPDADHTWYTDGSSLLQEGQRKAGAAVTTETEVIWAKALPAGTSAQRAELIALTQALKMAEGKKLNVYTDSRYAFATAHIHGEIYRRRGWLTSEGKEIKNKDEILALLKALFLPKRLSIIHCPGHQKGHSAEARGNRMADQAARKAAITETPDTSTLLAGKRTADGSEFEKRTADGSEFESPKKKAKVE

SEQ ID NO: 2771 - protein, 2105 aa, synthetic construct
MPAAKRVKLDGGDKKYSIGLDIGTNSVGWAVITDEYKVPSKKFKVLGNTDRHSIKKNLIGALLFDSGETAEATRLKRTARRRYTRRKNRICYLQEIFSNEMAKVDDSFFHRLEESFLVEEDKKHERHPIFGNIVDEVAYHEKYPTIYHLRKKLVDSTDKADLRLIYLALAHMIKFRGHFLIEGDLNPDNSDVDKLFIQLVQTYNQLFEENPINASGVDAKAILSARLSKSRRLENLIAQLPGEKKNGLFGNLIALSLGLTPNFKSNFDLAEDAKLQLSKDTYDDDLDNLLAQIGDQYADLFLAAKNLSDAILLSDILRVNTEITKAPLSASMIKRYDEHHQDLTLLKALVRQQLPEKYKEIFFDQSKNGYAGYIDGGASQEEFYKFIKPILEKMDGTEELLVKLNREDLLRKQRTFDNGSIPHQIHLGELHAILRRQEDFYPFLKDNREKIEKILTFRIPYYVGPLARGNSRFAWMTRKSEETITPWNFEEVVDKGASAQSFIERMTNFDKNLPNEKVLPKHSLLYEYFTVYNELTKVKYVTEGMRKPAFLSGEQKKAIVDLLFKTNRKVTVKQLKEDYFKKIECFDSVEISGVEDRFNASLGTYHDLLKIIKDKDFLDNEENEDILEDIVLTLTLFEDREMIEERLKTYAHLFDDKVMKQLKRRRYTGWGRLSRKLINGIRDKQSGKTILDFLKSDGFANRNFMQLIHDDSLTFKEDIQKAQVSGQGDSLHEHIANLAGSPAIKKGILQTVKVVDELVKVMGRHKPENIVIEMARENQTTQKGQKNSRERMKRIEEGIKELGSQILKEHPVENTQLQNEKLYLYYLQNGRDMYVDQELDINRLSDYDVDHIVPQSFLKDDSIDNKVLTRSDKARGKSDNVPSEEVVKKMKNYWRQLLNAKLITQRKFDNLTKAERGGLSELDKAGFIKRQLVETRQITKHVAQILDSRMNTKYDENDKLIREVKVITLKSKLVSDFRKDFQFYKVREINNYHHAHDAYLNAVVGTALIKKYPKLESEFVYGDYKVYDVRKMIAKSEQEIGKATAKYFFYSNIMNFFKTEITLANGEIRKRPLIETNGETGEIVWDKGRDFATVRKVLSMPQVNIVKKTEVQTGGFSKESILPKRNSDKLIARKKDWDPKKYGGFDSPTVAYSVLVVAKVEKGKSKKLKSVKELLGITIMERSSFEKNPIDFLEAKGYKEVKKDLIIKLPKYSLFELENGRKRMLASAGELQKGNELALPSKYVNFLYLASHYEKLKGSPEDNEQKQLFVEQHKHYLDEIIEQISEFSKRVILADANLDKVLSAYNKHRDKPIREQAENIIHLFTLTNLGAPAAFKYFDTTIDRKRYTSTKEVLDATLIHQSITGLYETRIDLSQLGGDGGGGGGSGGGGSGGGGSGGGGSGGTLNIEDEHRLHETSKEPDVSLGSTWLSDFPQAWAETGGMGLAVRQAPLIIPLKATSTPVSIKQYPMSQEARLGIKPHIQRLLDQGILVPCQSPWNTPLLPVKKPGTNDYRPVQDLREVNKRVEDIHPTVPNPYNLLSGLPPSHQWYTVLDLKDAFFCLRLHPTSQPLFAFEWRDPEMGISGQLTWTRLPQGFKNSPTLFNEALHRDLADFRIQHPDLILLQYVDDLLLAATSELDCQQGTRALLQTLGNLGYRASAKKAQICQKQVKYLGYLLKEGQRWLTEARKETVMGQPTPKTPRQLREFLGTAGFCRLWIPGFAEMAAPLYPLTKPGTLFNWGPDQQKAYQEIKQALLTAPALGLPDLTKPFELFVDEKQGYAKGVLTQKLGPWRRPVAYLSKKLDPVAAGWPPCLRMVAAIAVLTKDAGKLTMGQPLVILAPHAVEALVKQPPDRWLSNARMTHYQALLLDTDRVQFGPVVALNPATLLPLPEEGLQHNCLDILAEAHGTRPDLTDQPLPDADHTWYTDGSSLLQEGQRKAGAAVTTETEVIWAKALPAGTSAQRAELIALTQALKMAEGKKLNVYTDSRYAFATAHIHGEIYRRRGWLTSEGKEIKNKDEILALLKALFLPKRLSIIHCPGHQKGHSAEARGNRMADQAARKAAITETPDTSTLLAGKRTADGSEFEKRTADGSEFESPKKKAKVE

SEQ ID NO: 2772 - protein, 2100 aa, synthetic construct
MPAAKRVKLDGGDKKYSIGLDIGTNSVGWAVITDEYKVPSKKFKVLGNTDRHSIKKNLIGALLFDSGETAEATRLKRTARRRYTRRKNRICYLQEIFSNEMAKVDDSFFHRLEESFLVEEDKKHERHPIFGNIVDEVAYHEKYPTIYHLRKKLVDSTDKADLRLIYLALAHMIKFRGHFLIEGDLNPDNSDVDKLFIQLVQTYNQLFEENPINASGVDAKAILSARLSKSRRLENLIAQLPGEKKNGLFGNLIALSLGLTPNFKSNFDLAEDAKLQLSKDTYDDDLDNLLAQIGDQYADLFLAAKNLSDAILLSDILRVNTEITKAPLSASMIKRYDEHHQDLTLLKALVRQQLPEKYKEIFFDQSKNGYAGYIDGGASQEEFYKFIKPILEKMDGTEELLVKLNREDLLRKQRTFDNGSIPHQIHLGELHAILRRQEDFYPFLKDNREKIEKILTFRIPYYVGPLARGNSRFAWMTRKSEETITPWNFEEVVDKGASAQSFIERMTNFDKNLPNEKVLPKHSLLYEYFTVYNELTKVKYVTEGMRKPAFLSGEQKKAIVDLLFKTNRKVTVKQLKEDYFKKIECFDSVEISGVEDRFNASLGTYHDLLKIIKDKDFLDNEENEDILEDIVLTLTLFEDREMIEERLKTYAHLFDDKVMKQLKRRRYTGWGRLSRKLINGIRDKQSGKTILDFLKSDGFANRNFMQLIHDDSLTFKEDIQKAQVSGQGDSLHEHIANLAGSPAIKKGILQTVKVVDELVKVMGRHKPENIVIEMARENQTTQKGQKNSRERMKRIEEGIKELGSQILKEHPVENTQLQNEKLYLYYLQNGRDMYVDQELDINRLSDYDVDHIVPQSFLKDDSIDNKVLTRSDKARGKSDNVPSEEVVKKMKNYWRQLLNAKLITQRKFDNLTKAERGGLSELDKAGFIKRQLVETRQITKHVAQILDSRMNTKYDENDKLIREVKVITLKSKLVSDFRKDFQFYKVREINNYHHAHDAYLNAVVGTALIKKYPKLESEFVYGDYKVYDVRKMIAKSEQEIGKATAKYFFYSNIMNFFKTEITLANGEIRKRPLIETNGETGEIVWDKGRDFATVRKVLSMPQVNIVKKTEVQTGGFSKESILPKRNSDKLIARKKDWDPKKYGGFDSPTVAYSVLVVAKVEKGKSKKLKSVKELLGITIMERSSFEKNPIDFLEAKGYKEVKKDLIIKLPKYSLFELENGRKRMLASAGELQKGNELALPSKYVNFLYLASHYEKLKGSPEDNEQKQLFVEQHKHYLDEIIEQISEFSKRVILADANLDKVLSAYNKHRDKPIREQAENIIHLFTLTNLGAPAAFKYFDTTIDRKRYTSTKEVLDATLIHQSITGLYETRIDLSQLGGDGGEAAAKEAAAKEAAAKGGTLNIEDEHRLHETSKEPDVSLGSTWLSDFPQAWAETGGMGLAVRQAPLIIPLKATSTPVSIKQYPMSQEARLGIKPHIQRLLDQGILVPCQSPWNTPLLPVKKPGTNDYRPVQDLREVNKRVEDIHPTVPNPYNLLSGLPPSHQWYTVLDLKDAFFCLRLHPTSQPLFAFEWRDPEMGISGQLTWTRLPQGFKNSPTLFNEALHRDLADFRIQHPDLILLQYVDDLLLAATSELDCQQGTRALLQTLGNLGYRASAKKAQICQKQVKYLGYLLKEGQRWLTEARKETVMGQPTPKTPRQLREFLGTAGFCRLWIPGFAEMAAPLYPLTKPGTLFNWGPDQQKAYQEIKQALLTAPALGLPDLTKPFELFVDEKQGYAKGVLTQKLGPWRRPVAYLSKKLDPVAAGWPPCLRMVAAIAVLTKDAGKLTMGQPLVILAPHAVEALVKQPPDRWLSNARMTHYQALLLDTDRVQFGPVVALNPATLLPLPEEGLQHNCLDILAEAHGTRPDLTDQPLPDADHTWYTDGSSLLQEGQRKAGAAVTTETEVIWAKALPAGTSAQRAELIALTQALKMAEGKKLNVYTDSRYAFATAHIHGEIYRRRGWLTSEGKEIKNKDEILALLKALFLPKRLSIIHCPGHQKGHSAEARGNRMADQAARKAAITETPDTSTLLAGKRTADGSEFEKRTADGSEFESPKKKAKVE

SEQ ID NO: 2773 - protein, 2094 aa, synthetic construct
MPAAKRVKLDGGDKKYSIGLDIGTNSVGWAVITDEYKVPSKKFKVLGNTDRHSIKKNLIGALLFDSGETAEATRLKRTARRRYTRRKNRICYLQEIFSNEMAKVDDSFFHRLEESFLVEEDKKHERHPIFGNIVDEVAYHEKYPTIYHLRKKLVDSTDKADLRLIYLALAHMIKFRGHFLIEGDLNPDNSDVDKLFIQLVQTYNQLFEENPINASGVDAKAILSARLSKSRRLENLIAQLPGEKKNGLFGNLIALSLGLTPNFKSNFDLAEDAKLQLSKDTYDDDLDNLLAQIGDQYADLFLAAKNLSDAILLSDILRVNTEITKAPLSASMIKRYDEHHQDLTLLKALVRQQLPEKYKEIFFDQSKNGYAGYIDGGASQEEFYKFIKPILEKMDGTEELLVKLNREDLLRKQRTFDNGSIPHQIHLGELHAILRRQEDFYPFLKDNREKIEKILTFRIPYYVGPLARGNSRFAWMTRKSEETITPWNFEEVVDKGASAQSFIERMTNFDKNLPNEKVLPKHSLLYEYFTVYNELTKVKYVTEGMRKPAFLSGEQKKAIVDLLFKTNRKVTVKQLKEDYFKKIECFDSVEISGVEDRFNASLGTYHDLLKIIKDKDFLDNEENEDILEDIVLTLTLFEDREMIEERLKTYAHLFDDKVMKQLKRRRYTGWGRLSRKLINGIRDKQSGKTILDFLKSDGFANRNFMQLIHDDSLTFKEDIQKAQVSGQGDSLHEHIANLAGSPAIKKGILQTVKVVDELVKVMGRHKPENIVIEMARENQTTQKGQKNSRERMKRIEEGIKELGSQILKEHPVENTQLQNEKLYLYYLQNGRDMYVDQELDINRLSDYDVDHIVPQSFLKDDSIDNKVLTRSDKARGKSDNVPSEEVVKKMKNYWRQLLNAKLITQRKFDNLTKAERGGLSELDKAGFIKRQLVETRQITKHVAQILDSRMNTKYDENDKLIREVKVITLKSKLVSDFRKDFQFYKVREINNYHHAHDAYLNAVVGTALIKKYPKLESEFVYGDYKVYDVRKMIAKSEQEIGKATAKYFFYSNIMNFFKTEITLANGEIRKRPLIETNGETGEIVWDKGRDFATVRKVLSMPQVNIVKKTEVQTGGFSKESILPKRNSDKLIARKKDWDPKKYGGFDSPTVAYSVLVVAKVEKGKSKKLKSVKELLGITIMERSSFEKNPIDFLEAKGYKEVKKDLIIKLPKYSLFELENGRKRMLASAGELQKGNELALPSKYVNFLYLASHYEKLKGSPEDNEQKQLFVEQHKHYLDEIIEQISEFSKRVILADANLDKVLSAYNKHRDKPIREQAENIIHLFTLTNLGAPAAFKYFDTTIDRKRYTSTKEVLDATLIHQSITGLYETRIDLSQLGGDGGGGGPAPGSSGGTLNIEDEHRLHETSKEPDVSLGSTWLSDFPQAWAETGGMGLAVRQAPLIIPLKATSTPVSIKQYPMSQEARLGIKPHIQRLLDQGILVPCQSPWNTPLLPVKKPGTNDYRPVQDLREVNKRVEDIHPTVPNPYNLLSGLPPSHQWYTVLDLKDAFFCLRLHPTSQPLFAFEWRDPEMGISGQLTWTRLPQGFKNSPTLFNEALHRDLADFRIQHPDLILLQYVDDLLLAATSELDCQQGTRALLQTLGNLGYRASAKKAQICQKQVKYLGYLLKEGQRWLTEARKETVMGQPTPKTPRQLREFLGTAGFCRLWIPGFAEMAAPLYPLTKPGTLFNWGPDQQKAYQEIKQALLTAPALGLPDLTKPFELFVDEKQGYAKGVLTQKLGPWRRPVAYLSKKLDPVAAGWPPCLRMVAAIAVLTKDAGKLTMGQPLVILAPHAVEALVKQPPDRWLSNARMTHYQALLLDTDRVQFGPVVALNPATLLPLPEEGLQHNCLDILAEAHGTRPDLTDQPLPDADHTWYTDGSSLLQEGQRKAGAAVTTETEVIWAKALPAGTSAQRAELIALTQALKMAEGKKLNVYTDSRYAFATAHIHGEIYRRRGWLTSEGKEIKNKDEILALLKALFLPKRLSIIHCPGHQKGHSAEARGNRMADQAARKAAITETPDTSTLLAGKRTADGSEFEKRTADGSEFESPKKKAKVE

SEQ ID NO: 2774 - protein, 2093 aa, synthetic construct
MPAAKRVKLDGGDKKYSIGLDIGTNSVGWAVITDEYKVPSKKFKVLGNTDRHSIKKNLIGALLFDSGETAEATRLKRTARRRYTRRKNRICYLQEIFSNEMAKVDDSFFHRLEESFLVEEDKKHERHPIFGNIVDEVAYHEKYPTIYHLRKKLVDSTDKADLRLIYLALAHMIKFRGHFLIEGDLNPDNSDVDKLFIQLVQTYNQLFEENPINASGVDAKAILSARLSKSRRLENLIAQLPGEKKNGLFGNLIALSLGLTPNFKSNFDLAEDAKLQLSKDTYDDDLDNLLAQIGDQYADLFLAAKNLSDAILLSDILRVNTEITKAPLSASMIKRYDEHHQDLTLLKALVRQQLPEKYKEIFFDQSKNGYAGYIDGGASQEEFYKFIKPILEKMDGTEELLVKLNREDLLRKQRTFDNGSIPHQIHLGELHAILRRQEDFYPFLKDNREKIEKILTFRIPYYVGPLARGNSRFAWMTRKSEETITPWNFEEVVDKGASAQSFIERMTNFDKNLPNEKVLPKHSLLYEYFTVYNELTKVKYVTEGMRKPAFLSGEQKKAIVDLLFKTNRKVTVKQLKEDYFKKIECFDSVEISGVEDRFNASLGTYHDLLKIIKDKDFLDNEENEDILEDIVLTLTLFEDREMIEERLKTYAHLFDDKVMKQLKRRRYTGWGRLSRKLINGIRDKQSGKTILDFLKSDGFANRNFMQLIHDDSLTFKEDIQKAQVSGQGDSLHEHIANLAGSPAIKKGILQTVKVVDELVKVMGRHKPENIVIEMARENQTTQKGQKNSRERMKRIEEGIKELGSQILKEHPVENTQLQNEKLYLYYLQNGRDMYVDQELDINRLSDYDVDHIVPQSFLKDDSIDNKVLTRSDKARGKSDNVPSEEVVKKMKNYWRQLLNAKLITQRKFDNLTKAERGGLSELDKAGFIKRQLVETRQITKHVAQILDSRMNTKYDENDKLIREVKVITLKSKLVSDFRKDFQFYKVREINNYHHAHDAYLNAVVGTALIKKYPKLESEFVYGDYKVYDVRKMIAKSEQEIGKATAKYFFYSNIMNFFKTEITLANGEIRKRPLIETNGETGEIVWDKGRDFATVRKVLSMPQVNIVKKTEVQTGGFSKESILPKRNSDKLIARKKDWDPKKYGGFDSPTVAYSVLVVAKVEKGKSKKLKSVKELLGITIMERSSFEKNPIDFLEAKGYKEVKKDLIIKLPKYSLFELENGRKRMLASAGELQKGNELALPSKYVNFLYLASHYEKLKGSPEDNEQKQLFVEQHKHYLDEIIEQISEFSKRVILADANLDKVLSAYNKHRDKPIREQAENIIHLFTLTNLGAPAAFKYFDTTIDRKRYTSTKEVLDATLIHQSITGLYETRIDLSQLGGDGGGGSEAAAKGGTLNIEDEHRLHETSKEPDVSLGSTWLSDFPQAWAETGGMGLAVRQAPLIIPLKATSTPVSIKQYPMSQEARLGIKPHIQRLLDQGILVPCQSPWNTPLLPVKKPGTNDYRPVQDLREVNKRVEDIHPTVPNPYNLLSGLPPSHQWYTVLDLKDAFFCLRLHPTSQPLFAFEWRDPEMGISGQLTWTRLPQGFKNSPTLFNEALHRDLADFRIQHPDLILLQYVDDLLLAATSELDCQQGTRALLQTLGNLGYRASAKKAQICQKQVKYLGYLLKEGQRWLTEARKETVMGQPTPKTPRQLREFLGTAGFCRLWIPGFAEMAAPLYPLTKPGTLFNWGPDQQKAYQEIKQALLTAPALGLPDLTKPFELFVDEKQGYAKGVLTQKLGPWRRPVAYLSKKLDPVAAGWPPCLRMVAAIAVLTKDAGKLTMGQPLVILAPHAVEALVKQPPDRWLSNARMTHYQALLLDTDRVQFGPVVALNPATLLPLPEEGLQHNCLDILAEAHGTRPDLTDQPLPDADHTWYTDGSSLLQEGQRKAGAAVTTETEVIWAKALPAGTSAQRAELIALTQALKMAEGKKLNVYTDSRYAFATAHIHGEIYRRRGWLTSEGKEIKNKDEILALLKALFLPKRLSIIHCPGHQKGHSAEARGNRMADQAARKAAITETPDTSTLLAGKRTADGSEFEKRTADGSEFESPKKKAKVE

SEQ ID NO: 2775 - protein, 2096 aa, synthetic construct
MPAAKRVKLDGGDKKYSIGLDIGTNSVGWAVITDEYKVPSKKFKVLGNTDRHSIKKNLIGALLFDSGETAEATRLKRTARRRYTRRKNRICYLQEIFSNEMAKVDDSFFHRLEESFLVEEDKKHERHPIFGNIVDEVAYHEKYPTIYHLRKKLVDSTDKADLRLIYLALAHMIKFRGHFLIEGDLNPDNSDVDKLFIQLVQTYNQLFEENPINASGVDAKAILSARLSKSRRLENLIAQLPGEKKNGLFGNLIALSLGLTPNFKSNFDLAEDAKLQLSKDTYDDDLDNLLAQIGDQYADLFLAAKNLSDAILLSDILRVNTEITKAPLSASMIKRYDEHHQDLTLLKALVRQQLPEKYKEIFFDQSKNGYAGYIDGGASQEEFYKFIKPILEKMDGTEELLVKLNREDLLRKQRTFDNGSIPHQIHLGELHAILRRQEDFYPFLKDNREKIEKILTFRIPYYVGPLARGNSRFAWMTRKSEETITPWNFEEVVDKGASAQSFIERMTNFDKNLPNEKVLPKHSLLYEYFTVYNELTKVKYVTEGMRKPAFLSGEQKKAIVDLLFKTNRKVTVKQLKEDYFKKIECFDSVEISGVEDRFNASLGTYHDLLKIIKDKDFLDNEENEDILEDIVLTLTLFEDREMIEERLKTYAHLFDDKVMKQLKRRRYTGWGRLSRKLINGIRDKQSGKTILDFLKSDGFANRNFMQLIHDDSLTFKEDIQKAQVSGQGDSLHEHIANLAGSPAIKKGILQTVKVVDELVKVMGRHKPENIVIEMARENQTTQKGQKNSRERMKRIEEGIKELGSQILKEHPVENTQLQNEKLYLYYLQNGRDMYVDQELDINRLSDYDVDHIVPQSFLKDDSIDNKVLTRSDKARGKSDNVPSEEVVKKMKNYWRQLLNAKLITQRKFDNLTKAERGGLSELDKAGFIKRQLVETRQITKHVAQILDSRMNTKYDENDKLIREVKVITLKSKLVSDFRKDFQFYKVREINNYHHAHDAYLNAVVGTALIKKYPKLESEFVYGDYKVYDVRKMIAKSEQEIGKATAKYFFYSNIMNFFKTEITLANGEIRKRPLIETNGETGEIVWDKGRDFATVRKVLSMPQVNIVKKTEVQTGGFSKESILPKRNSDKLIARKKDWDPKKYGGFDSPTVAYSVLVVAKVEKGKSKKLKSVKELLGITIMERSSFEKNPIDFLEAKGYKEVKKDLIIKLPKYSLFELENGRKRMLASAGELQKGNELALPSKYVNFLYLASHYEKLKGSPEDNEQKQLFVEQHKHYLDEIIEQISEFSKRVILADANLDKVLSAYNKHRDKPIREQAENIIHLFTLTNLGAPAAFKYFDTTIDRKRYTSTKEVLDATLIHQSITGLYETRIDLSQLGGDGGGSSEAAAKPAPGGTLNIEDEHRLHETSKEPDVSLGSTWLSDFPQAWAETGGMGLAVRQAPLIIPLKATSTPVSIKQYPMSQEARLGIKPHIQRLLDQGILVPCQSPWNTPLLPVKKPGTNDYRPVQDLREVNKRVEDIHPTVPNPYNLLSGLPPSHQWYTVLDLKDAFFCLRLHPTSQPLFAFEWRDPEMGISGQLTWTRLPQGFKNSPTLFNEALHRDLADFRIQHPDLILLQYVDDLLLAATSELDCQQGTRALLQTLGNLGYRASAKKAQICQKQVKYLGYLLKEGQRWLTEARKETVMGQPTPKTPRQLREFLGTAGFCRLWIPGFAEMAAPLYPLTKPGTLFNWGPDQQKAYQEIKQALLTAPALGLPDLTKPFELFVDEKQGYAKGVLTQKLGPWRRPVAYLSKKLDPVAAGWPPCLRMVAAIAVLTKDAGKLTMGQPLVILAPHAVEALVKQPPDRWLSNARMTHYQALLLDTDRVQFGPVVALNPATLLPLPEEGLQHNCLDILAEAHGTRPDLTDQPLPDADHTWYTDGSSLLQEGQRKAGAAVTTETEVIWAKALPAGTSAQRAELIALTQALKMAEGKKLNVYTDSRYAFATAHIHGEIYRRRGWLTSEGKEIKNKDEILALLKALFLPKRLSIIHCPGHQKGHSAEARGNRMADQAARKAAITETPDTSTLLAGKRTADGSEFEKRTADGSEFESPKKKAKVE

SEQ ID NO: 2776 - protein, 2096 aa, synthetic construct
MPAAKRVKLDGGDKKYSIGLDIGTNSVGWAVITDEYKVPSKKFKVLGNTDRHSIKKNLIGALLFDSGETAEATRLKRTARRRYTRRKNRICYLQEIFSNEMAKVDDSFFHRLEESFLVEEDKKHERHPIFGNIVDEVAYHEKYPTIYHLRKKLVDSTDKADLRLIYLALAHMIKFRGHFLIEGDLNPDNSDVDKLFIQLVQTYNQLFEENPINASGVDAKAILSARLSKSRRLENLIAQLPGEKKNGLFGNLIALSLGLTPNFKSNFDLAEDAKLQLSKDTYDDDLDNLLAQIGDQYADLFLAAKNLSDAILLSDILRVNTEITKAPLSASMIKRYDEHHQDLTLLKALVRQQLPEKYKEIFFDQSKNGYAGYIDGGASQEEFYKFIKPILEKMDGTEELLVKLNREDLLRKQRTFDNGSIPHQIHLGELHAILRRQEDFYPFLKDNREKIEKILTFRIPYYVGPLARGNSRFAWMTRKSEETITPWNFEEVVDKGASAQSFIERMTNFDKNLPNEKVLPKHSLLYEYFTVYNELTKVKYVTEGMRKPAFLSGEQKKAIVDLLFKTNRKVTVKQLKEDYFKKIECFDSVEISGVEDRFNASLGTYHDLLKIIKDKDFLDNEENEDILEDIVLTLTLFEDREMIEERLKTYAHLFDDKVMKQLKRRRYTGWGRLSRKLINGIRDKQSGKTILDFLKSDGFANRNFMQLIHDDSLTFKEDIQKAQVSGQGDSLHEHIANLAGSPAIKKGILQTVKVVDELVKVMGRHKPENIVIEMARENQTTQKGQKNSRERMKRIEEGIKELGSQILKEHPVENTQLQNEKLYLYYLQNGRDMYVDQELDINRLSDYDVDHIVPQSFLKDDSIDNKVLTRSDKARGKSDNVPSEEVVKKMKNYWRQLLNAKLITQRKFDNLTKAERGGLSELDKAGFIKRQLVETRQITKHVAQILDSRMNTKYDENDKLIREVKVITLKSKLVSDFRKDFQFYKVREINNYHHAHDAYLNAVVGTALIKKYPKLESEFVYGDYKVYDVRKMIAKSEQEIGKATAKYFFYSNIMNFFKTEITLANGEIRKRPLIETNGETGEIVWDKGRDFATVRKVLSMPQVNIVKKTEVQTGGFSKESILPKRNSDKLIARKKDWDPKKYGGFDSPTVAYSVLVVAKVEKGKSKKLKSVKELLGITIMERSSFEKNPIDFLEAKGYKEVKKDLIIKLPKYSLFELENGRKRMLASAGELQKGNELALPSKYVNFLYLASHYEKLKGSPEDNEQKQLFVEQHKHYLDEIIEQISEFSKRVILADANLDKVLSAYNKHRDKPIREQAENIIHLFTLTNLGAPAAFKYFDTTIDRKRYTSTKEVLDATLIHQSITGLYETRIDLSQLGGDGGGGSPAPEAAAKGGTLNIEDEHRLHETSKEPDVSLGSTWLSDFPQAWAETGGMGLAVRQAPLIIPLKATSTPVSIKQYPMSQEARLGIKPHIQRLLDQGILVPCQSPWNTPLLPVKKPGTNDYRPVQDLREVNKRVEDIHPTVPNPYNLLSGLPPSHQWYTVLDLKDAFFCLRLHPTSQPLFAFEWRDPEMGISGQLTWTRLPQGFKNSPTLFNEALHRDLADFRIQHPDLILLQYVDDLLLAATSELDCQQGTRALLQTLGNLGYRASAKKAQICQKQVKYLGYLLKEGQRWLTEARKETVMGQPTPKTPRQLREFLGTAGFCRLWIPGFAEMAAPLYPLTKPGTLFNWGPDQQKAYQEIKQALLTAPALGLPDLTKPFELFVDEKQGYAKGVLTQKLGPWRRPVAYLSKKLDPVAAGWPPCLRMVAAIAVLTKDAGKLTMGQPLVILAPHAVEALVKQPPDRWLSNARMTHYQALLLDTDRVQFGPVVALNPATLLPLPEEGLQHNCLDILAEAHGTRPDLTDQPLPDADHTWYTDGSSLLQEGQRKAGAAVTTETEVIWAKALPAGTSAQRAELIALTQALKMAEGKKLNVYTDSRYAFATAHIHGEIYRRRGWLTSEGKEIKNKDEILALLKALFLPKRLSIIHCPGHQKGHSAEARGNRMADQAARKAAITETPDTSTLLAGKRTADGSEFEKRTADGSEFESPKKKAKVE

SEQ ID NO: 2777 - protein, 2096 aa, synthetic construct
MPAAKRVKLDGGDKKYSIGLDIGTNSVGWAVITDEYKVPSKKFKVLGNTDRHSIKKNLIGALLFDSGETAEATRLKRTARRRYTRRKNRICYLQEIFSNEMAKVDDSFFHRLEESFLVEEDKKHERHPIFGNIVDEVAYHEKYPTIYHLRKKLVDSTDKADLRLIYLALAHMIKFRGHFLIEGDLNPDNSDVDKLFIQLVQTYNQLFEENPINASGVDAKAILSARLSKSRRLENLIAQLPGEKKNGLFGNLIALSLGLTPNFKSNFDLAEDAKLQLSKDTYDDDLDNLLAQIGDQYADLFLAAKNLSDAILLSDILRVNTEITKAPLSASMIKRYDEHHQDLTLLKALVRQQLPEKYKEIFFDQSKNGYAGYIDGGASQEEFYKFIKPILEKMDGTEELLVKLNREDLLRKQRTFDNGSIPHQIHLGELHAILRRQEDFYPFLKDNREKIEKILTFRIPYYVGPLARGNSRFAWMTRKSEETITPWNFEEVVDKGASAQSFIERMTNFDKNLPNEKVLPKHSLLYEYFTVYNELTKVKYVTEGMRKPAFLSGEQKKAIVDLLFKTNRKVTVKQLKEDYFKKIECFDSVEISGVEDRFNASLGTYHDLLKIIKDKDFLDNEENEDILEDIVLTLTLFEDREMIEERLKTYAHLFDDKVMKQLKRRRYTGWGRLSRKLINGIRDKQSGKTILDFLKSDGFANRNFMQLIHDDSLTFKEDIQKAQVSGQGDSLHEHIANLAGSPAIKKGILQTVKVVDELVKVMGRHKPENIVIEMARENQTTQKGQKNSRERMKRIEEGIKELGSQILKEHPVENTQLQNEKLYLYYLQNGRDMYVDQELDINRLSDYDVDHIVPQSFLKDDSIDNKVLTRSDKARGKSDNVPSEEVVKKMKNYWRQLLNAKLITQRKFDNLTKAERGGLSELDKAGFIKRQLVETRQITKHVAQILDSRMNTKYDENDKLIREVKVITLKSKLVSDFRKDFQFYKVREINNYHHAHDAYLNAVVGTALIKKYPKLESEFVYGDYKVYDVRKMIAKSEQEIGKATAKYFFYSNIMNFFKTEITLANGEIRKRPLIETNGETGEIVWDKGRDFATVRKVLSMPQVNIVKKTEVQTGGFSKESILPKRNSDKLIARKKDWDPKKYGGFDSPTVAYSVLVVAKVEKGKSKKLKSVKELLGITIMERSSFEKNPIDFLEAKGYKEVKKDLIIKLPKYSLFELENGRKRMLASAGELQKGNELALPSKYVNFLYLASHYEKLKGSPEDNEQKQLFVEQHKHYLDEIIEQISEFSKRVILADANLDKVLSAYNKHRDKPIREQAENIIHLFTLTNLGAPAAFKYFDTTIDRKRYTSTKEVLDATLIHQSITGLYETRIDLSQLGGDGGGSSGGGEAAAKGGTLNIEDEHRLHETSKEPDVSLGSTWLSDFPQAWAETGGMGLAVRQAPLIIPLKATSTPVSIKQYPMSQEARLGIKPHIQRLLDQGILVPCQSPWNTPLLPVKKPGTNDYRPVQDLREVNKRVEDIHPTVPNPYNLLSGLPPSHQWYTVLDLKDAFFCLRLHPTSQPLFAFEWRDPEMGISGQLTWTRLPQGFKNSPTLFNEALHRDLADFRIQHPDLILLQYVDDLLLAATSELDCQQGTRALLQTLGNLGYRASAKKAQICQKQVKYLGYLLKEGQRWLTEARKETVMGQPTPKTPRQLREFLGTAGFCRLWIPGFAEMAAPLYPLTKPGTLFNWGPDQQKAYQEIKQALLTAPALGLPDLTKPFELFVDEKQGYAKGVLTQKLGPWRRPVAYLSKKLDPVAAGWPPCLRMVAAIAVLTKDAGKLTMGQPLVILAPHAVEALVKQPPDRWLSNARMTHYQALLLDTDRVQFGPVVALNPATLLPLPEEGLQHNCLDILAEAHGTRPDLTDQPLPDADHTWYTDGSSLLQEGQRKAGAAVTTETEVIWAKALPAGTSAQRAELIALTQALKMAEGKKLNVYTDSRYAFATAHIHGEIYRRRGWLTSEGKEIKNKDEILALLKALFLPKRLSIIHCPGHQKGHSAEARGNRMADQAARKAAITETPDTSTLLAGKRTADGSEFEKRTADGSEFESPKKKAKVE

SEQ ID NO: 2778 - protein, 2091 aa, synthetic construct
MPAAKRVKLDGGDKKYSIGLDIGTNSVGWAVITDEYKVPSKKFKVLGNTDRHSIKKNLIGALLFDSGETAEATRLKRTARRRYTRRKNRICYLQEIFSNEMAKVDDSFFHRLEESFLVEEDKKHERHPIFGNIVDEVAYHEKYPTIYHLRKKLVDSTDKADLRLIYLALAHMIKFRGHFLIEGDLNPDNSDVDKLFIQLVQTYNQLFEENPINASGVDAKAILSARLSKSRRLENLIAQLPGEKKNGLFGNLIALSLGLTPNFKSNFDLAEDAKLQLSKDTYDDDLDNLLAQIGDQYADLFLAAKNLSDAILLSDILRVNTEITKAPLSASMIKRYDEHHQDLTLLKALVRQQLPEKYKEIFFDQSKNGYAGYIDGGASQEEFYKFIKPILEKMDGTEELLVKLNREDLLRKQRTFDNGSIPHQIHLGELHAILRRQEDFYPFLKDNREKIEKILTFRIPYYVGPLARGNSRFAWMTRKSEETITPWNFEEVVDKGASAQSFIERMTNFDKNLPNEKVLPKHSLLYEYFTVYNELTKVKYVTEGMRKPAFLSGEQKKAIVDLLFKTNRKVTVKQLKEDYFKKIECFDSVEISGVEDRFNASLGTYHDLLKIIKDKDFLDNEENEDILEDIVLTLTLFEDREMIEERLKTYAHLFDDKVMKQLKRRRYTGWGRLSRKLINGIRDKQSGKTILDFLKSDGFANRNFMQLIHDDSLTFKEDIQKAQVSGQGDSLHEHIANLAGSPAIKKGILQTVKVVDELVKVMGRHKPENIVIEMARENQTTQKGQKNSRERMKRIEEGIKELGSQILKEHPVENTQLQNEKLYLYYLQNGRDMYVDQELDINRLSDYDVDHIVPQSFLKDDSIDNKVLTRSDKARGKSDNVPSEEVVKKMKNYWRQLLNAKLITQRKFDNLTKAERGGLSELDKAGFIKRQLVETRQITKHVAQILDSRMNTKYDENDKLIREVKVITLKSKLVSDFRKDFQFYKVREINNYHHAHDAYLNAVVGTALIKKYPKLESEFVYGDYKVYDVRKMIAKSEQEIGKATAKYFFYSNIMNFFKTEITLANGEIRKRPLIETNGETGEIVWDKGRDFATVRKVLSMPQVNIVKKTEVQTGGFSKESILPKRNSDKLIARKKDWDPKKYGGFDSPTVAYSVLVVAKVEKGKSKKLKSVKELLGITIMERSSFEKNPIDFLEAKGYKEVKKDLIIKLPKYSLFELENGRKRMLASAGELQKGNELALPSKYVNFLYLASHYEKLKGSPEDNEQKQLFVEQHKHYLDEIIEQISEFSKRVILADANLDKVLSAYNKHRDKPIREQAENIIHLFTLTNLGAPAAFKYFDTTIDRKRYTSTKEVLDATLIHQSITGLYETRIDLSQLGGDGGGSSGGSGGTLNIEDEHRLHETSKEPDVSLGSTWLSDFPQAWAETGGMGLAVRQAPLIIPLKATSTPVSIKQYPMSQEARLGIKPHIQRLLDQGILVPCQSPWNTPLLPVKKPGTNDYRPVQDLREVNKRVEDIHPTVPNPYNLLSGLPPSHQWYTVLDLKDAFFCLRLHPTSQPLFAFEWRDPEMGISGQLTWTRLPQGFKNSPTLFNEALHRDLADFRIQHPDLILLQYVDDLLLAATSELDCQQGTRALLQTLGNLGYRASAKKAQICQKQVKYLGYLLKEGQRWLTEARKETVMGQPTPKTPRQLREFLGTAGFCRLWIPGFAEMAAPLYPLTKPGTLFNWGPDQQKAYQEIKQALLTAPALGLPDLTKPFELFVDEKQGYAKGVLTQKLGPWRRPVAYLSKKLDPVAAGWPPCLRMVAAIAVLTKDAGKLTMGQPLVILAPHAVEALVKQPPDRWLSNARMTHYQALLLDTDRVQFGPVVALNPATLLPLPEEGLQHNCLDILAEAHGTRPDLTDQPLPDADHTWYTDGSSLLQEGQRKAGAAVTTETEVIWAKALPAGTSAQRAELIALTQALKMAEGKKLNVYTDSRYAFATAHIHGEIYRRRGWLTSEGKEIKNKDEILALLKALFLPKRLSIIHCPGHQKGHSAEARGNRMADQAARKAAITETPDTSTLLAGKRTADGSEFEKRTADGSEFESPKKKAKVE

SEQ ID NO: 2779 - protein, 2091 aa, synthetic construct
MPAAKRVKLDGGDKKYSIGLDIGTNSVGWAVITDEYKVPSKKFKVLGNTDRHSIKKNLIGALLFDSGETAEATRLKRTARRRYTRRKNRICYLQEIFSNEMAKVDDSFFHRLEESFLVEEDKKHERHPIFGNIVDEVAYHEKYPTIYHLRKKLVDSTDKADLRLIYLALAHMIKFRGHFLIEGDLNPDNSDVDKLFIQLVQTYNQLFEENPINASGVDAKAILSARLSKSRRLENLIAQLPGEKKNGLFGNLIALSLGLTPNFKSNFDLAEDAKLQLSKDTYDDDLDNLLAQIGDQYADLFLAAKNLSDAILLSDILRVNTEITKAPLSASMIKRYDEHHQDLTLLKALVRQQLPEKYKEIFFDQSKNGYAGYIDGGASQEEFYKFIKPILEKMDGTEELLVKLNREDLLRKQRTFDNGSIPHQIHLGELHAILRRQEDFYPFLKDNREKIEKILTFRIPYYVGPLARGNSRFAWMTRKSEETITPWNFEEVVDKGASAQSFIERMTNFDKNLPNEKVLPKHSLLYEYFTVYNELTKVKYVTEGMRKPAFLSGEQKKAIVDLLFKTNRKVTVKQLKEDYFKKIECFDSVEISGVEDRFNASLGTYHDLLKIIKDKDFLDNEENEDILEDIVLTLTLFEDREMIEERLKTYAHLFDDKVMKQLKRRRYTGWGRLSRKLINGIRDKQSGKTILDFLKSDGFANRNFMQLIHDDSLTFKEDIQKAQVSGQGDSLHEHIANLAGSPAIKKGILQTVKVVDELVKVMGRHKPENIVIEMARENQTTQKGQKNSRERMKRIEEGIKELGSQILKEHPVENTQLQNEKLYLYYLQNGRDMYVDQELDINRLSDYDVDHIVPQSFLKDDSIDNKVLTRSDKARGKSDNVPSEEVVKKMKNYWRQLLNAKLITQRKFDNLTKAERGGLSELDKAGFIKRQLVETRQITKHVAQILDSRMNTKYDENDKLIREVKVITLKSKLVSDFRKDFQFYKVREINNYHHAHDAYLNAVVGTALIKKYPKLESEFVYGDYKVYDVRKMIAKSEQEIGKATAKYFFYSNIMNFFKTEITLANGEIRKRPLIETNGETGEIVWDKGRDFATVRKVLSMPQVNIVKKTEVQTGGFSKESILPKRNSDKLIARKKDWDPKKYGGFDSPTVAYSVLVVAKVEKGKSKKLKSVKELLGITIMERSSFEKNPIDFLEAKGYKEVKKDLIIKLPKYSLFELENGRKRMLASAGELQKGNELALPSKYVNFLYLASHYEKLKGSPEDNEQKQLFVEQHKHYLDEIIEQISEFSKRVILADANLDKVLSAYNKHRDKPIREQAENIIHLFTLTNLGAPAAFKYFDTTIDRKRYTSTKEVLDATLIHQSITGLYETRIDLSQLGGDGGGSSGSSGGTLNIEDEHRLHETSKEPDVSLGSTWLSDFPQAWAETGGMGLAVRQAPLIIPLKATSTPVSIKQYPMSQEARLGIKPHIQRLLDQGILVPCQSPWNTPLLPVKKPGTNDYRPVQDLREVNKRVEDIHPTVPNPYNLLSGLPPSHQWYTVLDLKDAFFCLRLHPTSQPLFAFEWRDPEMGISGQLTWTRLPQGFKNSPTLFNEALHRDLADFRIQHPDLILLQYVDDLLLAATSELDCQQGTRALLQTLGNLGYRASAKKAQICQKQVKYLGYLLKEGQRWLTEARKETVMGQPTPKTPRQLREFLGTAGFCRLWIPGFAEMAAPLYPLTKPGTLFNWGPDQQKAYQEIKQALLTAPALGLPDLTKPFELFVDEKQGYAKGVLTQKLGPWRRPVAYLSKKLDPVAAGWPPCLRMVAAIAVLTKDAGKLTMGQPLVILAPHAVEALVKQPPDRWLSNARMTHYQALLLDTDRVQFGPVVALNPATLLPLPEEGLQHNCLDILAEAHGTRPDLTDQPLPDADHTWYTDGSSLLQEGQRKAGAAVTTETEVIWAKALPAGTSAQRAELIALTQALKMAEGKKLNVYTDSRYAFATAHIHGEIYRRRGWLTSEGKEIKNKDEILALLKALFLPKRLSIIHCPGHQKGHSAEARGNRMADQAARKAAITETPDTSTLLAGKRTADGSEFEKRTADGSEFESPKKKAKVE

SEQ ID NO: 2780 - protein, 2091 aa, synthetic construct
MPAAKRVKLDGGDKKYSIGLDIGTNSVGWAVITDEYKVPSKKFKVLGNTDRHSIKKNLIGALLFDSGETAEATRLKRTARRRYTRRKNRICYLQEIFSNEMAKVDDSFFHRLEESFLVEEDKKHERHPIFGNIVDEVAYHEKYPTIYHLRKKLVDSTDKADLRLIYLALAHMIKFRGHFLIEGDLNPDNSDVDKLFIQLVQTYNQLFEENPINASGVDAKAILSARLSKSRRLENLIAQLPGEKKNGLFGNLIALSLGLTPNFKSNFDLAEDAKLQLSKDTYDDDLDNLLAQIGDQYADLFLAAKNLSDAILLSDILRVNTEITKAPLSASMIKRYDEHHQDLTLLKALVRQQLPEKYKEIFFDQSKNGYAGYIDGGASQEEFYKFIKPILEKMDGTEELLVKLNREDLLRKQRTFDNGSIPHQIHLGELHAILRRQEDFYPFLKDNREKIEKILTFRIPYYVGPLARGNSRFAWMTRKSEETITPWNFEEVVDKGASAQSFIERMTNFDKNLPNEKVLPKHSLLYEYFTVYNELTKVKYVTEGMRKPAFLSGEQKKAIVDLLFKTNRKVTVKQLKEDYFKKIECFDSVEISGVEDRFNASLGTYHDLLKIIKDKDFLDNEENEDILEDIVLTLTLFEDREMIEERLKTYAHLFDDKVMKQLKRRRYTGWGRLSRKLINGIRDKQSGKTILDFLKSDGFANRNFMQLIHDDSLTFKEDIQKAQVSGQGDSLHEHIANLAGSPAIKKGILQTVKVVDELVKVMGRHKPENIVIEMARENQTTQKGQKNSRERMKRIEEGIKELGSQILKEHPVENTQLQNEKLYLYYLQNGRDMYVDQELDINRLSDYDVDHIVPQSFLKDDSIDNKVLTRSDKARGKSDNVPSEEVVKKMKNYWRQLLNAKLITQRKFDNLTKAERGGLSELDKAGFIKRQLVETRQITKHVAQILDSRMNTKYDENDKLIREVKVITLKSKLVSDFRKDFQFYKVREINNYHHAHDAYLNAVVGTALIKKYPKLESEFVYGDYKVYDVRKMIAKSEQEIGKATAKYFFYSNIMNFFKTEITLANGEIRKRPLIETNGETGEIVWDKGRDFATVRKVLSMPQVNIVKKTEVQTGGFSKESILPKRNSDKLIARKKDWDPKKYGGFDSPTVAYSVLVVAKVEKGKSKKLKSVKELLGITIMERSSFEKNPIDFLEAKGYKEVKKDLIIKLPKYSLFELENGRKRMLASAGELQKGNELALPSKYVNFLYLASHYEKLKGSPEDNEQKQLFVEQHKHYLDEIIEQISEFSKRVILADANLDKVLSAYNKHRDKPIREQAENIIHLFTLTNLGAPAAFKYFDTTIDRKRYTSTKEVLDATLIHQSITGLYETRIDLSQLGGDGGGGGGGSGGTLNIEDEHRLHETSKEPDVSLGSTWLSDFPQAWAETGGMGLAVRQAPLIIPLKATSTPVSIKQYPMSQEARLGIKPHIQRLLDQGILVPCQSPWNTPLLPVKKPGTNDYRPVQDLREVNKRVEDIHPTVPNPYNLLSGLPPSHQWYTVLDLKDAFFCLRLHPTSQPLFAFEWRDPEMGISGQLTWTRLPQGFKNSPTLFNEALHRDLADFRIQHPDLILLQYVDDLLLAATSELDCQQGTRALLQTLGNLGYRASAKKAQICQKQVKYLGYLLKEGQRWLTEARKETVMGQPTPKTPRQLREFLGKAGFCRLFIPGFAEMAAPLYPLTKPGTLFNWGPDQQKAYQEIKQALLTAPALGLPDLTKPFELFVDEKQGYAKGVLTQKLGPWRRPVAYLSKKLDPVAAGWPPCLRMVAAIAVLTKDAGKLTMGQPLVILAPHAVEALVKQPPDRWLSNARMTHYQALLLDTDRVQFGPVVALNPATLLPLPEEGLQHNCLDILAEAHGTRPDLTDQPLPDADHTWYTDGSSLLQEGQRKAGAAVTTETEVIWAKALPAGTSAQRAELIALTQALKMAEGKKLNVYTDSRYAFATAHIHGEIYRRRGWLTSEGKEIKNKDEILALLKALFLPKRLSIIHCPGHQKGHSAEARGNRMADQAARKAAITETPDTSTLLAGKRTADGSEFEKRTADGSEFESPKKKAKVE

SEQ ID NO: 2781 - protein, 2096 aa, synthetic construct
MPAAKRVKLDGGDKKYSIGLDIGTNSVGWAVITDEYKVPSKKFKVLGNTDRHSIKKNLIGALLFDSGETAEATRLKRTARRRYTRRKNRICYLQEIFSNEMAKVDDSFFHRLEESFLVEEDKKHERHPIFGNIVDEVAYHEKYPTIYHLRKKLVDSTDKADLRLIYLALAHMIKFRGHFLIEGDLNPDNSDVDKLFIQLVQTYNQLFEENPINASGVDAKAILSARLSKSRRLENLIAQLPGEKKNGLFGNLIALSLGLTPNFKSNFDLAEDAKLQLSKDTYDDDLDNLLAQIGDQYADLFLAAKNLSDAILLSDILRVNTEITKAPLSASMIKRYDEHHQDLTLLKALVRQQLPEKYKEIFFDQSKNGYAGYIDGGASQEEFYKFIKPILEKMDGTEELLVKLNREDLLRKQRTFDNGSIPHQIHLGELHAILRRQEDFYPFLKDNREKIEKILTFRIPYYVGPLARGNSRFAWMTRKSEETITPWNFEEVVDKGASAQSFIERMTNFDKNLPNEKVLPKHSLLYEYFTVYNELTKVKYVTEGMRKPAFLSGEQKKAIVDLLFKTNRKVTVKQLKEDYFKKIECFDSVEISGVEDRFNASLGTYHDLLKIIKDKDFLDNEENEDILEDIVLTLTLFEDREMIEERLKTYAHLFDDKVMKQLKRRRYTGWGRLSRKLINGIRDKQSGKTILDFLKSDGFANRNFMQLIHDDSLTFKEDIQKAQVSGQGDSLHEHIANLAGSPAIKKGILQTVKVVDELVKVMGRHKPENIVIEMARENQTTQKGQKNSRERMKRIEEGIKELGSQILKEHPVENTQLQNEKLYLYYLQNGRDMYVDQELDINRLSDYDVDHIVPQSFLKDDSIDNKVLTRSDKARGKSDNVPSEEVVKKMKNYWRQLLNAKLITQRKFDNLTKAERGGLSELDKAGFIKRQLVETRQITKHVAQILDSRMNTKYDENDKLIREVKVITLKSKLVSDFRKDFQFYKVREINNYHHAHDAYLNAVVGTALIKKYPKLESEFVYGDYKVYDVRKMIAKSEQEIGKATAKYFFYSNIMNFFKTEITLANGEIRKRPLIETNGETGEIVWDKGRDFATVRKVLSMPQVNIVKKTEVQTGGFSKESILPKRNSDKLIARKKDWDPKKYGGFDSPTVAYSVLVVAKVEKGKSKKLKSVKELLGITIMERSSFEKNPIDFLEAKGYKEVKKDLIIKLPKYSLFELENGRKRMLASAGELQKGNELALPSKYVNFLYLASHYEKLKGSPEDNEQKQLFVEQHKHYLDEIIEQISEFSKRVILADANLDKVLSAYNKHRDKPIREQAENIIHLFTLTNLGAPAAFKYFDTTIDRKRYTSTKEVLDATLIHQSITGLYETRIDLSQLGGDGGEAAAKPAPGSSGGTLNIEDEHRLHETSKEPDVSLGSTWLSDFPQAWAETGGMGLAVRQAPLIIPLKATSTPVSIKQYPMSQEARLGIKPHIQRLLDQGILVPCQSPWNTPLLPVKKPGTNDYRPVQDLREVNKRVEDIHPTVPNPYNLLSGLPPSHQWYTVLDLKDAFFCLRLHPTSQPLFAFEWRDPEMGISGQLTWTRLPQGFKNSPTLFNEALHRDLADFRIQHPDLILLQYVDDLLLAATSELDCQQGTRALLQTLGNLGYRASAKKAQICQKQVKYLGYLLKEGQRWLTEARKETVMGQPTPKTPRQLREFLGKAGFCRLFIPGFAEMAAPLYPLTKPGTLFNWGPDQQKAYQEIKQALLTAPALGLPDLTKPFELFVDEKQGYAKGVLTQKLGPWRRPVAYLSKKLDPVAAGWPPCLRMVAAIAVLTKDAGKLTMGQPLVILAPHAVEALVKQPPDRWLSNARMTHYQALLLDTDRVQFGPVVALNPATLLPLPEEGLQHNCLDILAEAHGTRPDLTDQPLPDADHTWYTDGSSLLQEGQRKAGAAVTTETEVIWAKALPAGTSAQRAELIALTQALKMAEGKKLNVYTDSRYAFATAHIHGEIYRRRGWLTSEGKEIKNKDEILALLKALFLPKRLSIIHCPGHQKGHSAEARGNRMADQAARKAAITETPDTSTLLAGKRTADGSEFEKRTADGSEFESPKKKAKVE

SEQ ID NO: 2782 - protein, 2096 aa, synthetic construct
MPAAKRVKLDGGDKKYSIGLDIGTNSVGWAVITDEYKVPSKKFKVLGNTDRHSIKKNLIGALLFDSGETAEATRLKRTARRRYTRRKNRICYLQEIFSNEMAKVDDSFFHRLEESFLVEEDKKHERHPIFGNIVDEVAYHEKYPTIYHLRKKLVDSTDKADLRLIYLALAHMIKFRGHFLIEGDLNPDNSDVDKLFIQLVQTYNQLFEENPINASGVDAKAILSARLSKSRRLENLIAQLPGEKKNGLFGNLIALSLGLTPNFKSNFDLAEDAKLQLSKDTYDDDLDNLLAQIGDQYADLFLAAKNLSDAILLSDILRVNTEITKAPLSASMIKRYDEHHQDLTLLKALVRQQLPEKYKEIFFDQSKNGYAGYIDGGASQEEFYKFIKPILEKMDGTEELLVKLNREDLLRKQRTFDNGSIPHQIHLGELHAILRRQEDFYPFLKDNREKIEKILTFRIPYYVGPLARGNSRFAWMTRKSEETITPWNFEEVVDKGASAQSFIERMTNFDKNLPNEKVLPKHSLLYEYFTVYNELTKVKYVTEGMRKPAFLSGEQKKAIVDLLFKTNRKVTVKQLKEDYFKKIECFDSVEISGVEDRFNASLGTYHDLLKIIKDKDFLDNEENEDILEDIVLTLTLFEDREMIEERLKTYAHLFDDKVMKQLKRRRYTGWGRLSRKLINGIRDKQSGKTILDFLKSDGFANRNFMQLIHDDSLTFKEDIQKAQVSGQGDSLHEHIANLAGSPAIKKGILQTVKVVDELVKVMGRHKPENIVIEMARENQTTQKGQKNSRERMKRIEEGIKELGSQILKEHPVENTQLQNEKLYLYYLQNGRDMYVDQELDINRLSDYDVDHIVPQSFLKDDSIDNKVLTRSDKARGKSDNVPSEEVVKKMKNYWRQLLNAKLITQRKFDNLTKAERGGLSELDKAGFIKRQLVETRQITKHVAQILDSRMNTKYDENDKLIREVKVITLKSKLVSDFRKDFQFYKVREINNYHHAHDAYLNAVVGTALIKKYPKLESEFVYGDYKVYDVRKMIAKSEQEIGKATAKYFFYSNIMNFFKTEITLANGEIRKRPLIETNGETGEIVWDKGRDFATVRKVLSMPQVNIVKKTEVQTGGFSKESILPKRNSDKLIARKKDWDPKKYGGFDSPTVAYSVLVVAKVEKGKSKKLKSVKELLGITIMERSSFEKNPIDFLEAKGYKEVKKDLIIKLPKYSLFELENGRKRMLASAGELQKGNELALPSKYVNFLYLASHYEKLKGSPEDNEQKQLFVEQHKHYLDEIIEQISEFSKRVILADANLDKVLSAYNKHRDKPIREQAENIIHLFTLTNLGAPAAFKYFDTTIDRKRYTSTKEVLDATLIHQSITGLYETRIDLSQLGGDGGEAAAKGGSPAPGGTLNIEDEHRLHETSKEPDVSLGSTWLSDFPQAWAETGGMGLAVRQAPLIIPLKATSTPVSIKQYPMSQEARLGIKPHIQRLLDQGILVPCQSPWNTPLLPVKKPGTNDYRPVQDLREVNKRVEDIHPTVPNPYNLLSGLPPSHQWYTVLDLKDAFFCLRLHPTSQPLFAFEWRDPEMGISGQLTWTRLPQGFKNSPTLFNEALHRDLADFRIQHPDLILLQYVDDLLLAATSELDCQQGTRALLQTLGNLGYRASAKKAQICQKQVKYLGYLLKEGQRWLTEARKETVMGQPTPKTPRQLREFLGKAGFCRLFIPGFAEMAAPLYPLTKPGTLFNWGPDQQKAYQEIKQALLTAPALGLPDLTKPFELFVDEKQGYAKGVLTQKLGPWRRPVAYLSKKLDPVAAGWPPCLRMVAAIAVLTKDAGKLTMGQPLVILAPHAVEALVKQPPDRWLSNARMTHYQALLLDTDRVQFGPVVALNPATLLPLPEEGLQHNCLDILAEAHGTRPDLTDQPLPDADHTWYTDGSSLLQEGQRKAGAAVTTETEVIWAKALPAGTSAQRAELIALTQALKMAEGKKLNVYTDSRYAFATAHIHGEIYRRRGWLTSEGKEIKNKDEILALLKALFLPKRLSIIHCPGHQKGHSAEARGNRMADQAARKAAITETPDTSTLLAGKRTADGSEFEKRTADGSEFESPKKKAKVE

SEQ ID NO: 2783 - protein, 2093 aa, synthetic construct
MPAAKRVKLDGGDKKYSIGLDIGTNSVGWAVITDEYKVPSKKFKVLGNTDRHSIKKNLIGALLFDSGETAEATRLKRTARRRYTRRKNRICYLQEIFSNEMAKVDDSFFHRLEESFLVEEDKKHERHPIFGNIVDEVAYHEKYPTIYHLRKKLVDSTDKADLRLIYLALAHMIKFRGHFLIEGDLNPDNSDVDKLFIQLVQTYNQLFEENPINASGVDAKAILSARLSKSRRLENLIAQLPGEKKNGLFGNLIALSLGLTPNFKSNFDLAEDAKLQLSKDTYDDDLDNLLAQIGDQYADLFLAAKNLSDAILLSDILRVNTEITKAPLSASMIKRYDEHHQDLTLLKALVRQQLPEKYKEIFFDQSKNGYAGYIDGGASQEEFYKFIKPILEKMDGTEELLVKLNREDLLRKQRTFDNGSIPHQIHLGELHAILRRQEDFYPFLKDNREKIEKILTFRIPYYVGPLARGNSRFAWMTRKSEETITPWNFEEVVDKGASAQSFIERMTNFDKNLPNEKVLPKHSLLYEYFTVYNELTKVKYVTEGMRKPAFLSGEQKKAIVDLLFKTNRKVTVKQLKEDYFKKIECFDSVEISGVEDRFNASLGTYHDLLKIIKDKDFLDNEENEDILEDIVLTLTLFEDREMIEERLKTYAHLFDDKVMKQLKRRRYTGWGRLSRKLINGIRDKQSGKTILDFLKSDGFANRNFMQLIHDDSLTFKEDIQKAQVSGQGDSLHEHIANLAGSPAIKKGILQTVKVVDELVKVMGRHKPENIVIEMARENQTTQKGQKNSRERMKRIEEGIKELGSQILKEHPVENTQLQNEKLYLYYLQNGRDMYVDQELDINRLSDYDVDHIVPQSFLKDDSIDNKVLTRSDKARGKSDNVPSEEVVKKMKNYWRQLLNAKLITQRKFDNLTKAERGGLSELDKAGFIKRQLVETRQITKHVAQILDSRMNTKYDENDKLIREVKVITLKSKLVSDFRKDFQFYKVREINNYHHAHDAYLNAVVGTALIKKYPKLESEFVYGDYKVYDVRKMIAKSEQEIGKATAKYFFYSNIMNFFKTEITLANGEIRKRPLIETNGETGEIVWDKGRDFATVRKVLSMPQVNIVKKTEVQTGGFSKESILPKRNSDKLIARKKDWDPKKYGGFDSPTVAYSVLVVAKVEKGKSKKLKSVKELLGITIMERSSFEKNPIDFLEAKGYKEVKKDLIIKLPKYSLFELENGRKRMLASAGELQKGNELALPSKYVNFLYLASHYEKLKGSPEDNEQKQLFVEQHKHYLDEIIEQISEFSKRVILADANLDKVLSAYNKHRDKPIREQAENIIHLFTLTNLGAPAAFKYFDTTIDRKRYTSTKEVLDATLIHQSITGLYETRIDLSQLGGDGGEAAAKGGSGGTLNIEDEHRLHETSKEPDVSLGSTWLSDFPQAWAETGGMGLAVRQAPLIIPLKATSTPVSIKQYPMSQEARLGIKPHIQRLLDQGILVPCQSPWNTPLLPVKKPGTNDYRPVQDLREVNKRVEDIHPTVPNPYNLLSGLPPSHQWYTVLDLKDAFFCLRLHPTSQPLFAFEWRDPEMGISGQLTWTRLPQGFKNSPTLFNEALHRDLADFRIQHPDLILLQYVDDLLLAATSELDCQQGTRALLQTLGNLGYRASAKKAQICQKQVKYLGYLLKEGQRWLTEARKETVMGQPTPKTPRQLREFLGKAGFCRLFIPGFAEMAAPLYPLTKPGTLFNWGPDQQKAYQEIKQALLTAPALGLPDLTKPFELFVDEKQGYAKGVLTQKLGPWRRPVAYLSKKLDPVAAGWPPCLRMVAAIAVLTKDAGKLTMGQPLVILAPHAVEALVKQPPDRWLSNARMTHYQALLLDTDRVQFGPVVALNPATLLPLPEEGLQHNCLDILAEAHGTRPDLTDQPLPDADHTWYTDGSSLLQEGQRKAGAAVTTETEVIWAKALPAGTSAQRAELIALTQALKMAEGKKLNVYTDSRYAFATAHIHGEIYRRRGWLTSEGKEIKNKDEILALLKALFLPKRLSIIHCPGHQKGHSAEARGNRMADQAARKAAITETPDTSTLLAGKRTADGSEFEKRTADGSEFESPKKKAKVE

SEQ ID NO: 2784 - protein, 2131 aa, synthetic construct
MPAAKRVKLDGGDKKYSIGLDIGTNSVGWAVITDEYKVPSKKFKVLGNTDRHSIKKNLIGALLFDSGETAEATRLKRTARRRYTRRKNRICYLQEIFSNEMAKVDDSFFHRLEESFLVEEDKKHERHPIFGNIVDEVAYHEKYPTIYHLRKKLVDSTDKADLRLIYLALAHMIKFRGHFLIEGDLNPDNSDVDKLFIQLVQTYNQLFEENPINASGVDAKAILSARLSKSRRLENLIAQLPGEKKNGLFGNLIALSLGLTPNFKSNFDLAEDAKLQLSKDTYDDDLDNLLAQIGDQYADLFLAAKNLSDAILLSDILRVNTEITKAPLSASMIKRYDEHHQDLTLLKALVRQQLPEKYKEIFFDQSKNGYAGYIDGGASQEEFYKFIKPILEKMDGTEELLVKLNREDLLRKQRTFDNGSIPHQIHLGELHAILRRQEDFYPFLKDNREKIEKILTFRIPYYVGPLARGNSRFAWMTRKSEETITPWNFEEVVDKGASAQSFIERMTNFDKNLPNEKVLPKHSLLYEYFTVYNELTKVKYVTEGMRKPAFLSGEQKKAIVDLLFKTNRKVTVKQLKEDYFKKIECFDSVEISGVEDRFNASLGTYHDLLKIIKDKDFLDNEENEDILEDIVLTLTLFEDREMIEERLKTYAHLFDDKVMKQLKRRRYTGWGRLSRKLINGIRDKQSGKTILDFLKSDGFANRNFMQLIHDDSLTFKEDIQKAQVSGQGDSLHEHIANLAGSPAIKKGILQTVKVVDELVKVMGRHKPENIVIEMARENQTTQKGQKNSRERMKRIEEGIKELGSQILKEHPVENTQLQNEKLYLYYLQNGRDMYVDQELDINRLSDYDVDHIVPQSFLKDDSIDNKVLTRSDKARGKSDNVPSEEVVKKMKNYWRQLLNAKLITQRKFDNLTKAERGGLSELDKAGFIKRQLVETRQITKHVAQILDSRMNTKYDENDKLIREVKVITLKSKLVSDFRKDFQFYKVREINNYHHAHDAYLNAVVGTALIKKYPKLESEFVYGDYKVYDVRKMIAKSEQEIGKATAKYFFYSNIMNFFKTEITLANGEIRKRPLIETNGETGEIVWDKGRDFATVRKVLSMPQVNIVKKTEVQTGGFSKESILPKRNSDKLIARKKDWDPKKYGGFDSPTVAYSVLVVAKVEKGKSKKLKSVKELLGITIMERSSFEKNPIDFLEAKGYKEVKKDLIIKLPKYSLFELENGRKRMLASAGELQKGNELALPSKYVNFLYLASHYEKLKGSPEDNEQKQLFVEQHKHYLDEIIEQISEFSKRVILADANLDKVLSAYNKHRDKPIREQAENIIHLFTLTNLGAPAAFKYFDTTIDRKRYTSTKEVLDATLIHQSITGLYETRIDLSQLGGDGGAEAAAKEAAAKEAAAKEAAAKALEAEAAAKEAAAKEAAAKEAAAKAGGTLNIEDEHRLHETSKEPDVSLGSTWLSDFPQAWAETGGMGLAVRQAPLIIPLKATSTPVSIKQYPMSQEARLGIKPHIQRLLDQGILVPCQSPWNTPLLPVKKPGTNDYRPVQDLREVNKRVEDIHPTVPNPYNLLSGLPPSHQWYTVLDLKDAFFCLRLHPTSQPLFAFEWRDPEMGISGQLTWTRLPQGFKNSPTLFNEALHRDLADFRIQHPDLILLQYVDDLLLAATSELDCQQGTRALLQTLGNLGYRASAKKAQICQKQVKYLGYLLKEGQRWLTEARKETVMGQPTPKTPRQLREFLGKAGFCRLFIPGFAEMAAPLYPLTKPGTLFNWGPDQQKAYQEIKQALLTAPALGLPDLTKPFELFVDEKQGYAKGVLTQKLGPWRRPVAYLSKKLDPVAAGWPPCLRMVAAIAVLTKDAGKLTMGQPLVILAPHAVEALVKQPPDRWLSNARMTHYQALLLDTDRVQFGPVVALNPATLLPLPEEGLQHNCLDILAEAHGTRPDLTDQPLPDADHTWYTDGSSLLQEGQRKAGAAVTTETEVIWAKALPAGTSAQRAELIALTQALKMAEGKKLNVYTDSRYAFATAHIHGEIYRRRGWLTSEGKEIKNKDEILALLKALFLPKRLSIIHCPGHQKGHSAEARGNRMADQAARKAAITETPDTSTLLAGKRTADGSEFEKRTADGSEFESPKKKAKVE

SEQ ID NO: 2785 - protein, 2096 aa, synthetic construct
MPAAKRVKLDGGDKKYSIGLDIGTNSVGWAVITDEYKVPSKKFKVLGNTDRHSIKKNLIGALLFDSGETAEATRLKRTARRRYTRRKNRICYLQEIFSNEMAKVDDSFFHRLEESFLVEEDKKHERHPIFGNIVDEVAYHEKYPTIYHLRKKLVDSTDKADLRLIYLALAHMIKFRGHFLIEGDLNPDNSDVDKLFIQLVQTYNQLFEENPINASGVDAKAILSARLSKSRRLENLIAQLPGEKKNGLFGNLIALSLGLTPNFKSNFDLAEDAKLQLSKDTYDDDLDNLLAQIGDQYADLFLAAKNLSDAILLSDILRVNTEITKAPLSASMIKRYDEHHQDLTLLKALVRQQLPEKYKEIFFDQSKNGYAGYIDGGASQEEFYKFIKPILEKMDGTEELLVKLNREDLLRKQRTFDNGSIPHQIHLGELHAILRRQEDFYPFLKDNREKIEKILTFRIPYYVGPLARGNSRFAWMTRKSEETITPWNFEEVVDKGASAQSFIERMTNFDKNLPNEKVLPKHSLLYEYFTVYNELTKVKYVTEGMRKPAFLSGEQKKAIVDLLFKTNRKVTVKQLKEDYFKKIECFDSVEISGVEDRFNASLGTYHDLLKIIKDKDFLDNEENEDILEDIVLTLTLFEDREMIEERLKTYAHLFDDKVMKQLKRRRYTGWGRLSRKLINGIRDKQSGKTILDFLKSDGFANRNFMQLIHDDSLTFKEDIQKAQVSGQGDSLHEHIANLAGSPAIKKGILQTVKVVDELVKVMGRHKPENIVIEMARENQTTQKGQKNSRERMKRIEEGIKELGSQILKEHPVENTQLQNEKLYLYYLQNGRDMYVDQELDINRLSDYDVDHIVPQSFLKDDSIDNKVLTRSDKARGKSDNVPSEEVVKKMKNYWRQLLNAKLITQRKFDNLTKAERGGLSELDKAGFIKRQLVETRQITKHVAQILDSRMNTKYDENDKLIREVKVITLKSKLVSDFRKDFQFYKVREINNYHHAHDAYLNAVVGTALIKKYPKLESEFVYGDYKVYDVRKMIAKSEQEIGKATAKYFFYSNIMNFFKTEITLANGEIRKRPLIETNGETGEIVWDKGRDFATVRKVLSMPQVNIVKKTEVQTGGFSKESILPKRNSDKLIARKKDWDPKKYGGFDSPTVAYSVLVVAKVEKGKSKKLKSVKELLGITIMERSSFEKNPIDFLEAKGYKEVKKDLIIKLPKYSLFELENGRKRMLASAGELQKGNELALPSKYVNFLYLASHYEKLKGSPEDNEQKQLFVEQHKHYLDEIIEQISEFSKRVILADANLDKVLSAYNKHRDKPIREQAENIIHLFTLTNLGAPAAFKYFDTTIDRKRYTSTKEVLDATLIHQSITGLYETRIDLSQLGGDGGEAAAKGSSGGGGGTLNIEDEHRLHETSKEPDVSLGSTWLSDFPQAWAETGGMGLAVRQAPLIIPLKATSTPVSIKQYPMSQEARLGIKPHIQRLLDQGILVPCQSPWNTPLLPVKKPGTNDYRPVQDLREVNKRVEDIHPTVPNPYNLLSGLPPSHQWYTVLDLKDAFFCLRLHPTSQPLFAFEWRDPEMGISGQLTWTRLPQGFKNSPTLFNEALHRDLADFRIQHPDLILLQYVDDLLLAATSELDCQQGTRALLQTLGNLGYRASAKKAQICQKQVKYLGYLLKEGQRWLTEARKETVMGQPTPKTPRQLREFLGKAGFCRLFIPGFAEMAAPLYPLTKPGTLFNWGPDQQKAYQEIKQALLTAPALGLPDLTKPFELFVDEKQGYAKGVLTQKLGPWRRPVAYLSKKLDPVAAGWPPCLRMVAAIAVLTKDAGKLTMGQPLVILAPHAVEALVKQPPDRWLSNARMTHYQALLLDTDRVQFGPVVALNPATLLPLPEEGLQHNCLDILAEAHGTRPDLTDQPLPDADHTWYTDGSSLLQEGQRKAGAAVTTETEVIWAKALPAGTSAQRAELIALTQALKMAEGKKLNVYTDSRYAFATAHIHGEIYRRRGWLTSEGKEIKNKDEILALLKALFLPKRLSIIHCPGHQKGHSAEARGNRMADQAARKAAITETPDTSTLLAGKRTADGSEFEKRTADGSEFESPKKKAKVE

SEQ ID NO: 2786 - protein, 2096 aa, synthetic construct
MPAAKRVKLDGGDKKYSIGLDIGTNSVGWAVITDEYKVPSKKFKVLGNTDRHSIKKNLIGALLFDSGETAEATRLKRTARRRYTRRKNRICYLQEIFSNEMAKVDDSFFHRLEESFLVEEDKKHERHPIFGNIVDEVAYHEKYPTIYHLRKKLVDSTDKADLRLIYLALAHMIKFRGHFLIEGDLNPDNSDVDKLFIQLVQTYNQLFEENPINASGVDAKAILSARLSKSRRLENLIAQLPGEKKNGLFGNLIALSLGLTPNFKSNFDLAEDAKLQLSKDTYDDDLDNLLAQIGDQYADLFLAAKNLSDAILLSDILRVNTEITKAPLSASMIKRYDEHHQDLTLLKALVRQQLPEKYKEIFFDQSKNGYAGYIDGGASQEEFYKFIKPILEKMDGTEELLVKLNREDLLRKQRTFDNGSIPHQIHLGELHAILRRQEDFYPFLKDNREKIEKILTFRIPYYVGPLARGNSRFAWMTRKSEETITPWNFEEVVDKGASAQSFIERMTNFDKNLPNEKVLPKHSLLYEYFTVYNELTKVKYVTEGMRKPAFLSGEQKKAIVDLLFKTNRKVTVKQLKEDYFKKIECFDSVEISGVEDRFNASLGTYHDLLKIIKDKDFLDNEENEDILEDIVLTLTLFEDREMIEERLKTYAHLFDDKVMKQLKRRRYTGWGRLSRKLINGIRDKQSGKTILDFLKSDGFANRNFMQLIHDDSLTFKEDIQKAQVSGQGDSLHEHIANLAGSPAIKKGILQTVKVVDELVKVMGRHKPENIVIEMARENQTTQKGQKNSRERMKRIEEGIKELGSQILKEHPVENTQLQNEKLYLYYLQNGRDMYVDQELDINRLSDYDVDHIVPQSFLKDDSIDNKVLTRSDKARGKSDNVPSEEVVKKMKNYWRQLLNAKLITQRKFDNLTKAERGGLSELDKAGFIKRQLVETRQITKHVAQILDSRMNTKYDENDKLIREVKVITLKSKLVSDFRKDFQFYKVREINNYHHAHDAYLNAVVGTALIKKYPKLESEFVYGDYKVYDVRKMIAKSEQEIGKATAKYFFYSNIMNFFKTEITLANGEIRKRPLIETNGETGEIVWDKGRDFATVRKVLSMPQVNIVKKTEVQTGGFSKESILPKRNSDKLIARKKDWDPKKYGGFDSPTVAYSVLVVAKVEKGKSKKLKSVKELLGITIMERSSFEKNPIDFLEAKGYKEVKKDLIIKLPKYSLFELENGRKRMLASAGELQKGNELALPSKYVNFLYLASHYEKLKGSPEDNEQKQLFVEQHKHYLDEIIEQISEFSKRVILADANLDKVLSAYNKHRDKPIREQAENIIHLFTLTNLGAPAAFKYFDTTIDRKRYTSTKEVLDATLIHQSITGLYETRIDLSQLGGDGGPAPGGSEAAAKGGTLNIEDEHRLHETSKEPDVSLGSTWLSDFPQAWAETGGMGLAVRQAPLIIPLKATSTPVSIKQYPMSQEARLGIKPHIQRLLDQGILVPCQSPWNTPLLPVKKPGTNDYRPVQDLREVNKRVEDIHPTVPNPYNLLSGLPPSHQWYTVLDLKDAFFCLRLHPTSQPLFAFEWRDPEMGISGQLTWTRLPQGFKNSPTLFNEALHRDLADFRIQHPDLILLQYVDDLLLAATSELDCQQGTRALLQTLGNLGYRASAKKAQICQKQVKYLGYLLKEGQRWLTEARKETVMGQPTPKTPRQLREFLGKAGFCRLFIPGFAEMAAPLYPLTKPGTLFNWGPDQQKAYQEIKQALLTAPALGLPDLTKPFELFVDEKQGYAKGVLTQKLGPWRRPVAYLSKKLDPVAAGWPPCLRMVAAIAVLTKDAGKLTMGQPLVILAPHAVEALVKQPPDRWLSNARMTHYQALLLDTDRVQFGPVVALNPATLLPLPEEGLQHNCLDILAEAHGTRPDLTDQPLPDADHTWYTDGSSLLQEGQRKAGAAVTTETEVIWAKALPAGTSAQRAELIALTQALKMAEGKKLNVYTDSRYAFATAHIHGEIYRRRGWLTSEGKEIKNKDEILALLKALFLPKRLSIIHCPGHQKGHSAEARGNRMADQAARKAAITETPDTSTLLAGKRTADGSEFEKRTADGSEFESPKKKAKVE

SEQ ID NO: 2787 - protein, 2096 aa, synthetic construct
MPAAKRVKLDGGDKKYSIGLDIGTNSVGWAVITDEYKVPSKKFKVLGNTDRHSIKKNLIGALLFDSGETAEATRLKRTARRRYTRRKNRICYLQEIFSNEMAKVDDSFFHRLEESFLVEEDKKHERHPIFGNIVDEVAYHEKYPTIYHLRKKLVDSTDKADLRLIYLALAHMIKFRGHFLIEGDLNPDNSDVDKLFIQLVQTYNQLFEENPINASGVDAKAILSARLSKSRRLENLIAQLPGEKKNGLFGNLIALSLGLTPNFKSNFDLAEDAKLQLSKDTYDDDLDNLLAQIGDQYADLFLAAKNLSDAILLSDILRVNTEITKAPLSASMIKRYDEHHQDLTLLKALVRQQLPEKYKEIFFDQSKNGYAGYIDGGASQEEFYKFIKPILEKMDGTEELLVKLNREDLLRKQRTFDNGSIPHQIHLGELHAILRRQEDFYPFLKDNREKIEKILTFRIPYYVGPLARGNSRFAWMTRKSEETITPWNFEEVVDKGASAQSFIERMTNFDKNLPNEKVLPKHSLLYEYFTVYNELTKVKYVTEGMRKPAFLSGEQKKAIVDLLFKTNRKVTVKQLKEDYFKKIECFDSVEISGVEDRFNASLGTYHDLLKIIKDKDFLDNEENEDILEDIVLTLTLFEDREMIEERLKTYAHLFDDKVMKQLKRRRYTGWGRLSRKLINGIRDKQSGKTILDFLKSDGFANRNFMQLIHDDSLTFKEDIQKAQVSGQGDSLHEHIANLAGSPAIKKGILQTVKVVDELVKVMGRHKPENIVIEMARENQTTQKGQKNSRERMKRIEEGIKELGSQILKEHPVENTQLQNEKLYLYYLQNGRDMYVDQELDINRLSDYDVDHIVPQSFLKDDSIDNKVLTRSDKARGKSDNVPSEEVVKKMKNYWRQLLNAKLITQRKFDNLTKAERGGLSELDKAGFIKRQLVETRQITKHVAQILDSRMNTKYDENDKLIREVKVITLKSKLVSDFRKDFQFYKVREINNYHHAHDAYLNAVVGTALIKKYPKLESEFVYGDYKVYDVRKMIAKSEQEIGKATAKYFFYSNIMNFFKTEITLANGEIRKRPLIETNGETGEIVWDKGRDFATVRKVLSMPQVNIVKKTEVQTGGFSKESILPKRNSDKLIARKKDWDPKKYGGFDSPTVAYSVLVVAKVEKGKSKKLKSVKELLGITIMERSSFEKNPIDFLEAKGYKEVKKDLIIKLPKYSLFELENGRKRMLASAGELQKGNELALPSKYVNFLYLASHYEKLKGSPEDNEQKQLFVEQHKHYLDEIIEQISEFSKRVILADANLDKVLSAYNKHRDKPIREQAENIIHLFTLTNLGAPAAFKYFDTTIDRKRYTSTKEVLDATLIHQSITGLYETRIDLSQLGGDGGGGSEAAAKGGGGGTLNIEDEHRLHETSKEPDVSLGSTWLSDFPQAWAETGGMGLAVRQAPLIIPLKATSTPVSIKQYPMSQEARLGIKPHIQRLLDQGILVPCQSPWNTPLLPVKKPGTNDYRPVQDLREVNKRVEDIHPTVPNPYNLLSGLPPSHQWYTVLDLKDAFFCLRLHPTSQPLFAFEWRDPEMGISGQLTWTRLPQGFKNSPTLFNEALHRDLADFRIQHPDLILLQYVDDLLLAATSELDCQQGTRALLQTLGNLGYRASAKKAQICQKQVKYLGYLLKEGQRWLTEARKETVMGQPTPKTPRQLREFLGKAGFCRLFIPGFAEMAAPLYPLTKPGTLFNWGPDQQKAYQEIKQALLTAPALGLPDLTKPFELFVDEKQGYAKGVLTQKLGPWRRPVAYLSKKLDPVAAGWPPCLRMVAAIAVLTKDAGKLTMGQPLVILAPHAVEALVKQPPDRWLSNARMTHYQALLLDTDRVQFGPVVALNPATLLPLPEEGLQHNCLDILAEAHGTRPDLTDQPLPDADHTWYTDGSSLLQEGQRKAGAAVTTETEVIWAKALPAGTSAQRAELIALTQALKMAEGKKLNVYTDSRYAFATAHIHGEIYRRRGWLTSEGKEIKNKDEILALLKALFLPKRLSIIHCPGHQKGHSAEARGNRMADQAARKAAITETPDTSTLLAGKRTADGSEFEKRTADGSEFESPKKKAKVE

SEQ ID NO: 2788 - protein, 2100 aa, synthetic construct
MPAAKRVKLDGGDKKYSIGLDIGTNSVGWAVITDEYKVPSKKFKVLGNTDRHSIKKNLIGALLFDSGETAEATRLKRTARRRYTRRKNRICYLQEIFSNEMAKVDDSFFHRLEESFLVEEDKKHERHPIFGNIVDEVAYHEKYPTIYHLRKKLVDSTDKADLRLIYLALAHMIKFRGHFLIEGDLNPDNSDVDKLFIQLVQTYNQLFEENPINASGVDAKAILSARLSKSRRLENLIAQLPGEKKNGLFGNLIALSLGLTPNFKSNFDLAEDAKLQLSKDTYDDDLDNLLAQIGDQYADLFLAAKNLSDAILLSDILRVNTEITKAPLSASMIKRYDEHHQDLTLLKALVRQQLPEKYKEIFFDQSKNGYAGYIDGGASQEEFYKFIKPILEKMDGTEELLVKLNREDLLRKQRTFDNGSIPHQIHLGELHAILRRQEDFYPFLKDNREKIEKILTFRIPYYVGPLARGNSRFAWMTRKSEETITPWNFEEVVDKGASAQSFIERMTNFDKNLPNEKVLPKHSLLYEYFTVYNELTKVKYVTEGMRKPAFLSGEQKKAIVDLLFKTNRKVTVKQLKEDYFKKIECFDSVEISGVEDRFNASLGTYHDLLKIIKDKDFLDNEENEDILEDIVLTLTLFEDREMIEERLKTYAHLFDDKVMKQLKRRRYTGWGRLSRKLINGIRDKQSGKTILDFLKSDGFANRNFMQLIHDDSLTFKEDIQKAQVSGQGDSLHEHIANLAGSPAIKKGILQTVKVVDELVKVMGRHKPENIVIEMARENQTTQKGQKNSRERMKRIEEGIKELGSQILKEHPVENTQLQNEKLYLYYLQNGRDMYVDQELDINRLSDYDVDHIVPQSFLKDDSIDNKVLTRSDKARGKSDNVPSEEVVKKMKNYWRQLLNAKLITQRKFDNLTKAERGGLSELDKAGFIKRQLVETRQITKHVAQILDSRMNTKYDENDKLIREVKVITLKSKLVSDFRKDFQFYKVREINNYHHAHDAYLNAVVGTALIKKYPKLESEFVYGDYKVYDVRKMIAKSEQEIGKATAKYFFYSNIMNFFKTEITLANGEIRKRPLIETNGETGEIVWDKGRDFATVRKVLSMPQVNIVKKTEVQTGGFSKESILPKRNSDKLIARKKDWDPKKYGGFDSPTVAYSVLVVAKVEKGKSKKLKSVKELLGITIMERSSFEKNPIDFLEAKGYKEVKKDLIIKLPKYSLFELENGRKRMLASAGELQKGNELALPSKYVNFLYLASHYEKLKGSPEDNEQKQLFVEQHKHYLDEIIEQISEFSKRVILADANLDKVLSAYNKHRDKPIREQAENIIHLFTLTNLGAPAAFKYFDTTIDRKRYTSTKEVLDATLIHQSITGLYETRIDLSQLGGDGGEAAAKGGGGSEAAAKGGTLNIEDEHRLHETSKEPDVSLGSTWLSDFPQAWAETGGMGLAVRQAPLIIPLKATSTPVSIKQYPMSQEARLGIKPHIQRLLDQGILVPCQSPWNTPLLPVKKPGTNDYRPVQDLREVNKRVEDIHPTVPNPYNLLSGLPPSHQWYTVLDLKDAFFCLRLHPTSQPLFAFEWRDPEMGISGQLTWTRLPQGFKNSPTLFNEALHRDLADFRIQHPDLILLQYVDDLLLAATSELDCQQGTRALLQTLGNLGYRASAKKAQICQKQVKYLGYLLKEGQRWLTEARKETVMGQPTPKTPRQLREFLGKAGFCRLFIPGFAEMAAPLYPLTKPGTLFNWGPDQQKAYQEIKQALLTAPALGLPDLTKPFELFVDEKQGYAKGVLTQKLGPWRRPVAYLSKKLDPVAAGWPPCLRMVAAIAVLTKDAGKLTMGQPLVILAPHAVEALVKQPPDRWLSNARMTHYQALLLDTDRVQFGPVVALNPATLLPLPEEGLQHNCLDILAEAHGTRPDLTDQPLPDADHTWYTDGSSLLQEGQRKAGAAVTTETEVIWAKALPAGTSAQRAELIALTQALKMAEGKKLNVYTDSRYAFATAHIHGEIYRRRGWLTSEGKEIKNKDEILALLKALFLPKRLSIIHCPGHQKGHSAEARGNRMADQAARKAAITETPDTSTLLAGKRTADGSEFEKRTADGSEFESPKKKAKVE

SEQ ID NO: 2789 - protein, 2096 aa, synthetic construct
MPAAKRVKLDGGDKKYSIGLDIGTNSVGWAVITDEYKVPSKKFKVLGNTDRHSIKKNLIGALLFDSGETAEATRLKRTARRRYTRRKNRICYLQEIFSNEMAKVDDSFFHRLEESFLVEEDKKHERHPIFGNIVDEVAYHEKYPTIYHLRKKLVDSTDKADLRLIYLALAHMIKFRGHFLIEGDLNPDNSDVDKLFIQLVQTYNQLFEENPINASGVDAKAILSARLSKSRRLENLIAQLPGEKKNGLFGNLIALSLGLTPNFKSNFDLAEDAKLQLSKDTYDDDLDNLLAQIGDQYADLFLAAKNLSDAILLSDILRVNTEITKAPLSASMIKRYDEHHQDLTLLKALVRQQLPEKYKEIFFDQSKNGYAGYIDGGASQEEFYKFIKPILEKMDGTEELLVKLNREDLLRKQRTFDNGSIPHQIHLGELHAILRRQEDFYPFLKDNREKIEKILTFRIPYYVGPLARGNSRFAWMTRKSEETITPWNFEEVVDKGASAQSFIERMTNFDKNLPNEKVLPKHSLLYEYFTVYNELTKVKYVTEGMRKPAFLSGEQKKAIVDLLFKTNRKVTVKQLKEDYFKKIECFDSVEISGVEDRFNASLGTYHDLLKIIKDKDFLDNEENEDILEDIVLTLTLFEDREMIEERLKTYAHLFDDKVMKQLKRRRYTGWGRLSRKLINGIRDKQSGKTILDFLKSDGFANRNFMQLIHDDSLTFKEDIQKAQVSGQGDSLHEHIANLAGSPAIKKGILQTVKVVDELVKVMGRHKPENIVIEMARENQTTQKGQKNSRERMKRIEEGIKELGSQILKEHPVENTQLQNEKLYLYYLQNGRDMYVDQELDINRLSDYDVDHIVPQSFLKDDSIDNKVLTRSDKARGKSDNVPSEEVVKKMKNYWRQLLNAKLITQRKFDNLTKAERGGLSELDKAGFIKRQLVETRQITKHVAQILDSRMNTKYDENDKLIREVKVITLKSKLVSDFRKDFQFYKVREINNYHHAHDAYLNAVVGTALIKKYPKLESEFVYGDYKVYDVRKMIAKSEQEIGKATAKYFFYSNIMNFFKTEITLANGEIRKRPLIETNGETGEIVWDKGRDFATVRKVLSMPQVNIVKKTEVQTGGFSKESILPKRNSDKLIARKKDWDPKKYGGFDSPTVAYSVLVVAKVEKGKSKKLKSVKELLGITIMERSSFEKNPIDFLEAKGYKEVKKDLIIKLPKYSLFELENGRKRMLASAGELQKGNELALPSKYVNFLYLASHYEKLKGSPEDNEQKQLFVEQHKHYLDEIIEQISEFSKRVILADANLDKVLSAYNKHRDKPIREQAENIIHLFTLTNLGAPAAFKYFDTTIDRKRYTSTKEVLDATLIHQSITGLYETRIDLSQLGGDGGEAAAKGGGGSSGGTLNIEDEHRLHETSKEPDVSLGSTWLSDFPQAWAETGGMGLAVRQAPLIIPLKATSTPVSIKQYPMSQEARLGIKPHIQRLLDQGILVPCQSPWNTPLLPVKKPGTNDYRPVQDLREVNKRVEDIHPTVPNPYNLLSGLPPSHQWYTVLDLKDAFFCLRLHPTSQPLFAFEWRDPEMGISGQLTWTRLPQGFKNSPTLFNEALHRDLADFRIQHPDLILLQYVDDLLLAATSELDCQQGTRALLQTLGNLGYRASAKKAQICQKQVKYLGYLLKEGQRWLTEARKETVMGQPTPKTPRQLREFLGKAGFCRLFIPGFAEMAAPLYPLTKPGTLFNWGPDQQKAYQEIKQALLTAPALGLPDLTKPFELFVDEKQGYAKGVLTQKLGPWRRPVAYLSKKLDPVAAGWPPCLRMVAAIAVLTKDAGKLTMGQPLVILAPHAVEALVKQPPDRWLSNARMTHYQALLLDTDRVQFGPVVALNPATLLPLPEEGLQHNCLDILAEAHGTRPDLTDQPLPDADHTWYTDGSSLLQEGQRKAGAAVTTETEVIWAKALPAGTSAQRAELIALTQALKMAEGKKLNVYTDSRYAFATAHIHGEIYRRRGWLTSEGKEIKNKDEILALLKALFLPKRLSIIHCPGHQKGHSAEARGNRMADQAARKAAITETPDTSTLLAGKRTADGSEFEKRTADGSEFESPKKKAKVE

SEQ ID NO: 2790 - protein, 2092 aa, synthetic construct
MPAAKRVKLDGGDKKYSIGLDIGTNSVGWAVITDEYKVPSKKFKVLGNTDRHSIKKNLIGALLFDSGETAEATRLKRTARRRYTRRKNRICYLQEIFSNEMAKVDDSFFHRLEESFLVEEDKKHERHPIFGNIVDEVAYHEKYPTIYHLRKKLVDSTDKADLRLIYLALAHMIKFRGHFLIEGDLNPDNSDVDKLFIQLVQTYNQLFEENPINASGVDAKAILSARLSKSRRLENLIAQLPGEKKNGLFGNLIALSLGLTPNFKSNFDLAEDAKLQLSKDTYDDDLDNLLAQIGDQYADLFLAAKNLSDAILLSDILRVNTEITKAPLSASMIKRYDEHHQDLTLLKALVRQQLPEKYKEIFFDQSKNGYAGYIDGGASQEEFYKFIKPILEKMDGTEELLVKLNREDLLRKQRTFDNGSIPHQIHLGELHAILRRQEDFYPFLKDNREKIEKILTFRIPYYVGPLARGNSRFAWMTRKSEETITPWNFEEVVDKGASAQSFIERMTNFDKNLPNEKVLPKHSLLYEYFTVYNELTKVKYVTEGMRKPAFLSGEQKKAIVDLLFKTNRKVTVKQLKEDYFKKIECFDSVEISGVEDRFNASLGTYHDLLKIIKDKDFLDNEENEDILEDIVLTLTLFEDREMIEERLKTYAHLFDDKVMKQLKRRRYTGWGRLSRKLINGIRDKQSGKTILDFLKSDGFANRNFMQLIHDDSLTFKEDIQKAQVSGQGDSLHEHIANLAGSPAIKKGILQTVKVVDELVKVMGRHKPENIVIEMARENQTTQKGQKNSRERMKRIEEGIKELGSQILKEHPVENTQLQNEKLYLYYLQNGRDMYVDQELDINRLSDYDVDHIVPQSFLKDDSIDNKVLTRSDKARGKSDNVPSEEVVKKMKNYWRQLLNAKLITQRKFDNLTKAERGGLSELDKAGFIKRQLVETRQITKHVAQILDSRMNTKYDENDKLIREVKVITLKSKLVSDFRKDFQFYKVREINNYHHAHDAYLNAVVGTALIKKYPKLESEFVYGDYKVYDVRKMIAKSEQEIGKATAKYFFYSNIMNFFKTEITLANGEIRKRPLIETNGETGEIVWDKGRDFATVRKVLSMPQVNIVKKTEVQTGGFSKESILPKRNSDKLIARKKDWDPKKYGGFDSPTVAYSVLVVAKVEKGKSKKLKSVKELLGITIMERSSFEKNPIDFLEAKGYKEVKKDLIIKLPKYSLFELENGRKRMLASAGELQKGNELALPSKYVNFLYLASHYEKLKGSPEDNEQKQLFVEQHKHYLDEIIEQISEFSKRVILADANLDKVLSAYNKHRDKPIREQAENIIHLFTLTNLGAPAAFKYFDTTIDRKRYTSTKEVLDATLIHQSITGLYETRIDLSQLGGDGGGGGGGGGGGTLNIEDEHRLHETSKEPDVSLGSTWLSDFPQAWAETGGMGLAVRQAPLIIPLKATSTPVSIKQYPMSQEARLGIKPHIQRLLDQGILVPCQSPWNTPLLPVKKPGTNDYRPVQDLREVNKRVEDIHPTVPNPYNLLSGLPPSHQWYTVLDLKDAFFCLRLHPTSQPLFAFEWRDPEMGISGQLTWTRLPQGFKNSPTLFNEALHRDLADFRIQHPDLILLQYVDDLLLAATSELDCQQGTRALLQTLGNLGYRASAKKAQICQKQVKYLGYLLKEGQRWLTEARKETVMGQPTPKTPRQLREFLGKAGFCRLFIPGFAEMAAPLYPLTKPGTLFNWGPDQQKAYQEIKQALLTAPALGLPDLTKPFELFVDEKQGYAKGVLTQKLGPWRRPVAYLSKKLDPVAAGWPPCLRMVAAIAVLTKDAGKLTMGQPLVILAPHAVEALVKQPPDRWLSNARMTHYQALLLDTDRVQFGPVVALNPATLLPLPEEGLQHNCLDILAEAHGTRPDLTDQPLPDADHTWYTDGSSLLQEGQRKAGAAVTTETEVIWAKALPAGTSAQRAELIALTQALKMAEGKKLNVYTDSRYAFATAHIHGEIYRRRGWLTSEGKEIKNKDEILALLKALFLPKRLSIIHCPGHQKGHSAEARGNRMADQAARKAAITETPDTSTLLAGKRTADGSEFEKRTADGSEFESPKKKAKVE

SEQ ID NO: 2791 - protein, 2100 aa, synthetic construct
MPAAKRVKLDGGDKKYSIGLDIGTNSVGWAVITDEYKVPSKKFKVLGNTDRHSIKKNLIGALLFDSGETAEATRLKRTARRRYTRRKNRICYLQEIFSNEMAKVDDSFFHRLEESFLVEEDKKHERHPIFGNIVDEVAYHEKYPTIYHLRKKLVDSTDKADLRLIYLALAHMIKFRGHFLIEGDLNPDNSDVDKLFIQLVQTYNQLFEENPINASGVDAKAILSARLSKSRRLENLIAQLPGEKKNGLFGNLIALSLGLTPNFKSNFDLAEDAKLQLSKDTYDDDLDNLLAQIGDQYADLFLAAKNLSDAILLSDILRVNTEITKAPLSASMIKRYDEHHQDLTLLKALVRQQLPEKYKEIFFDQSKNGYAGYIDGGASQEEFYKFIKPILEKMDGTEELLVKLNREDLLRKQRTFDNGSIPHQIHLGELHAILRRQEDFYPFLKDNREKIEKILTFRIPYYVGPLARGNSRFAWMTRKSEETITPWNFEEVVDKGASAQSFIERMTNFDKNLPNEKVLPKHSLLYEYFTVYNELTKVKYVTEGMRKPAFLSGEQKKAIVDLLFKTNRKVTVKQLKEDYFKKIECFDSVEISGVEDRFNASLGTYHDLLKIIKDKDFLDNEENEDILEDIVLTLTLFEDREMIEERLKTYAHLFDDKVMKQLKRRRYTGWGRLSRKLINGIRDKQSGKTILDFLKSDGFANRNFMQLIHDDSLTFKEDIQKAQVSGQGDSLHEHIANLAGSPAIKKGILQTVKVVDELVKVMGRHKPENIVIEMARENQTTQKGQKNSRERMKRIEEGIKELGSQILKEHPVENTQLQNEKLYLYYLQNGRDMYVDQELDINRLSDYDVDHIVPQSFLKDDSIDNKVLTRSDKARGKSDNVPSEEVVKKMKNYWRQLLNAKLITQRKFDNLTKAERGGLSELDKAGFIKRQLVETRQITKHVAQILDSRMNTKYDENDKLIREVKVITLKSKLVSDFRKDFQFYKVREINNYHHAHDAYLNAVVGTALIKKYPKLESEFVYGDYKVYDVRKMIAKSEQEIGKATAKYFFYSNIMNFFKTEITLANGEIRKRPLIETNGETGEIVWDKGRDFATVRKVLSMPQVNIVKKTEVQTGGFSKESILPKRNSDKLIARKKDWDPKKYGGFDSPTVAYSVLVVAKVEKGKSKKLKSVKELLGITIMERSSFEKNPIDFLEAKGYKEVKKDLIIKLPKYSLFELENGRKRMLASAGELQKGNELALPSKYVNFLYLASHYEKLKGSPEDNEQKQLFVEQHKHYLDEIIEQISEFSKRVILADANLDKVLSAYNKHRDKPIREQAENIIHLFTLTNLGAPAAFKYFDTTIDRKRYTSTKEVLDATLIHQSITGLYETRIDLSQLGGDGGEAAAKEAAAKEAAAKGGTLNIEDEHRLHETSKEPDVSLGSTWLSDFPQAWAETGGMGLAVRQAPLIIPLKATSTPVSIKQYPMSQEARLGIKPHIQRLLDQGILVPCQSPWNTPLLPVKKPGTNDYRPVQDLREVNKRVEDIHPTVPNPYNLLSGLPPSHQWYTVLDLKDAFFCLRLHPTSQPLFAFEWRDPEMGISGQLTWTRLPQGFKNSPTLFNEALHRDLADFRIQHPDLILLQYVDDLLLAATSELDCQQGTRALLQTLGNLGYRASAKKAQICQKQVKYLGYLLKEGQRWLTEARKETVMGQPTPKTPRQLREFLGKAGFCRLFIPGFAEMAAPLYPLTKPGTLFNWGPDQQKAYQEIKQALLTAPALGLPDLTKPFELFVDEKQGYAKGVLTQKLGPWRRPVAYLSKKLDPVAAGWPPCLRMVAAIAVLTKDAGKLTMGQPLVILAPHAVEALVKQPPDRWLSNARMTHYQALLLDTDRVQFGPVVALNPATLLPLPEEGLQHNCLDILAEAHGTRPDLTDQPLPDADHTWYTDGSSLLQEGQRKAGAAVTTETEVIWAKALPAGTSAQRAELIALTQALKMAEGKKLNVYTDSRYAFATAHIHGEIYRRRGWLTSEGKEIKNKDEILALLKALFLPKRLSIIHCPGHQKGHSAEARGNRMADQAARKAAITETPDTSTLLAGKRTADGSEFEKRTADGSEFESPKKKAKVE

SEQ ID NO: 2792 - protein, 2096 aa, synthetic construct
MPAAKRVKLDGGDKKYSIGLDIGTNSVGWAVITDEYKVPSKKFKVLGNTDRHSIKKNLIGALLFDSGETAEATRLKRTARRRYTRRKNRICYLQEIFSNEMAKVDDSFFHRLEESFLVEEDKKHERHPIFGNIVDEVAYHEKYPTIYHLRKKLVDSTDKADLRLIYLALAHMIKFRGHFLIEGDLNPDNSDVDKLFIQLVQTYNQLFEENPINASGVDAKAILSARLSKSRRLENLIAQLPGEKKNGLFGNLIALSLGLTPNFKSNFDLAEDAKLQLSKDTYDDDLDNLLAQIGDQYADLFLAAKNLSDAILLSDILRVNTEITKAPLSASMIKRYDEHHQDLTLLKALVRQQLPEKYKEIFFDQSKNGYAGYIDGGASQEEFYKFIKPILEKMDGTEELLVKLNREDLLRKQRTFDNGSIPHQIHLGELHAILRRQEDFYPFLKDNREKIEKILTFRIPYYVGPLARGNSRFAWMTRKSEETITPWNFEEVVDKGASAQSFIERMTNFDKNLPNEKVLPKHSLLYEYFTVYNELTKVKYVTEGMRKPAFLSGEQKKAIVDLLFKTNRKVTVKQLKEDYFKKIECFDSVEISGVEDRFNASLGTYHDLLKIIKDKDFLDNEENEDILEDIVLTLTLFEDREMIEERLKTYAHLFDDKVMKQLKRRRYTGWGRLSRKLINGIRDKQSGKTILDFLKSDGFANRNFMQLIHDDSLTFKEDIQKAQVSGQGDSLHEHIANLAGSPAIKKGILQTVKVVDELVKVMGRHKPENIVIEMARENQTTQKGQKNSRERMKRIEEGIKELGSQILKEHPVENTQLQNEKLYLYYLQNGRDMYVDQELDINRLSDYDVDHIVPQSFLKDDSIDNKVLTRSDKARGKSDNVPSEEVVKKMKNYWRQLLNAKLITQRKFDNLTKAERGGLSELDKAGFIKRQLVETRQITKHVAQILDSRMNTKYDENDKLIREVKVITLKSKLVSDFRKDFQFYKVREINNYHHAHDAYLNAVVGTALIKKYPKLESEFVYGDYKVYDVRKMIAKSEQEIGKATAKYFFYSNIMNFFKTEITLANGEIRKRPLIETNGETGEIVWDKGRDFATVRKVLSMPQVNIVKKTEVQTGGFSKESILPKRNSDKLIARKKDWDPKKYGGFDSPTVAYSVLVVAKVEKGKSKKLKSVKELLGITIMERSSFEKNPIDFLEAKGYKEVKKDLIIKLPKYSLFELENGRKRMLASAGELQKGNELALPSKYVNFLYLASHYEKLKGSPEDNEQKQLFVEQHKHYLDEIIEQISEFSKRVILADANLDKVLSAYNKHRDKPIREQAENIIHLFTLTNLGAPAAFKYFDTTIDRKRYTSTKEVLDATLIHQSITGLYETRIDLSQLGGDGGEAAAKGSSPAPGGTLNIEDEHRLHETSKEPDVSLGSTWLSDFPQAWAETGGMGLAVRQAPLIIPLKATSTPVSIKQYPMSQEARLGIKPHIQRLLDQGILVPCQSPWNTPLLPVKKPGTNDYRPVQDLREVNKRVEDIHPTVPNPYNLLSGLPPSHQWYTVLDLKDAFFCLRLHPTSQPLFAFEWRDPEMGISGQLTWTRLPQGFKNSPTLFNEALHRDLADFRIQHPDLILLQYVDDLLLAATSELDCQQGTRALLQTLGNLGYRASAKKAQICQKQVKYLGYLLKEGQRWLTEARKETVMGQPTPKTPRQLREFLGKAGFCRLFIPGFAEMAAPLYPLTKPGTLFNWGPDQQKAYQEIKQALLTAPALGLPDLTKPFELFVDEKQGYAKGVLTQKLGPWRRPVAYLSKKLDPVAAGWPPCLRMVAAIAVLTKDAGKLTMGQPLVILAPHAVEALVKQPPDRWLSNARMTHYQALLLDTDRVQFGPVVALNPATLLPLPEEGLQHNCLDILAEAHGTRPDLTDQPLPDADHTWYTDGSSLLQEGQRKAGAAVTTETEVIWAKALPAGTSAQRAELIALTQALKMAEGKKLNVYTDSRYAFATAHIHGEIYRRRGWLTSEGKEIKNKDEILALLKALFLPKRLSIIHCPGHQKGHSAEARGNRMADQAARKAAITETPDTSTLLAGKRTADGSEFEKRTADGSEFESPKKKAKVE

SEQ ID NO: 2793 - protein, 2094 aa, synthetic construct
MPAAKRVKLDGGDKKYSIGLDIGTNSVGWAVITDEYKVPSKKFKVLGNTDRHSIKKNLIGALLFDSGETAEATRLKRTARRRYTRRKNRICYLQEIFSNEMAKVDDSFFHRLEESFLVEEDKKHERHPIFGNIVDEVAYHEKYPTIYHLRKKLVDSTDKADLRLIYLALAHMIKFRGHFLIEGDLNPDNSDVDKLFIQLVQTYNQLFEENPINASGVDAKAILSARLSKSRRLENLIAQLPGEKKNGLFGNLIALSLGLTPNFKSNFDLAEDAKLQLSKDTYDDDLDNLLAQIGDQYADLFLAAKNLSDAILLSDILRVNTEITKAPLSASMIKRYDEHHQDLTLLKALVRQQLPEKYKEIFFDQSKNGYAGYIDGGASQEEFYKFIKPILEKMDGTEELLVKLNREDLLRKQRTFDNGSIPHQIHLGELHAILRRQEDFYPFLKDNREKIEKILTFRIPYYVGPLARGNSRFAWMTRKSEETITPWNFEEVVDKGASAQSFIERMTNFDKNLPNEKVLPKHSLLYEYFTVYNELTKVKYVTEGMRKPAFLSGEQKKAIVDLLFKTNRKVTVKQLKEDYFKKIECFDSVEISGVEDRFNASLGTYHDLLKIIKDKDFLDNEENEDILEDIVLTLTLFEDREMIEERLKTYAHLFDDKVMKQLKRRRYTGWGRLSRKLINGIRDKQSGKTILDFLKSDGFANRNFMQLIHDDSLTFKEDIQKAQVSGQGDSLHEHIANLAGSPAIKKGILQTVKVVDELVKVMGRHKPENIVIEMARENQTTQKGQKNSRERMKRIEEGIKELGSQILKEHPVENTQLQNEKLYLYYLQNGRDMYVDQELDINRLSDYDVDHIVPQSFLKDDSIDNKVLTRSDKARGKSDNVPSEEVVKKMKNYWRQLLNAKLITQRKFDNLTKAERGGLSELDKAGFIKRQLVETRQITKHVAQILDSRMNTKYDENDKLIREVKVITLKSKLVSDFRKDFQFYKVREINNYHHAHDAYLNAVVGTALIKKYPKLESEFVYGDYKVYDVRKMIAKSEQEIGKATAKYFFYSNIMNFFKTEITLANGEIRKRPLIETNGETGEIVWDKGRDFATVRKVLSMPQVNIVKKTEVQTGGFSKESILPKRNSDKLIARKKDWDPKKYGGFDSPTVAYSVLVVAKVEKGKSKKLKSVKELLGITIMERSSFEKNPIDFLEAKGYKEVKKDLIIKLPKYSLFELENGRKRMLASAGELQKGNELALPSKYVNFLYLASHYEKLKGSPEDNEQKQLFVEQHKHYLDEIIEQISEFSKRVILADANLDKVLSAYNKHRDKPIREQAENIIHLFTLTNLGAPAAFKYFDTTIDRKRYTSTKEVLDATLIHQSITGLYETRIDLSQLGGDGGPAPGGGGSSGGTLNIEDEHRLHETSKEPDVSLGSTWLSDFPQAWAETGGMGLAVRQAPLIIPLKATSTPVSIKQYPMSQEARLGIKPHIQRLLDQGILVPCQSPWNTPLLPVKKPGTNDYRPVQDLREVNKRVEDIHPTVPNPYNLLSGLPPSHQWYTVLDLKDAFFCLRLHPTSQPLFAFEWRDPEMGISGQLTWTRLPQGFKNSPTLFNEALHRDLADFRIQHPDLILLQYVDDLLLAATSELDCQQGTRALLQTLGNLGYRASAKKAQICQKQVKYLGYLLKEGQRWLTEARKETVMGQPTPKTPRQLREFLGKAGFCRLFIPGFAEMAAPLYPLTKPGTLFNWGPDQQKAYQEIKQALLTAPALGLPDLTKPFELFVDEKQGYAKGVLTQKLGPWRRPVAYLSKKLDPVAAGWPPCLRMVAAIAVLTKDAGKLTMGQPLVILAPHAVEALVKQPPDRWLSNARMTHYQALLLDTDRVQFGPVVALNPATLLPLPEEGLQHNCLDILAEAHGTRPDLTDQPLPDADHTWYTDGSSLLQEGQRKAGAAVTTETEVIWAKALPAGTSAQRAELIALTQALKMAEGKKLNVYTDSRYAFATAHIHGEIYRRRGWLTSEGKEIKNKDEILALLKALFLPKRLSIIHCPGHQKGHSAEARGNRMADQAARKAAITETPDTSTLLAGKRTADGSEFEKRTADGSEFESPKKKAKVE

SEQ ID NO: 2794 - protein, 2096 aa, synthetic construct
MPAAKRVKLDGGDKKYSIGLDIGTNSVGWAVITDEYKVPSKKFKVLGNTDRHSIKKNLIGALLFDSGETAEATRLKRTARRRYTRRKNRICYLQEIFSNEMAKVDDSFFHRLEESFLVEEDKKHERHPIFGNIVDEVAYHEKYPTIYHLRKKLVDSTDKADLRLIYLALAHMIKFRGHFLIEGDLNPDNSDVDKLFIQLVQTYNQLFEENPINASGVDAKAILSARLSKSRRLENLIAQLPGEKKNGLFGNLIALSLGLTPNFKSNFDLAEDAKLQLSKDTYDDDLDNLLAQIGDQYADLFLAAKNLSDAILLSDILRVNTEITKAPLSASMIKRYDEHHQDLTLLKALVRQQLPEKYKEIFFDQSKNGYAGYIDGGASQEEFYKFIKPILEKMDGTEELLVKLNREDLLRKQRTFDNGSIPHQIHLGELHAILRRQEDFYPFLKDNREKIEKILTFRIPYYVGPLARGNSRFAWMTRKSEETITPWNFEEVVDKGASAQSFIERMTNFDKNLPNEKVLPKHSLLYEYFTVYNELTKVKYVTEGMRKPAFLSGEQKKAIVDLLFKTNRKVTVKQLKEDYFKKIECFDSVEISGVEDRFNASLGTYHDLLKIIKDKDFLDNEENEDILEDIVLTLTLFEDREMIEERLKTYAHLFDDKVMKQLKRRRYTGWGRLSRKLINGIRDKQSGKTILDFLKSDGFANRNFMQLIHDDSLTFKEDIQKAQVSGQGDSLHEHIANLAGSPAIKKGILQTVKVVDELVKVMGRHKPENIVIEMARENQTTQKGQKNSRERMKRIEEGIKELGSQILKEHPVENTQLQNEKLYLYYLQNGRDMYVDQELDINRLSDYDVDHIVPQSFLKDDSIDNKVLTRSDKARGKSDNVPSEEVVKKMKNYWRQLLNAKLITQRKFDNLTKAERGGLSELDKAGFIKRQLVETRQITKHVAQILDSRMNTKYDENDKLIREVKVITLKSKLVSDFRKDFQFYKVREINNYHHAHDAYLNAVVGTALIKKYPKLESEFVYGDYKVYDVRKMIAKSEQEIGKATAKYFFYSNIMNFFKTEITLANGEIRKRPLIETNGETGEIVWDKGRDFATVRKVLSMPQVNIVKKTEVQTGGFSKESILPKRNSDKLIARKKDWDPKKYGGFDSPTVAYSVLVVAKVEKGKSKKLKSVKELLGITIMERSSFEKNPIDFLEAKGYKEVKKDLIIKLPKYSLFELENGRKRMLASAGELQKGNELALPSKYVNFLYLASHYEKLKGSPEDNEQKQLFVEQHKHYLDEIIEQISEFSKRVILADANLDKVLSAYNKHRDKPIREQAENIIHLFTLTNLGAPAAFKYFDTTIDRKRYTSTKEVLDATLIHQSITGLYETRIDLSQLGGDGGEAAAKGGSGGGGGTLNIEDEHRLHETSKEPDVSLGSTWLSDFPQAWAETGGMGLAVRQAPLIIPLKATSTPVSIKQYPMSQEARLGIKPHIQRLLDQGILVPCQSPWNTPLLPVKKPGTNDYRPVQDLREVNKRVEDIHPTVPNPYNLLSGLPPSHQWYTVLDLKDAFFCLRLHPTSQPLFAFEWRDPEMGISGQLTWTRLPQGFKNSPTLFNEALHRDLADFRIQHPDLILLQYVDDLLLAATSELDCQQGTRALLQTLGNLGYRASAKKAQICQKQVKYLGYLLKEGQRWLTEARKETVMGQPTPKTPRQLREFLGKAGFCRLFIPGFAEMAAPLYPLTKPGTLFNWGPDQQKAYQEIKQALLTAPALGLPDLTKPFELFVDEKQGYAKGVLTQKLGPWRRPVAYLSKKLDPVAAGWPPCLRMVAAIAVLTKDAGKLTMGQPLVILAPHAVEALVKQPPDRWLSNARMTHYQALLLDTDRVQFGPVVALNPATLLPLPEEGLQHNCLDILAEAHGTRPDLTDQPLPDADHTWYTDGSSLLQEGQRKAGAAVTTETEVIWAKALPAGTSAQRAELIALTQALKMAEGKKLNVYTDSRYAFATAHIHGEIYRRRGWLTSEGKEIKNKDEILALLKALFLPKRLSIIHCPGHQKGHSAEARGNRMADQAARKAAITETPDTSTLLAGKRTADGSEFEKRTADGSEFESPKKKAKVE

SEQ ID NO: 2795 - protein, 2097 aa, synthetic construct
MPAAKRVKLDGGDKKYSIGLDIGTNSVGWAVITDEYKVPSKKFKVLGNTDRHSIKKNLIGALLFDSGETAEATRLKRTARRRYTRRKNRICYLQEIFSNEMAKVDDSFFHRLEESFLVEEDKKHERHPIFGNIVDEVAYHEKYPTIYHLRKKLVDSTDKADLRLIYLALAHMIKFRGHFLIEGDLNPDNSDVDKLFIQLVQTYNQLFEENPINASGVDAKAILSARLSKSRRLENLIAQLPGEKKNGLFGNLIALSLGLTPNFKSNFDLAEDAKLQLSKDTYDDDLDNLLAQIGDQYADLFLAAKNLSDAILLSDILRVNTEITKAPLSASMIKRYDEHHQDLTLLKALVRQQLPEKYKEIFFDQSKNGYAGYIDGGASQEEFYKFIKPILEKMDGTEELLVKLNREDLLRKQRTFDNGSIPHQIHLGELHAILRRQEDFYPFLKDNREKIEKILTFRIPYYVGPLARGNSRFAWMTRKSEETITPWNFEEVVDKGASAQSFIERMTNFDKNLPNEKVLPKHSLLYEYFTVYNELTKVKYVTEGMRKPAFLSGEQKKAIVDLLFKTNRKVTVKQLKEDYFKKIECFDSVEISGVEDRFNASLGTYHDLLKIIKDKDFLDNEENEDILEDIVLTLTLFEDREMIEERLKTYAHLFDDKVMKQLKRRRYTGWGRLSRKLINGIRDKQSGKTILDFLKSDGFANRNFMQLIHDDSLTFKEDIQKAQVSGQGDSLHEHIANLAGSPAIKKGILQTVKVVDELVKVMGRHKPENIVIEMARENQTTQKGQKNSRERMKRIEEGIKELGSQILKEHPVENTQLQNEKLYLYYLQNGRDMYVDQELDINRLSDYDVDHIVPQSFLKDDSIDNKVLTRSDKARGKSDNVPSEEVVKKMKNYWRQLLNAKLITQRKFDNLTKAERGGLSELDKAGFIKRQLVETRQITKHVAQILDSRMNTKYDENDKLIREVKVITLKSKLVSDFRKDFQFYKVREINNYHHAHDAYLNAVVGTALIKKYPKLESEFVYGDYKVYDVRKMIAKSEQEIGKATAKYFFYSNIMNFFKTEITLANGEIRKRPLIETNGETGEIVWDKGRDFATVRKVLSMPQVNIVKKTEVQTGGFSKESILPKRNSDKLIARKKDWDPKKYGGFDSPTVAYSVLVVAKVEKGKSKKLKSVKELLGITIMERSSFEKNPIDFLEAKGYKEVKKDLIIKLPKYSLFELENGRKRMLASAGELQKGNELALPSKYVNFLYLASHYEKLKGSPEDNEQKQLFVEQHKHYLDEIIEQISEFSKRVILADANLDKVLSAYNKHRDKPIREQAENIIHLFTLTNLGAPAAFKYFDTTIDRKRYTSTKEVLDATLIHQSITGLYETRIDLSQLGGDGGGGSGGSGGSGGSGGTLNIEDEHRLHETSKEPDVSLGSTWLSDFPQAWAETGGMGLAVRQAPLIIPLKATSTPVSIKQYPMSQEARLGIKPHIQRLLDQGILVPCQSPWNTPLLPVKKPGTNDYRPVQDLREVNKRVEDIHPTVPNPYNLLSGLPPSHQWYTVLDLKDAFFCLRLHPTSQPLFAFEWRDPEMGISGQLTWTRLPQGFKNSPTLFNEALHRDLADFRIQHPDLILLQYVDDLLLAATSELDCQQGTRALLQTLGNLGYRASAKKAQICQKQVKYLGYLLKEGQRWLTEARKETVMGQPTPKTPRQLREFLGKAGFCRLFIPGFAEMAAPLYPLTKPGTLFNWGPDQQKAYQEIKQALLTAPALGLPDLTKPFELFVDEKQGYAKGVLTQKLGPWRRPVAYLSKKLDPVAAGWPPCLRMVAAIAVLTKDAGKLTMGQPLVILAPHAVEALVKQPPDRWLSNARMTHYQALLLDTDRVQFGPVVALNPATLLPLPEEGLQHNCLDILAEAHGTRPDLTDQPLPDADHTWYTDGSSLLQEGQRKAGAAVTTETEVIWAKALPAGTSAQRAELIALTQALKMAEGKKLNVYTDSRYAFATAHIHGEIYRRRGWLTSEGKEIKNKDEILALLKALFLPKRLSIIHCPGHQKGHSAEARGNRMADQAARKAAITETPDTSTLLAGKRTADGSEFEKRTADGSEFESPKKKAKVE

SEQ ID NO: 2796 - protein, 2093 aa, synthetic construct
MPAAKRVKLDGGDKKYSIGLDIGTNSVGWAVITDEYKVPSKKFKVLGNTDRHSIKKNLIGALLFDSGETAEATRLKRTARRRYTRRKNRICYLQEIFSNEMAKVDDSFFHRLEESFLVEEDKKHERHPIFGNIVDEVAYHEKYPTIYHLRKKLVDSTDKADLRLIYLALAHMIKFRGHFLIEGDLNPDNSDVDKLFIQLVQTYNQLFEENPINASGVDAKAILSARLSKSRRLENLIAQLPGEKKNGLFGNLIALSLGLTPNFKSNFDLAEDAKLQLSKDTYDDDLDNLLAQIGDQYADLFLAAKNLSDAILLSDILRVNTEITKAPLSASMIKRYDEHHQDLTLLKALVRQQLPEKYKEIFFDQSKNGYAGYIDGGASQEEFYKFIKPILEKMDGTEELLVKLNREDLLRKQRTFDNGSIPHQIHLGELHAILRRQEDFYPFLKDNREKIEKILTFRIPYYVGPLARGNSRFAWMTRKSEETITPWNFEEVVDKGASAQSFIERMTNFDKNLPNEKVLPKHSLLYEYFTVYNELTKVKYVTEGMRKPAFLSGEQKKAIVDLLFKTNRKVTVKQLKEDYFKKIECFDSVEISGVEDRFNASLGTYHDLLKIIKDKDFLDNEENEDILEDIVLTLTLFEDREMIEERLKTYAHLFDDKVMKQLKRRRYTGWGRLSRKLINGIRDKQSGKTILDFLKSDGFANRNFMQLIHDDSLTFKEDIQKAQVSGQGDSLHEHIANLAGSPAIKKGILQTVKVVDELVKVMGRHKPENIVIEMARENQTTQKGQKNSRERMKRIEEGIKELGSQILKEHPVENTQLQNEKLYLYYLQNGRDMYVDQELDINRLSDYDVDHIVPQSFLKDDSIDNKVLTRSDKARGKSDNVPSEEVVKKMKNYWRQLLNAKLITQRKFDNLTKAERGGLSELDKAGFIKRQLVETRQITKHVAQILDSRMNTKYDENDKLIREVKVITLKSKLVSDFRKDFQFYKVREINNYHHAHDAYLNAVVGTALIKKYPKLESEFVYGDYKVYDVRKMIAKSEQEIGKATAKYFFYSNIMNFFKTEITLANGEIRKRPLIETNGETGEIVWDKGRDFATVRKVLSMPQVNIVKKTEVQTGGFSKESILPKRNSDKLIARKKDWDPKKYGGFDSPTVAYSVLVVAKVEKGKSKKLKSVKELLGITIMERSSFEKNPIDFLEAKGYKEVKKDLIIKLPKYSLFELENGRKRMLASAGELQKGNELALPSKYVNFLYLASHYEKLKGSPEDNEQKQLFVEQHKHYLDEIIEQISEFSKRVILADANLDKVLSAYNKHRDKPIREQAENIIHLFTLTNLGAPAAFKYFDTTIDRKRYTSTKEVLDATLIHQSITGLYETRIDLSQLGGDGGEAAAKGGGGGTLNIEDEHRLHETSKEPDVSLGSTWLSDFPQAWAETGGMGLAVRQAPLIIPLKATSTPVSIKQYPMSQEARLGIKPHIQRLLDQGILVPCQSPWNTPLLPVKKPGTNDYRPVQDLREVNKRVEDIHPTVPNPYNLLSGLPPSHQWYTVLDLKDAFFCLRLHPTSQPLFAFEWRDPEMGISGQLTWTRLPQGFKNSPTLFNEALHRDLADFRIQHPDLILLQYVDDLLLAATSELDCQQGTRALLQTLGNLGYRASAKKAQICQKQVKYLGYLLKEGQRWLTEARKETVMGQPTPKTPRQLREFLGKAGFCRLFIPGFAEMAAPLYPLTKPGTLFNWGPDQQKAYQEIKQALLTAPALGLPDLTKPFELFVDEKQGYAKGVLTQKLGPWRRPVAYLSKKLDPVAAGWPPCLRMVAAIAVLTKDAGKLTMGQPLVILAPHAVEALVKQPPDRWLSNARMTHYQALLLDTDRVQFGPVVALNPATLLPLPEEGLQHNCLDILAEAHGTRPDLTDQPLPDADHTWYTDGSSLLQEGQRKAGAAVTTETEVIWAKALPAGTSAQRAELIALTQALKMAEGKKLNVYTDSRYAFATAHIHGEIYRRRGWLTSEGKEIKNKDEILALLKALFLPKRLSIIHCPGHQKGHSAEARGNRMADQAARKAAITETPDTSTLLAGKRTADGSEFEKRTADGSEFESPKKKAKVE

SEQ ID NO: 2797 - protein, 2098 aa, synthetic construct
MPAAKRVKLDGGDKKYSIGLDIGTNSVGWAVITDEYKVPSKKFKVLGNTDRHSIKKNLIGALLFDSGETAEATRLKRTARRRYTRRKNRICYLQEIFSNEMAKVDDSFFHRLEESFLVEEDKKHERHPIFGNIVDEVAYHEKYPTIYHLRKKLVDSTDKADLRLIYLALAHMIKFRGHFLIEGDLNPDNSDVDKLFIQLVQTYNQLFEENPINASGVDAKAILSARLSKSRRLENLIAQLPGEKKNGLFGNLIALSLGLTPNFKSNFDLAEDAKLQLSKDTYDDDLDNLLAQIGDQYADLFLAAKNLSDAILLSDILRVNTEITKAPLSASMIKRYDEHHQDLTLLKALVRQQLPEKYKEIFFDQSKNGYAGYIDGGASQEEFYKFIKPILEKMDGTEELLVKLNREDLLRKQRTFDNGSIPHQIHLGELHAILRRQEDFYPFLKDNREKIEKILTFRIPYYVGPLARGNSRFAWMTRKSEETITPWNFEEVVDKGASAQSFIERMTNFDKNLPNEKVLPKHSLLYEYFTVYNELTKVKYVTEGMRKPAFLSGEQKKAIVDLLFKTNRKVTVKQLKEDYFKKIECFDSVEISGVEDRFNASLGTYHDLLKIIKDKDFLDNEENEDILEDIVLTLTLFEDREMIEERLKTYAHLFDDKVMKQLKRRRYTGWGRLSRKLINGIRDKQSGKTILDFLKSDGFANRNFMQLIHDDSLTFKEDIQKAQVSGQGDSLHEHIANLAGSPAIKKGILQTVKVVDELVKVMGRHKPENIVIEMARENQTTQKGQKNSRERMKRIEEGIKELGSQILKEHPVENTQLQNEKLYLYYLQNGRDMYVDQELDINRLSDYDVDHIVPQSFLKDDSIDNKVLTRSDKARGKSDNVPSEEVVKKMKNYWRQLLNAKLITQRKFDNLTKAERGGLSELDKAGFIKRQLVETRQITKHVAQILDSRMNTKYDENDKLIREVKVITLKSKLVSDFRKDFQFYKVREINNYHHAHDAYLNAVVGTALIKKYPKLESEFVYGDYKVYDVRKMIAKSEQEIGKATAKYFFYSNIMNFFKTEITLANGEIRKRPLIETNGETGEIVWDKGRDFATVRKVLSMPQVNIVKKTEVQTGGFSKESILPKRNSDKLIARKKDWDPKKYGGFDSPTVAYSVLVVAKVEKGKSKKLKSVKELLGITIMERSSFEKNPIDFLEAKGYKEVKKDLIIKLPKYSLFELENGRKRMLASAGELQKGNELALPSKYVNFLYLASHYEKLKGSPEDNEQKQLFVEQHKHYLDEIIEQISEFSKRVILADANLDKVLSAYNKHRDKPIREQAENIIHLFTLTNLGAPAAFKYFDTTIDRKRYTSTKEVLDATLIHQSITGLYETRIDLSQLGGDGGPAPAPAPAPAPAPGGTLNIEDEHRLHETSKEPDVSLGSTWLSDFPQAWAETGGMGLAVRQAPLIIPLKATSTPVSIKQYPMSQEARLGIKPHIQRLLDQGILVPCQSPWNTPLLPVKKPGTNDYRPVQDLREVNKRVEDIHPTVPNPYNLLSGLPPSHQWYTVLDLKDAFFCLRLHPTSQPLFAFEWRDPEMGISGQLTWTRLPQGFKNSPTLFNEALHRDLADFRIQHPDLILLQYVDDLLLAATSELDCQQGTRALLQTLGNLGYRASAKKAQICQKQVKYLGYLLKEGQRWLTEARKETVMGQPTPKTPRQLREFLGKAGFCRLFIPGFAEMAAPLYPLTKPGTLFNWGPDQQKAYQEIKQALLTAPALGLPDLTKPFELFVDEKQGYAKGVLTQKLGPWRRPVAYLSKKLDPVAAGWPPCLRMVAAIAVLTKDAGKLTMGQPLVILAPHAVEALVKQPPDRWLSNARMTHYQALLLDTDRVQFGPVVALNPATLLPLPEEGLQHNCLDILAEAHGTRPDLTDQPLPDADHTWYTDGSSLLQEGQRKAGAAVTTETEVIWAKALPAGTSAQRAELIALTQALKMAEGKKLNVYTDSRYAFATAHIHGEIYRRRGWLTSEGKEIKNKDEILALLKALFLPKRLSIIHCPGHQKGHSAEARGNRMADQAARKAAITETPDTSTLLAGKRTADGSEFEKRTADGSEFESPKKKAKVE

SEQ ID NO: 2798 - protein, 2096 aa, synthetic construct
MPAAKRVKLDGGDKKYSIGLDIGTNSVGWAVITDEYKVPSKKFKVLGNTDRHSIKKNLIGALLFDSGETAEATRLKRTARRRYTRRKNRICYLQEIFSNEMAKVDDSFFHRLEESFLVEEDKKHERHPIFGNIVDEVAYHEKYPTIYHLRKKLVDSTDKADLRLIYLALAHMIKFRGHFLIEGDLNPDNSDVDKLFIQLVQTYNQLFEENPINASGVDAKAILSARLSKSRRLENLIAQLPGEKKNGLFGNLIALSLGLTPNFKSNFDLAEDAKLQLSKDTYDDDLDNLLAQIGDQYADLFLAAKNLSDAILLSDILRVNTEITKAPLSASMIKRYDEHHQDLTLLKALVRQQLPEKYKEIFFDQSKNGYAGYIDGGASQEEFYKFIKPILEKMDGTEELLVKLNREDLLRKQRTFDNGSIPHQIHLGELHAILRRQEDFYPFLKDNREKIEKILTFRIPYYVGPLARGNSRFAWMTRKSEETITPWNFEEVVDKGASAQSFIERMTNFDKNLPNEKVLPKHSLLYEYFTVYNELTKVKYVTEGMRKPAFLSGEQKKAIVDLLFKTNRKVTVKQLKEDYFKKIECFDSVEISGVEDRFNASLGTYHDLLKIIKDKDFLDNEENEDILEDIVLTLTLFEDREMIEERLKTYAHLFDDKVMKQLKRRRYTGWGRLSRKLINGIRDKQSGKTILDFLKSDGFANRNFMQLIHDDSLTFKEDIQKAQVSGQGDSLHEHIANLAGSPAIKKGILQTVKVVDELVKVMGRHKPENIVIEMARENQTTQKGQKNSRERMKRIEEGIKELGSQILKEHPVENTQLQNEKLYLYYLQNGRDMYVDQELDINRLSDYDVDHIVPQSFLKDDSIDNKVLTRSDKARGKSDNVPSEEVVKKMKNYWRQLLNAKLITQRKFDNLTKAERGGLSELDKAGFIKRQLVETRQITKHVAQILDSRMNTKYDENDKLIREVKVITLKSKLVSDFRKDFQFYKVREINNYHHAHDAYLNAVVGTALIKKYPKLESEFVYGDYKVYDVRKMIAKSEQEIGKATAKYFFYSNIMNFFKTEITLANGEIRKRPLIETNGETGEIVWDKGRDFATVRKVLSMPQVNIVKKTEVQTGGFSKESILPKRNSDKLIARKKDWDPKKYGGFDSPTVAYSVLVVAKVEKGKSKKLKSVKELLGITIMERSSFEKNPIDFLEAKGYKEVKKDLIIKLPKYSLFELENGRKRMLASAGELQKGNELALPSKYVNFLYLASHYEKLKGSPEDNEQKQLFVEQHKHYLDEIIEQISEFSKRVILADANLDKVLSAYNKHRDKPIREQAENIIHLFTLTNLGAPAAFKYFDTTIDRKRYTSTKEVLDATLIHQSITGLYETRIDLSQLGGDGGPAPGSSEAAAKGGTLNIEDEHRLHETSKEPDVSLGSTWLSDFPQAWAETGGMGLAVRQAPLIIPLKATSTPVSIKQYPMSQEARLGIKPHIQRLLDQGILVPCQSPWNTPLLPVKKPGTNDYRPVQDLREVNKRVEDIHPTVPNPYNLLSGLPPSHQWYTVLDLKDAFFCLRLHPTSQPLFAFEWRDPEMGISGQLTWTRLPQGFKNSPTLFNEALHRDLADFRIQHPDLILLQYVDDLLLAATSELDCQQGTRALLQTLGNLGYRASAKKAQICQKQVKYLGYLLKEGQRWLTEARKETVMGQPTPKTPRQLREFLGKAGFCRLFIPGFAEMAAPLYPLTKPGTLFNWGPDQQKAYQEIKQALLTAPALGLPDLTKPFELFVDEKQGYAKGVLTQKLGPWRRPVAYLSKKLDPVAAGWPPCLRMVAAIAVLTKDAGKLTMGQPLVILAPHAVEALVKQPPDRWLSNARMTHYQALLLDTDRVQFGPVVALNPATLLPLPEEGLQHNCLDILAEAHGTRPDLTDQPLPDADHTWYTDGSSLLQEGQRKAGAAVTTETEVIWAKALPAGTSAQRAELIALTQALKMAEGKKLNVYTDSRYAFATAHIHGEIYRRRGWLTSEGKEIKNKDEILALLKALFLPKRLSIIHCPGHQKGHSAEARGNRMADQAARKAAITETPDTSTLLAGKRTADGSEFEKRTADGSEFESPKKKAKVE

SEQ ID NO: 2799 - protein, 2096 aa, synthetic construct
MPAAKRVKLDGGDKKYSIGLDIGTNSVGWAVITDEYKVPSKKFKVLGNTDRHSIKKNLIGALLFDSGETAEATRLKRTARRRYTRRKNRICYLQEIFSNEMAKVDDSFFHRLEESFLVEEDKKHERHPIFGNIVDEVAYHEKYPTIYHLRKKLVDSTDKADLRLIYLALAHMIKFRGHFLIEGDLNPDNSDVDKLFIQLVQTYNQLFEENPINASGVDAKAILSARLSKSRRLENLIAQLPGEKKNGLFGNLIALSLGLTPNFKSNFDLAEDAKLQLSKDTYDDDLDNLLAQIGDQYADLFLAAKNLSDAILLSDILRVNTEITKAPLSASMIKRYDEHHQDLTLLKALVRQQLPEKYKEIFFDQSKNGYAGYIDGGASQEEFYKFIKPILEKMDGTEELLVKLNREDLLRKQRTFDNGSIPHQIHLGELHAILRRQEDFYPFLKDNREKIEKILTFRIPYYVGPLARGNSRFAWMTRKSEETITPWNFEEVVDKGASAQSFIERMTNFDKNLPNEKVLPKHSLLYEYFTVYNELTKVKYVTEGMRKPAFLSGEQKKAIVDLLFKTNRKVTVKQLKEDYFKKIECFDSVEISGVEDRFNASLGTYHDLLKIIKDKDFLDNEENEDILEDIVLTLTLFEDREMIEERLKTYAHLFDDKVMKQLKRRRYTGWGRLSRKLINGIRDKQSGKTILDFLKSDGFANRNFMQLIHDDSLTFKEDIQKAQVSGQGDSLHEHIANLAGSPAIKKGILQTVKVVDELVKVMGRHKPENIVIEMARENQTTQKGQKNSRERMKRIEEGIKELGSQILKEHPVENTQLQNEKLYLYYLQNGRDMYVDQELDINRLSDYDVDHIVPQSFLKDDSIDNKVLTRSDKARGKSDNVPSEEVVKKMKNYWRQLLNAKLITQRKFDNLTKAERGGLSELDKAGFIKRQLVETRQITKHVAQILDSRMNTKYDENDKLIREVKVITLKSKLVSDFRKDFQFYKVREINNYHHAHDAYLNAVVGTALIKKYPKLESEFVYGDYKVYDVRKMIAKSEQEIGKATAKYFFYSNIMNFFKTEITLANGEIRKRPLIETNGETGEIVWDKGRDFATVRKVLSMPQVNIVKKTEVQTGGFSKESILPKRNSDKLIARKKDWDPKKYGGFDSPTVAYSVLVVAKVEKGKSKKLKSVKELLGITIMERSSFEKNPIDFLEAKGYKEVKKDLIIKLPKYSLFELENGRKRMLASAGELQKGNELALPSKYVNFLYLASHYEKLKGSPEDNEQKQLFVEQHKHYLDEIIEQISEFSKRVILADANLDKVLSAYNKHRDKPIREQAENIIHLFTLTNLGAPAAFKYFDTTIDRKRYTSTKEVLDATLIHQSITGLYETRIDLSQLGGDGGEAAAKGSSGGSGGTLNIEDEHRLHETSKEPDVSLGSTWLSDFPQAWAETGGMGLAVRQAPLIIPLKATSTPVSIKQYPMSQEARLGIKPHIQRLLDQGILVPCQSPWNTPLLPVKKPGTNDYRPVQDLREVNKRVEDIHPTVPNPYNLLSGLPPSHQWYTVLDLKDAFFCLRLHPTSQPLFAFEWRDPEMGISGQLTWTRLPQGFKNSPTLFNEALHRDLADFRIQHPDLILLQYVDDLLLAATSELDCQQGTRALLQTLGNLGYRASAKKAQICQKQVKYLGYLLKEGQRWLTEARKETVMGQPTPKTPRQLREFLGKAGFCRLFIPGFAEMAAPLYPLTKPGTLFNWGPDQQKAYQEIKQALLTAPALGLPDLTKPFELFVDEKQGYAKGVLTQKLGPWRRPVAYLSKKLDPVAAGWPPCLRMVAAIAVLTKDAGKLTMGQPLVILAPHAVEALVKQPPDRWLSNARMTHYQALLLDTDRVQFGPVVALNPATLLPLPEEGLQHNCLDILAEAHGTRPDLTDQPLPDADHTWYTDGSSLLQEGQRKAGAAVTTETEVIWAKALPAGTSAQRAELIALTQALKMAEGKKLNVYTDSRYAFATAHIHGEIYRRRGWLTSEGKEIKNKDEILALLKALFLPKRLSIIHCPGHQKGHSAEARGNRMADQAARKAAITETPDTSTLLAGKRTADGSEFEKRTADGSEFESPKKKAKVE

SEQ ID NO: 2800 - protein, 2094 aa, synthetic construct
MPAAKRVKLDGGDKKYSIGLDIGTNSVGWAVITDEYKVPSKKFKVLGNTDRHSIKKNLIGALLFDSGETAEATRLKRTARRRYTRRKNRICYLQEIFSNEMAKVDDSFFHRLEESFLVEEDKKHERHPIFGNIVDEVAYHEKYPTIYHLRKKLVDSTDKADLRLIYLALAHMIKFRGHFLIEGDLNPDNSDVDKLFIQLVQTYNQLFEENPINASGVDAKAILSARLSKSRRLENLIAQLPGEKKNGLFGNLIALSLGLTPNFKSNFDLAEDAKLQLSKDTYDDDLDNLLAQIGDQYADLFLAAKNLSDAILLSDILRVNTEITKAPLSASMIKRYDEHHQDLTLLKALVRQQLPEKYKEIFFDQSKNGYAGYIDGGASQEEFYKFIKPILEKMDGTEELLVKLNREDLLRKQRTFDNGSIPHQIHLGELHAILRRQEDFYPFLKDNREKIEKILTFRIPYYVGPLARGNSRFAWMTRKSEETITPWNFEEVVDKGASAQSFIERMTNFDKNLPNEKVLPKHSLLYEYFTVYNELTKVKYVTEGMRKPAFLSGEQKKAIVDLLFKTNRKVTVKQLKEDYFKKIECFDSVEISGVEDRFNASLGTYHDLLKIIKDKDFLDNEENEDILEDIVLTLTLFEDREMIEERLKTYAHLFDDKVMKQLKRRRYTGWGRLSRKLINGIRDKQSGKTILDFLKSDGFANRNFMQLIHDDSLTFKEDIQKAQVSGQGDSLHEHIANLAGSPAIKKGILQTVKVVDELVKVMGRHKPENIVIEMARENQTTQKGQKNSRERMKRIEEGIKELGSQILKEHPVENTQLQNEKLYLYYLQNGRDMYVDQELDINRLSDYDVDHIVPQSFLKDDSIDNKVLTRSDKARGKSDNVPSEEVVKKMKNYWRQLLNAKLITQRKFDNLTKAERGGLSELDKAGFIKRQLVETRQITKHVAQILDSRMNTKYDENDKLIREVKVITLKSKLVSDFRKDFQFYKVREINNYHHAHDAYLNAVVGTALIKKYPKLESEFVYGDYKVYDVRKMIAKSEQEIGKATAKYFFYSNIMNFFKTEITLANGEIRKRPLIETNGETGEIVWDKGRDFATVRKVLSMPQVNIVKKTEVQTGGFSKESILPKRNSDKLIARKKDWDPKKYGGFDSPTVAYSVLVVAKVEKGKSKKLKSVKELLGITIMERSSFEKNPIDFLEAKGYKEVKKDLIIKLPKYSLFELENGRKRMLASAGELQKGNELALPSKYVNFLYLASHYEKLKGSPEDNEQKQLFVEQHKHYLDEIIEQISEFSKRVILADANLDKVLSAYNKHRDKPIREQAENIIHLFTLTNLGAPAAFKYFDTTIDRKRYTSTKEVLDATLIHQSITGLYETRIDLSQLGGDGGGGGPAPGGSGGTLNIEDEHRLHETSKEPDVSLGSTWLSDFPQAWAETGGMGLAVRQAPLIIPLKATSTPVSIKQYPMSQEARLGIKPHIQRLLDQGILVPCQSPWNTPLLPVKKPGTNDYRPVQDLREVNKRVEDIHPTVPNPYNLLSGLPPSHQWYTVLDLKDAFFCLRLHPTSQPLFAFEWRDPEMGISGQLTWTRLPQGFKNSPTLFNEALHRDLADFRIQHPDLILLQYVDDLLLAATSELDCQQGTRALLQTLGNLGYRASAKKAQICQKQVKYLGYLLKEGQRWLTEARKETVMGQPTPKTPRQLREFLGKAGFCRLFIPGFAEMAAPLYPLTKPGTLFNWGPDQQKAYQEIKQALLTAPALGLPDLTKPFELFVDEKQGYAKGVLTQKLGPWRRPVAYLSKKLDPVAAGWPPCLRMVAAIAVLTKDAGKLTMGQPLVILAPHAVEALVKQPPDRWLSNARMTHYQALLLDTDRVQFGPVVALNPATLLPLPEEGLQHNCLDILAEAHGTRPDLTDQPLPDADHTWYTDGSSLLQEGQRKAGAAVTTETEVIWAKALPAGTSAQRAELIALTQALKMAEGKKLNVYTDSRYAFATAHIHGEIYRRRGWLTSEGKEIKNKDEILALLKALFLPKRLSIIHCPGHQKGHSAEARGNRMADQAARKAAITETPDTSTLLAGKRTADGSEFEKRTADGSEFESPKKKAKVE

SEQ ID NO: 2801 - protein, 2094 aa, synthetic construct
MPAAKRVKLDGGDKKYSIGLDIGTNSVGWAVITDEYKVPSKKFKVLGNTDRHSIKKNLIGALLFDSGETAEATRLKRTARRRYTRRKNRICYLQEIFSNEMAKVDDSFFHRLEESFLVEEDKKHERHPIFGNIVDEVAYHEKYPTIYHLRKKLVDSTDKADLRLIYLALAHMIKFRGHFLIEGDLNPDNSDVDKLFIQLVQTYNQLFEENPINASGVDAKAILSARLSKSRRLENLIAQLPGEKKNGLFGNLIALSLGLTPNFKSNFDLAEDAKLQLSKDTYDDDLDNLLAQIGDQYADLFLAAKNLSDAILLSDILRVNTEITKAPLSASMIKRYDEHHQDLTLLKALVRQQLPEKYKEIFFDQSKNGYAGYIDGGASQEEFYKFIKPILEKMDGTEELLVKLNREDLLRKQRTFDNGSIPHQIHLGELHAILRRQEDFYPFLKDNREKIEKILTFRIPYYVGPLARGNSRFAWMTRKSEETITPWNFEEVVDKGASAQSFIERMTNFDKNLPNEKVLPKHSLLYEYFTVYNELTKVKYVTEGMRKPAFLSGEQKKAIVDLLFKTNRKVTVKQLKEDYFKKIECFDSVEISGVEDRFNASLGTYHDLLKIIKDKDFLDNEENEDILEDIVLTLTLFEDREMIEERLKTYAHLFDDKVMKQLKRRRYTGWGRLSRKLINGIRDKQSGKTILDFLKSDGFANRNFMQLIHDDSLTFKEDIQKAQVSGQGDSLHEHIANLAGSPAIKKGILQTVKVVDELVKVMGRHKPENIVIEMARENQTTQKGQKNSRERMKRIEEGIKELGSQILKEHPVENTQLQNEKLYLYYLQNGRDMYVDQELDINRLSDYDVDHIVPQSFLKDDSIDNKVLTRSDKARGKSDNVPSEEVVKKMKNYWRQLLNAKLITQRKFDNLTKAERGGLSELDKAGFIKRQLVETRQITKHVAQILDSRMNTKYDENDKLIREVKVITLKSKLVSDFRKDFQFYKVREINNYHHAHDAYLNAVVGTALIKKYPKLESEFVYGDYKVYDVRKMIAKSEQEIGKATAKYFFYSNIMNFFKTEITLANGEIRKRPLIETNGETGEIVWDKGRDFATVRKVLSMPQVNIVKKTEVQTGGFSKESILPKRNSDKLIARKKDWDPKKYGGFDSPTVAYSVLVVAKVEKGKSKKLKSVKELLGITIMERSSFEKNPIDFLEAKGYKEVKKDLIIKLPKYSLFELENGRKRMLASAGELQKGNELALPSKYVNFLYLASHYEKLKGSPEDNEQKQLFVEQHKHYLDEIIEQISEFSKRVILADANLDKVLSAYNKHRDKPIREQAENIIHLFTLTNLGAPAAFKYFDTTIDRKRYTSTKEVLDATLIHQSITGLYETRIDLSQLGGDGGGGSPAPGGGGGTLNIEDEHRLHETSKEPDVSLGSTWLSDFPQAWAETGGMGLAVRQAPLIIPLKATSTPVSIKQYPMSQEARLGIKPHIQRLLDQGILVPCQSPWNTPLLPVKKPGTNDYRPVQDLREVNKRVEDIHPTVPNPYNLLSGLPPSHQWYTVLDLKDAFFCLRLHPTSQPLFAFEWRDPEMGISGQLTWTRLPQGFKNSPTLFNEALHRDLADFRIQHPDLILLQYVDDLLLAATSELDCQQGTRALLQTLGNLGYRASAKKAQICQKQVKYLGYLLKEGQRWLTEARKETVMGQPTPKTPRQLREFLGKAGFCRLFIPGFAEMAAPLYPLTKPGTLFNWGPDQQKAYQEIKQALLTAPALGLPDLTKPFELFVDEKQGYAKGVLTQKLGPWRRPVAYLSKKLDPVAAGWPPCLRMVAAIAVLTKDAGKLTMGQPLVILAPHAVEALVKQPPDRWLSNARMTHYQALLLDTDRVQFGPVVALNPATLLPLPEEGLQHNCLDILAEAHGTRPDLTDQPLPDADHTWYTDGSSLLQEGQRKAGAAVTTETEVIWAKALPAGTSAQRAELIALTQALKMAEGKKLNVYTDSRYAFATAHIHGEIYRRRGWLTSEGKEIKNKDEILALLKALFLPKRLSIIHCPGHQKGHSAEARGNRMADQAARKAAITETPDTSTLLAGKRTADGSEFEKRTADGSEFESPKKKAKVE

SEQ ID NO: 2802 - protein, 2100 aa, synthetic construct
MPAAKRVKLDGGDKKYSIGLDIGTNSVGWAVITDEYKVPSKKFKVLGNTDRHSIKKNLIGALLFDSGETAEATRLKRTARRRYTRRKNRICYLQEIFSNEMAKVDDSFFHRLEESFLVEEDKKHERHPIFGNIVDEVAYHEKYPTIYHLRKKLVDSTDKADLRLIYLALAHMIKFRGHFLIEGDLNPDNSDVDKLFIQLVQTYNQLFEENPINASGVDAKAILSARLSKSRRLENLIAQLPGEKKNGLFGNLIALSLGLTPNFKSNFDLAEDAKLQLSKDTYDDDLDNLLAQIGDQYADLFLAAKNLSDAILLSDILRVNTEITKAPLSASMIKRYDEHHQDLTLLKALVRQQLPEKYKEIFFDQSKNGYAGYIDGGASQEEFYKFIKPILEKMDGTEELLVKLNREDLLRKQRTFDNGSIPHQIHLGELHAILRRQEDFYPFLKDNREKIEKILTFRIPYYVGPLARGNSRFAWMTRKSEETITPWNFEEVVDKGASAQSFIERMTNFDKNLPNEKVLPKHSLLYEYFTVYNELTKVKYVTEGMRKPAFLSGEQKKAIVDLLFKTNRKVTVKQLKEDYFKKIECFDSVEISGVEDRFNASLGTYHDLLKIIKDKDFLDNEENEDILEDIVLTLTLFEDREMIEERLKTYAHLFDDKVMKQLKRRRYTGWGRLSRKLINGIRDKQSGKTILDFLKSDGFANRNFMQLIHDDSLTFKEDIQKAQVSGQGDSLHEHIANLAGSPAIKKGILQTVKVVDELVKVMGRHKPENIVIEMARENQTTQKGQKNSRERMKRIEEGIKELGSQILKEHPVENTQLQNEKLYLYYLQNGRDMYVDQELDINRLSDYDVDHIVPQSFLKDDSIDNKVLTRSDKARGKSDNVPSEEVVKKMKNYWRQLLNAKLITQRKFDNLTKAERGGLSELDKAGFIKRQLVETRQITKHVAQILDSRMNTKYDENDKLIREVKVITLKSKLVSDFRKDFQFYKVREINNYHHAHDAYLNAVVGTALIKKYPKLESEFVYGDYKVYDVRKMIAKSEQEIGKATAKYFFYSNIMNFFKTEITLANGEIRKRPLIETNGETGEIVWDKGRDFATVRKVLSMPQVNIVKKTEVQTGGFSKESILPKRNSDKLIARKKDWDPKKYGGFDSPTVAYSVLVVAKVEKGKSKKLKSVKELLGITIMERSSFEKNPIDFLEAKGYKEVKKDLIIKLPKYSLFELENGRKRMLASAGELQKGNELALPSKYVNFLYLASHYEKLKGSPEDNEQKQLFVEQHKHYLDEIIEQISEFSKRVILADANLDKVLSAYNKHRDKPIREQAENIIHLFTLTNLGAPAAFKYFDTTIDRKRYTSTKEVLDATLIHQSITGLYETRIDLSQLGGDGGGSSGSSGSSGSSGSSGGTLNIEDEHRLHETSKEPDVSLGSTWLSDFPQAWAETGGMGLAVRQAPLIIPLKATSTPVSIKQYPMSQEARLGIKPHIQRLLDQGILVPCQSPWNTPLLPVKKPGTNDYRPVQDLREVNKRVEDIHPTVPNPYNLLSGLPPSHQWYTVLDLKDAFFCLRLHPTSQPLFAFEWRDPEMGISGQLTWTRLPQGFKNSPTLFNEALHRDLADFRIQHPDLILLQYVDDLLLAATSELDCQQGTRALLQTLGNLGYRASAKKAQICQKQVKYLGYLLKEGQRWLTEARKETVMGQPTPKTPRQLREFLGKAGFCRLFIPGFAEMAAPLYPLTKPGTLFNWGPDQQKAYQEIKQALLTAPALGLPDLTKPFELFVDEKQGYAKGVLTQKLGPWRRPVAYLSKKLDPVAAGWPPCLRMVAAIAVLTKDAGKLTMGQPLVILAPHAVEALVKQPPDRWLSNARMTHYQALLLDTDRVQFGPVVALNPATLLPLPEEGLQHNCLDILAEAHGTRPDLTDQPLPDADHTWYTDGSSLLQEGQRKAGAAVTTETEVIWAKALPAGTSAQRAELIALTQALKMAEGKKLNVYTDSRYAFATAHIHGEIYRRRGWLTSEGKEIKNKDEILALLKALFLPKRLSIIHCPGHQKGHSAEARGNRMADQAARKAAITETPDTSTLLAGKRTADGSEFEKRTADGSEFESPKKKAKVE

SEQ ID NO: 2803 - protein, 2110 aa, synthetic construct
MPAAKRVKLDGGDKKYSIGLDIGTNSVGWAVITDEYKVPSKKFKVLGNTDRHSIKKNLIGALLFDSGETAEATRLKRTARRRYTRRKNRICYLQEIFSNEMAKVDDSFFHRLEESFLVEEDKKHERHPIFGNIVDEVAYHEKYPTIYHLRKKLVDSTDKADLRLIYLALAHMIKFRGHFLIEGDLNPDNSDVDKLFIQLVQTYNQLFEENPINASGVDAKAILSARLSKSRRLENLIAQLPGEKKNGLFGNLIALSLGLTPNFKSNFDLAEDAKLQLSKDTYDDDLDNLLAQIGDQYADLFLAAKNLSDAILLSDILRVNTEITKAPLSASMIKRYDEHHQDLTLLKALVRQQLPEKYKEIFFDQSKNGYAGYIDGGASQEEFYKFIKPILEKMDGTEELLVKLNREDLLRKQRTFDNGSIPHQIHLGELHAILRRQEDFYPFLKDNREKIEKILTFRIPYYVGPLARGNSRFAWMTRKSEETITPWNFEEVVDKGASAQSFIERMTNFDKNLPNEKVLPKHSLLYEYFTVYNELTKVKYVTEGMRKPAFLSGEQKKAIVDLLFKTNRKVTVKQLKEDYFKKIECFDSVEISGVEDRFNASLGTYHDLLKIIKDKDFLDNEENEDILEDIVLTLTLFEDREMIEERLKTYAHLFDDKVMKQLKRRRYTGWGRLSRKLINGIRDKQSGKTILDFLKSDGFANRNFMQLIHDDSLTFKEDIQKAQVSGQGDSLHEHIANLAGSPAIKKGILQTVKVVDELVKVMGRHKPENIVIEMARENQTTQKGQKNSRERMKRIEEGIKELGSQILKEHPVENTQLQNEKLYLYYLQNGRDMYVDQELDINRLSDYDVDHIVPQSFLKDDSIDNKVLTRSDKARGKSDNVPSEEVVKKMKNYWRQLLNAKLITQRKFDNLTKAERGGLSELDKAGFIKRQLVETRQITKHVAQILDSRMNTKYDENDKLIREVKVITLKSKLVSDFRKDFQFYKVREINNYHHAHDAYLNAVVGTALIKKYPKLESEFVYGDYKVYDVRKMIAKSEQEIGKATAKYFFYSNIMNFFKTEITLANGEIRKRPLIETNGETGEIVWDKGRDFATVRKVLSMPQVNIVKKTEVQTGGFSKESILPKRNSDKLIARKKDWDPKKYGGFDSPTVAYSVLVVAKVEKGKSKKLKSVKELLGITIMERSSFEKNPIDFLEAKGYKEVKKDLIIKLPKYSLFELENGRKRMLASAGELQKGNELALPSKYVNFLYLASHYEKLKGSPEDNEQKQLFVEQHKHYLDEIIEQISEFSKRVILADANLDKVLSAYNKHRDKPIREQAENIIHLFTLTNLGAPAAFKYFDTTIDRKRYTSTKEVLDATLIHQSITGLYETRIDLSQLGGDGGEAAAKEAAAKEAAAKEAAAKEAAAKGGTLNIEDEHRLHETSKEPDVSLGSTWLSDFPQAWAETGGMGLAVRQAPLIIPLKATSTPVSIKQYPMSQEARLGIKPHIQRLLDQGILVPCQSPWNTPLLPVKKPGTNDYRPVQDLREVNKRVEDIHPTVPNPYNLLSGLPPSHQWYTVLDLKDAFFCLRLHPTSQPLFAFEWRDPEMGISGQLTWTRLPQGFKNSPTLFNEALHRDLADFRIQHPDLILLQYVDDLLLAATSELDCQQGTRALLQTLGNLGYRASAKKAQICQKQVKYLGYLLKEGQRWLTEARKETVMGQPTPKTPRQLREFLGKAGFCRLFIPGFAEMAAPLYPLTKPGTLFNWGPDQQKAYQEIKQALLTAPALGLPDLTKPFELFVDEKQGYAKGVLTQKLGPWRRPVAYLSKKLDPVAAGWPPCLRMVAAIAVLTKDAGKLTMGQPLVILAPHAVEALVKQPPDRWLSNARMTHYQALLLDTDRVQFGPVVALNPATLLPLPEEGLQHNCLDILAEAHGTRPDLTDQPLPDADHTWYTDGSSLLQEGQRKAGAAVTTETEVIWAKALPAGTSAQRAELIALTQALKMAEGKKLNVYTDSRYAFATAHIHGEIYRRRGWLTSEGKEIKNKDEILALLKALFLPKRLSIIHCPGHQKGHSAEARGNRMADQAARKAAITETPDTSTLLAGKRTADGSEFEKRTADGSEFESPKKKAKVE

SEQ ID NO: 2804 - protein, 2094 aa, synthetic construct
MPAAKRVKLDGGDKKYSIGLDIGTNSVGWAVITDEYKVPSKKFKVLGNTDRHSIKKNLIGALLFDSGETAEATRLKRTARRRYTRRKNRICYLQEIFSNEMAKVDDSFFHRLEESFLVEEDKKHERHPIFGNIVDEVAYHEKYPTIYHLRKKLVDSTDKADLRLIYLALAHMIKFRGHFLIEGDLNPDNSDVDKLFIQLVQTYNQLFEENPINASGVDAKAILSARLSKSRRLENLIAQLPGEKKNGLFGNLIALSLGLTPNFKSNFDLAEDAKLQLSKDTYDDDLDNLLAQIGDQYADLFLAAKNLSDAILLSDILRVNTEITKAPLSASMIKRYDEHHQDLTLLKALVRQQLPEKYKEIFFDQSKNGYAGYIDGGASQEEFYKFIKPILEKMDGTEELLVKLNREDLLRKQRTFDNGSIPHQIHLGELHAILRRQEDFYPFLKDNREKIEKILTFRIPYYVGPLARGNSRFAWMTRKSEETITPWNFEEVVDKGASAQSFIERMTNFDKNLPNEKVLPKHSLLYEYFTVYNELTKVKYVTEGMRKPAFLSGEQKKAIVDLLFKTNRKVTVKQLKEDYFKKIECFDSVEISGVEDRFNASLGTYHDLLKIIKDKDFLDNEENEDILEDIVLTLTLFEDREMIEERLKTYAHLFDDKVMKQLKRRRYTGWGRLSRKLINGIRDKQSGKTILDFLKSDGFANRNFMQLIHDDSLTFKEDIQKAQVSGQGDSLHEHIANLAGSPAIKKGILQTVKVVDELVKVMGRHKPENIVIEMARENQTTQKGQKNSRERMKRIEEGIKELGSQILKEHPVENTQLQNEKLYLYYLQNGRDMYVDQELDINRLSDYDVDHIVPQSFLKDDSIDNKVLTRSDKARGKSDNVPSEEVVKKMKNYWRQLLNAKLITQRKFDNLTKAERGGLSELDKAGFIKRQLVETRQITKHVAQILDSRMNTKYDENDKLIREVKVITLKSKLVSDFRKDFQFYKVREINNYHHAHDAYLNAVVGTALIKKYPKLESEFVYGDYKVYDVRKMIAKSEQEIGKATAKYFFYSNIMNFFKTEITLANGEIRKRPLIETNGETGEIVWDKGRDFATVRKVLSMPQVNIVKKTEVQTGGFSKESILPKRNSDKLIARKKDWDPKKYGGFDSPTVAYSVLVVAKVEKGKSKKLKSVKELLGITIMERSSFEKNPIDFLEAKGYKEVKKDLIIKLPKYSLFELENGRKRMLASAGELQKGNELALPSKYVNFLYLASHYEKLKGSPEDNEQKQLFVEQHKHYLDEIIEQISEFSKRVILADANLDKVLSAYNKHRDKPIREQAENIIHLFTLTNLGAPAAFKYFDTTIDRKRYTSTKEVLDATLIHQSITGLYETRIDLSQLGGDGGGGSGGGPAPGGTLNIEDEHRLHETSKEPDVSLGSTWLSDFPQAWAETGGMGLAVRQAPLIIPLKATSTPVSIKQYPMSQEARLGIKPHIQRLLDQGILVPCQSPWNTPLLPVKKPGTNDYRPVQDLREVNKRVEDIHPTVPNPYNLLSGLPPSHQWYTVLDLKDAFFCLRLHPTSQPLFAFEWRDPEMGISGQLTWTRLPQGFKNSPTLFNEALHRDLADFRIQHPDLILLQYVDDLLLAATSELDCQQGTRALLQTLGNLGYRASAKKAQICQKQVKYLGYLLKEGQRWLTEARKETVMGQPTPKTPRQLREFLGKAGFCRLFIPGFAEMAAPLYPLTKPGTLFNWGPDQQKAYQEIKQALLTAPALGLPDLTKPFELFVDEKQGYAKGVLTQKLGPWRRPVAYLSKKLDPVAAGWPPCLRMVAAIAVLTKDAGKLTMGQPLVILAPHAVEALVKQPPDRWLSNARMTHYQALLLDTDRVQFGPVVALNPATLLPLPEEGLQHNCLDILAEAHGTRPDLTDQPLPDADHTWYTDGSSLLQEGQRKAGAAVTTETEVIWAKALPAGTSAQRAELIALTQALKMAEGKKLNVYTDSRYAFATAHIHGEIYRRRGWLTSEGKEIKNKDEILALLKALFLPKRLSIIHCPGHQKGHSAEARGNRMADQAARKAAITETPDTSTLLAGKRTADGSEFEKRTADGSEFESPKKKAKVE

SEQ ID NO: 2805 - protein, 2096 aa, synthetic construct
MPAAKRVKLDGGDKKYSIGLDIGTNSVGWAVITDEYKVPSKKFKVLGNTDRHSIKKNLIGALLFDSGETAEATRLKRTARRRYTRRKNRICYLQEIFSNEMAKVDDSFFHRLEESFLVEEDKKHERHPIFGNIVDEVAYHEKYPTIYHLRKKLVDSTDKADLRLIYLALAHMIKFRGHFLIEGDLNPDNSDVDKLFIQLVQTYNQLFEENPINASGVDAKAILSARLSKSRRLENLIAQLPGEKKNGLFGNLIALSLGLTPNFKSNFDLAEDAKLQLSKDTYDDDLDNLLAQIGDQYADLFLAAKNLSDAILLSDILRVNTEITKAPLSASMIKRYDEHHQDLTLLKALVRQQLPEKYKEIFFDQSKNGYAGYIDGGASQEEFYKFIKPILEKMDGTEELLVKLNREDLLRKQRTFDNGSIPHQIHLGELHAILRRQEDFYPFLKDNREKIEKILTFRIPYYVGPLARGNSRFAWMTRKSEETITPWNFEEVVDKGASAQSFIERMTNFDKNLPNEKVLPKHSLLYEYFTVYNELTKVKYVTEGMRKPAFLSGEQKKAIVDLLFKTNRKVTVKQLKEDYFKKIECFDSVEISGVEDRFNASLGTYHDLLKIIKDKDFLDNEENEDILEDIVLTLTLFEDREMIEERLKTYAHLFDDKVMKQLKRRRYTGWGRLSRKLINGIRDKQSGKTILDFLKSDGFANRNFMQLIHDDSLTFKEDIQKAQVSGQGDSLHEHIANLAGSPAIKKGILQTVKVVDELVKVMGRHKPENIVIEMARENQTTQKGQKNSRERMKRIEEGIKELGSQILKEHPVENTQLQNEKLYLYYLQNGRDMYVDQELDINRLSDYDVDHIVPQSFLKDDSIDNKVLTRSDKARGKSDNVPSEEVVKKMKNYWRQLLNAKLITQRKFDNLTKAERGGLSELDKAGFIKRQLVETRQITKHVAQILDSRMNTKYDENDKLIREVKVITLKSKLVSDFRKDFQFYKVREINNYHHAHDAYLNAVVGTALIKKYPKLESEFVYGDYKVYDVRKMIAKSEQEIGKATAKYFFYSNIMNFFKTEITLANGEIRKRPLIETNGETGEIVWDKGRDFATVRKVLSMPQVNIVKKTEVQTGGFSKESILPKRNSDKLIARKKDWDPKKYGGFDSPTVAYSVLVVAKVEKGKSKKLKSVKELLGITIMERSSFEKNPIDFLEAKGYKEVKKDLIIKLPKYSLFELENGRKRMLASAGELQKGNELALPSKYVNFLYLASHYEKLKGSPEDNEQKQLFVEQHKHYLDEIIEQISEFSKRVILADANLDKVLSAYNKHRDKPIREQAENIIHLFTLTNLGAPAAFKYFDTTIDRKRYTSTKEVLDATLIHQSITGLYETRIDLSQLGGDGGGGSPAPEAAAKGGTLNIEDEHRLHETSKEPDVSLGSTWLSDFPQAWAETGGMGLAVRQAPLIIPLKATSTPVSIKQYPMSQEARLGIKPHIQRLLDQGILVPCQSPWNTPLLPVKKPGTNDYRPVQDLREVNKRVEDIHPTVPNPYNLLSGLPPSHQWYTVLDLKDAFFCLRLHPTSQPLFAFEWRDPEMGISGQLTWTRLPQGFKNSPTLFNEALHRDLADFRIQHPDLILLQYVDDLLLAATSELDCQQGTRALLQTLGNLGYRASAKKAQICQKQVKYLGYLLKEGQRWLTEARKETVMGQPTPKTPRQLREFLGKAGFCRLFIPGFAEMAAPLYPLTKPGTLFNWGPDQQKAYQEIKQALLTAPALGLPDLTKPFELFVDEKQGYAKGVLTQKLGPWRRPVAYLSKKLDPVAAGWPPCLRMVAAIAVLTKDAGKLTMGQPLVILAPHAVEALVKQPPDRWLSNARMTHYQALLLDTDRVQFGPVVALNPATLLPLPEEGLQHNCLDILAEAHGTRPDLTDQPLPDADHTWYTDGSSLLQEGQRKAGAAVTTETEVIWAKALPAGTSAQRAELIALTQALKMAEGKKLNVYTDSRYAFATAHIHGEIYRRRGWLTSEGKEIKNKDEILALLKALFLPKRLSIIHCPGHQKGHSAEARGNRMADQAARKAAITETPDTSTLLAGKRTADGSEFEKRTADGSEFESPKKKAKVE

SEQ ID NO: 2806 - protein, 2097 aa, synthetic construct
MPAAKRVKLDGGDKKYSIGLDIGTNSVGWAVITDEYKVPSKKFKVLGNTDRHSIKKNLIGALLFDSGETAEATRLKRTARRRYTRRKNRICYLQEIFSNEMAKVDDSFFHRLEESFLVEEDKKHERHPIFGNIVDEVAYHEKYPTIYHLRKKLVDSTDKADLRLIYLALAHMIKFRGHFLIEGDLNPDNSDVDKLFIQLVQTYNQLFEENPINASGVDAKAILSARLSKSRRLENLIAQLPGEKKNGLFGNLIALSLGLTPNFKSNFDLAEDAKLQLSKDTYDDDLDNLLAQIGDQYADLFLAAKNLSDAILLSDILRVNTEITKAPLSASMIKRYDEHHQDLTLLKALVRQQLPEKYKEIFFDQSKNGYAGYIDGGASQEEFYKFIKPILEKMDGTEELLVKLNREDLLRKQRTFDNGSIPHQIHLGELHAILRRQEDFYPFLKDNREKIEKILTFRIPYYVGPLARGNSRFAWMTRKSEETITPWNFEEVVDKGASAQSFIERMTNFDKNLPNEKVLPKHSLLYEYFTVYNELTKVKYVTEGMRKPAFLSGEQKKAIVDLLFKTNRKVTVKQLKEDYFKKIECFDSVEISGVEDRFNASLGTYHDLLKIIKDKDFLDNEENEDILEDIVLTLTLFEDREMIEERLKTYAHLFDDKVMKQLKRRRYTGWGRLSRKLINGIRDKQSGKTILDFLKSDGFANRNFMQLIHDDSLTFKEDIQKAQVSGQGDSLHEHIANLAGSPAIKKGILQTVKVVDELVKVMGRHKPENIVIEMARENQTTQKGQKNSRERMKRIEEGIKELGSQILKEHPVENTQLQNEKLYLYYLQNGRDMYVDQELDINRLSDYDVDHIVPQSFLKDDSIDNKVLTRSDKARGKSDNVPSEEVVKKMKNYWRQLLNAKLITQRKFDNLTKAERGGLSELDKAGFIKRQLVETRQITKHVAQILDSRMNTKYDENDKLIREVKVITLKSKLVSDFRKDFQFYKVREINNYHHAHDAYLNAVVGTALIKKYPKLESEFVYGDYKVYDVRKMIAKSEQEIGKATAKYFFYSNIMNFFKTEITLANGEIRKRPLIETNGETGEIVWDKGRDFATVRKVLSMPQVNIVKKTEVQTGGFSKESILPKRNSDKLIARKKDWDPKKYGGFDSPTVAYSVLVVAKVEKGKSKKLKSVKELLGITIMERSSFEKNPIDFLEAKGYKEVKKDLIIKLPKYSLFELENGRKRMLASAGELQKGNELALPSKYVNFLYLASHYEKLKGSPEDNEQKQLFVEQHKHYLDEIIEQISEFSKRVILADANLDKVLSAYNKHRDKPIREQAENIIHLFTLTNLGAPAAFKYFDTTIDRKRYTSTKEVLDATLIHQSITGLYETRIDLSQLGGDGGGSSGSSGSSGSSGGTLNIEDEHRLHETSKEPDVSLGSTWLSDFPQAWAETGGMGLAVRQAPLIIPLKATSTPVSIKQYPMSQEARLGIKPHIQRLLDQGILVPCQSPWNTPLLPVKKPGTNDYRPVQDLREVNKRVEDIHPTVPNPYNLLSGLPPSHQWYTVLDLKDAFFCLRLHPTSQPLFAFEWRDPEMGISGQLTWTRLPQGFKNSPTLFNEALHRDLADFRIQHPDLILLQYVDDLLLAATSELDCQQGTRALLQTLGNLGYRASAKKAQICQKQVKYLGYLLKEGQRWLTEARKETVMGQPTPKTPRQLREFLGKAGFCRLFIPGFAEMAAPLYPLTKPGTLFNWGPDQQKAYQEIKQALLTAPALGLPDLTKPFELFVDEKQGYAKGVLTQKLGPWRRPVAYLSKKLDPVAAGWPPCLRMVAAIAVLTKDAGKLTMGQPLVILAPHAVEALVKQPPDRWLSNARMTHYQALLLDTDRVQFGPVVALNPATLLPLPEEGLQHNCLDILAEAHGTRPDLTDQPLPDADHTWYTDGSSLLQEGQRKAGAAVTTETEVIWAKALPAGTSAQRAELIALTQALKMAEGKKLNVYTDSRYAFATAHIHGEIYRRRGWLTSEGKEIKNKDEILALLKALFLPKRLSIIHCPGHQKGHSAEARGNRMADQAARKAAITETPDTSTLLAGKRTADGSEFEKRTADGSEFESPKKKAKVE

SEQ ID NO: 2807 - protein, 2100 aa, synthetic construct
MPAAKRVKLDGGDKKYSIGLDIGTNSVGWAVITDEYKVPSKKFKVLGNTDRHSIKKNLIGALLFDSGETAEATRLKRTARRRYTRRKNRICYLQEIFSNEMAKVDDSFFHRLEESFLVEEDKKHERHPIFGNIVDEVAYHEKYPTIYHLRKKLVDSTDKADLRLIYLALAHMIKFRGHFLIEGDLNPDNSDVDKLFIQLVQTYNQLFEENPINASGVDAKAILSARLSKSRRLENLIAQLPGEKKNGLFGNLIALSLGLTPNFKSNFDLAEDAKLQLSKDTYDDDLDNLLAQIGDQYADLFLAAKNLSDAILLSDILRVNTEITKAPLSASMIKRYDEHHQDLTLLKALVRQQLPEKYKEIFFDQSKNGYAGYIDGGASQEEFYKFIKPILEKMDGTEELLVKLNREDLLRKQRTFDNGSIPHQIHLGELHAILRRQEDFYPFLKDNREKIEKILTFRIPYYVGPLARGNSRFAWMTRKSEETITPWNFEEVVDKGASAQSFIERMTNFDKNLPNEKVLPKHSLLYEYFTVYNELTKVKYVTEGMRKPAFLSGEQKKAIVDLLFKTNRKVTVKQLKEDYFKKIECFDSVEISGVEDRFNASLGTYHDLLKIIKDKDFLDNEENEDILEDIVLTLTLFEDREMIEERLKTYAHLFDDKVMKQLKRRRYTGWGRLSRKLINGIRDKQSGKTILDFLKSDGFANRNFMQLIHDDSLTFKEDIQKAQVSGQGDSLHEHIANLAGSPAIKKGILQTVKVVDELVKVMGRHKPENIVIEMARENQTTQKGQKNSRERMKRIEEGIKELGSQILKEHPVENTQLQNEKLYLYYLQNGRDMYVDQELDINRLSDYDVDHIVPQSFLKDDSIDNKVLTRSDKARGKSDNVPSEEVVKKMKNYWRQLLNAKLITQRKFDNLTKAERGGLSELDKAGFIKRQLVETRQITKHVAQILDSRMNTKYDENDKLIREVKVITLKSKLVSDFRKDFQFYKVREINNYHHAHDAYLNAVVGTALIKKYPKLESEFVYGDYKVYDVRKMIAKSEQEIGKATAKYFFYSNIMNFFKTEITLANGEIRKRPLIETNGETGEIVWDKGRDFATVRKVLSMPQVNIVKKTEVQTGGFSKESILPKRNSDKLIARKKDWDPKKYGGFDSPTVAYSVLVVAKVEKGKSKKLKSVKELLGITIMERSSFEKNPIDFLEAKGYKEVKKDLIIKLPKYSLFELENGRKRMLASAGELQKGNELALPSKYVNFLYLASHYEKLKGSPEDNEQKQLFVEQHKHYLDEIIEQISEFSKRVILADANLDKVLSAYNKHRDKPIREQAENIIHLFTLTNLGAPAAFKYFDTTIDRKRYTSTKEVLDATLIHQSITGLYETRIDLSQLGGDGGGGSGGSGGSGGSGGSGGTLNIEDEHRLHETSKEPDVSLGSTWLSDFPQAWAETGGMGLAVRQAPLIIPLKATSTPVSIKQYPMSQEARLGIKPHIQRLLDQGILVPCQSPWNTPLLPVKKPGTNDYRPVQDLREVNKRVEDIHPTVPNPYNLLSGLPPSHQWYTVLDLKDAFFCLRLHPTSQPLFAFEWRDPEMGISGQLTWTRLPQGFKNSPTLFNEALHRDLADFRIQHPDLILLQYVDDLLLAATSELDCQQGTRALLQTLGNLGYRASAKKAQICQKQVKYLGYLLKEGQRWLTEARKETVMGQPTPKTPRQLREFLGKAGFCRLFIPGFAEMAAPLYPLTKPGTLFNWGPDQQKAYQEIKQALLTAPALGLPDLTKPFELFVDEKQGYAKGVLTQKLGPWRRPVAYLSKKLDPVAAGWPPCLRMVAAIAVLTKDAGKLTMGQPLVILAPHAVEALVKQPPDRWLSNARMTHYQALLLDTDRVQFGPVVALNPATLLPLPEEGLQHNCLDILAEAHGTRPDLTDQPLPDADHTWYTDGSSLLQEGQRKAGAAVTTETEVIWAKALPAGTSAQRAELIALTQALKMAEGKKLNVYTDSRYAFATAHIHGEIYRRRGWLTSEGKEIKNKDEILALLKALFLPKRLSIIHCPGHQKGHSAEARGNRMADQAARKAAITETPDTSTLLAGKRTADGSEFEKRTADGSEFESPKKKAKVE

SEQ ID NO: 2808 - protein, 2091 aa, synthetic construct
MPAAKRVKLDGGDKKYSIGLDIGTNSVGWAVITDEYKVPSKKFKVLGNTDRHSIKKNLIGALLFDSGETAEATRLKRTARRRYTRRKNRICYLQEIFSNEMAKVDDSFFHRLEESFLVEEDKKHERHPIFGNIVDEVAYHEKYPTIYHLRKKLVDSTDKADLRLIYLALAHMIKFRGHFLIEGDLNPDNSDVDKLFIQLVQTYNQLFEENPINASGVDAKAILSARLSKSRRLENLIAQLPGEKKNGLFGNLIALSLGLTPNFKSNFDLAEDAKLQLSKDTYDDDLDNLLAQIGDQYADLFLAAKNLSDAILLSDILRVNTEITKAPLSASMIKRYDEHHQDLTLLKALVRQQLPEKYKEIFFDQSKNGYAGYIDGGASQEEFYKFIKPILEKMDGTEELLVKLNREDLLRKQRTFDNGSIPHQIHLGELHAILRRQEDFYPFLKDNREKIEKILTFRIPYYVGPLARGNSRFAWMTRKSEETITPWNFEEVVDKGASAQSFIERMTNFDKNLPNEKVLPKHSLLYEYFTVYNELTKVKYVTEGMRKPAFLSGEQKKAIVDLLFKTNRKVTVKQLKEDYFKKIECFDSVEISGVEDRFNASLGTYHDLLKIIKDKDFLDNEENEDILEDIVLTLTLFEDREMIEERLKTYAHLFDDKVMKQLKRRRYTGWGRLSRKLINGIRDKQSGKTILDFLKSDGFANRNFMQLIHDDSLTFKEDIQKAQVSGQGDSLHEHIANLAGSPAIKKGILQTVKVVDELVKVMGRHKPENIVIEMARENQTTQKGQKNSRERMKRIEEGIKELGSQILKEHPVENTQLQNEKLYLYYLQNGRDMYVDQELDINRLSDYDVDHIVPQSFLKDDSIDNKVLTRSDKARGKSDNVPSEEVVKKMKNYWRQLLNAKLITQRKFDNLTKAERGGLSELDKAGFIKRQLVETRQITKHVAQILDSRMNTKYDENDKLIREVKVITLKSKLVSDFRKDFQFYKVREINNYHHAHDAYLNAVVGTALIKKYPKLESEFVYGDYKVYDVRKMIAKSEQEIGKATAKYFFYSNIMNFFKTEITLANGEIRKRPLIETNGETGEIVWDKGRDFATVRKVLSMPQVNIVKKTEVQTGGFSKESILPKRNSDKLIARKKDWDPKKYGGFDSPTVAYSVLVVAKVEKGKSKKLKSVKELLGITIMERSSFEKNPIDFLEAKGYKEVKKDLIIKLPKYSLFELENGRKRMLASAGELQKGNELALPSKYVNFLYLASHYEKLKGSPEDNEQKQLFVEQHKHYLDEIIEQISEFSKRVILADANLDKVLSAYNKHRDKPIREQAENIIHLFTLTNLGAPAAFKYFDTTIDRKRYTSTKEVLDATLIHQSITGLYETRIDLSQLGGDGGGGSPAPGGTLNIEDEHRLHETSKEPDVSLGSTWLSDFPQAWAETGGMGLAVRQAPLIIPLKATSTPVSIKQYPMSQEARLGIKPHIQRLLDQGILVPCQSPWNTPLLPVKKPGTNDYRPVQDLREVNKRVEDIHPTVPNPYNLLSGLPPSHQWYTVLDLKDAFFCLRLHPTSQPLFAFEWRDPEMGISGQLTWTRLPQGFKNSPTLFNEALHRDLADFRIQHPDLILLQYVDDLLLAATSELDCQQGTRALLQTLGNLGYRASAKKAQICQKQVKYLGYLLKEGQRWLTEARKETVMGQPTPKTPRQLREFLGKAGFCRLFIPGFAEMAAPLYPLTKPGTLFNWGPDQQKAYQEIKQALLTAPALGLPDLTKPFELFVDEKQGYAKGVLTQKLGPWRRPVAYLSKKLDPVAAGWPPCLRMVAAIAVLTKDAGKLTMGQPLVILAPHAVEALVKQPPDRWLSNARMTHYQALLLDTDRVQFGPVVALNPATLLPLPEEGLQHNCLDILAEAHGTRPDLTDQPLPDADHTWYTDGSSLLQEGQRKAGAAVTTETEVIWAKALPAGTSAQRAELIALTQALKMAEGKKLNVYTDSRYAFATAHIHGEIYRRRGWLTSEGKEIKNKDEILALLKALFLPKRLSIIHCPGHQKGHSAEARGNRMADQAARKAAITETPDTSTLLAGKRTADGSEFEKRTADGSEFESPKKKAKVE

SEQ ID NO: 2809 - protein, 2094 aa, synthetic construct
MPAAKRVKLDGGDKKYSIGLDIGTNSVGWAVITDEYKVPSKKFKVLGNTDRHSIKKNLIGALLFDSGETAEATRLKRTARRRYTRRKNRICYLQEIFSNEMAKVDDSFFHRLEESFLVEEDKKHERHPIFGNIVDEVAYHEKYPTIYHLRKKLVDSTDKADLRLIYLALAHMIKFRGHFLIEGDLNPDNSDVDKLFIQLVQTYNQLFEENPINASGVDAKAILSARLSKSRRLENLIAQLPGEKKNGLFGNLIALSLGLTPNFKSNFDLAEDAKLQLSKDTYDDDLDNLLAQIGDQYADLFLAAKNLSDAILLSDILRVNTEITKAPLSASMIKRYDEHHQDLTLLKALVRQQLPEKYKEIFFDQSKNGYAGYIDGGASQEEFYKFIKPILEKMDGTEELLVKLNREDLLRKQRTFDNGSIPHQIHLGELHAILRRQEDFYPFLKDNREKIEKILTFRIPYYVGPLARGNSRFAWMTRKSEETITPWNFEEVVDKGASAQSFIERMTNFDKNLPNEKVLPKHSLLYEYFTVYNELTKVKYVTEGMRKPAFLSGEQKKAIVDLLFKTNRKVTVKQLKEDYFKKIECFDSVEISGVEDRFNASLGTYHDLLKIIKDKDFLDNEENEDILEDIVLTLTLFEDREMIEERLKTYAHLFDDKVMKQLKRRRYTGWGRLSRKLINGIRDKQSGKTILDFLKSDGFANRNFMQLIHDDSLTFKEDIQKAQVSGQGDSLHEHIANLAGSPAIKKGILQTVKVVDELVKVMGRHKPENIVIEMARENQTTQKGQKNSRERMKRIEEGIKELGSQILKEHPVENTQLQNEKLYLYYLQNGRDMYVDQELDINRLSDYDVDHIVPQSFLKDDSIDNKVLTRSDKARGKSDNVPSEEVVKKMKNYWRQLLNAKLITQRKFDNLTKAERGGLSELDKAGFIKRQLVETRQITKHVAQILDSRMNTKYDENDKLIREVKVITLKSKLVSDFRKDFQFYKVREINNYHHAHDAYLNAVVGTALIKKYPKLESEFVYGDYKVYDVRKMIAKSEQEIGKATAKYFFYSNIMNFFKTEITLANGEIRKRPLIETNGETGEIVWDKGRDFATVRKVLSMPQVNIVKKTEVQTGGFSKESILPKRNSDKLIARKKDWDPKKYGGFDSPTVAYSVLVVAKVEKGKSKKLKSVKELLGITIMERSSFEKNPIDFLEAKGYKEVKKDLIIKLPKYSLFELENGRKRMLASAGELQKGNELALPSKYVNFLYLASHYEKLKGSPEDNEQKQLFVEQHKHYLDEIIEQISEFSKRVILADANLDKVLSAYNKHRDKPIREQAENIIHLFTLTNLGAPAAFKYFDTTIDRKRYTSTKEVLDATLIHQSITGLYETRIDLSQLGGDGGGGSGGSGGSGGTLNIEDEHRLHETSKEPDVSLGSTWLSDFPQAWAETGGMGLAVRQAPLIIPLKATSTPVSIKQYPMSQEARLGIKPHIQRLLDQGILVPCQSPWNTPLLPVKKPGTNDYRPVQDLREVNKRVEDIHPTVPNPYNLLSGLPPSHQWYTVLDLKDAFFCLRLHPTSQPLFAFEWRDPEMGISGQLTWTRLPQGFKNSPTLFNEALHRDLADFRIQHPDLILLQYVDDLLLAATSELDCQQGTRALLQTLGNLGYRASAKKAQICQKQVKYLGYLLKEGQRWLTEARKETVMGQPTPKTPRQLREFLGKAGFCRLFIPGFAEMAAPLYPLTKPGTLFNWGPDQQKAYQEIKQALLTAPALGLPDLTKPFELFVDEKQGYAKGVLTQKLGPWRRPVAYLSKKLDPVAAGWPPCLRMVAAIAVLTKDAGKLTMGQPLVILAPHAVEALVKQPPDRWLSNARMTHYQALLLDTDRVQFGPVVALNPATLLPLPEEGLQHNCLDILAEAHGTRPDLTDQPLPDADHTWYTDGSSLLQEGQRKAGAAVTTETEVIWAKALPAGTSAQRAELIALTQALKMAEGKKLNVYTDSRYAFATAHIHGEIYRRRGWLTSEGKEIKNKDEILALLKALFLPKRLSIIHCPGHQKGHSAEARGNRMADQAARKAAITETPDTSTLLAGKRTADGSEFEKRTADGSEFESPKKKAKVE

SEQ ID NO: 2810 - protein, 2096 aa, synthetic construct
MPAAKRVKLDGGDKKYSIGLDIGTNSVGWAVITDEYKVPSKKFKVLGNTDRHSIKKNLIGALLFDSGETAEATRLKRTARRRYTRRKNRICYLQEIFSNEMAKVDDSFFHRLEESFLVEEDKKHERHPIFGNIVDEVAYHEKYPTIYHLRKKLVDSTDKADLRLIYLALAHMIKFRGHFLIEGDLNPDNSDVDKLFIQLVQTYNQLFEENPINASGVDAKAILSARLSKSRRLENLIAQLPGEKKNGLFGNLIALSLGLTPNFKSNFDLAEDAKLQLSKDTYDDDLDNLLAQIGDQYADLFLAAKNLSDAILLSDILRVNTEITKAPLSASMIKRYDEHHQDLTLLKALVRQQLPEKYKEIFFDQSKNGYAGYIDGGASQEEFYKFIKPILEKMDGTEELLVKLNREDLLRKQRTFDNGSIPHQIHLGELHAILRRQEDFYPFLKDNREKIEKILTFRIPYYVGPLARGNSRFAWMTRKSEETITPWNFEEVVDKGASAQSFIERMTNFDKNLPNEKVLPKHSLLYEYFTVYNELTKVKYVTEGMRKPAFLSGEQKKAIVDLLFKTNRKVTVKQLKEDYFKKIECFDSVEISGVEDRFNASLGTYHDLLKIIKDKDFLDNEENEDILEDIVLTLTLFEDREMIEERLKTYAHLFDDKVMKQLKRRRYTGWGRLSRKLINGIRDKQSGKTILDFLKSDGFANRNFMQLIHDDSLTFKEDIQKAQVSGQGDSLHEHIANLAGSPAIKKGILQTVKVVDELVKVMGRHKPENIVIEMARENQTTQKGQKNSRERMKRIEEGIKELGSQILKEHPVENTQLQNEKLYLYYLQNGRDMYVDQELDINRLSDYDVDHIVPQSFLKDDSIDNKVLTRSDKARGKSDNVPSEEVVKKMKNYWRQLLNAKLITQRKFDNLTKAERGGLSELDKAGFIKRQLVETRQITKHVAQILDSRMNTKYDENDKLIREVKVITLKSKLVSDFRKDFQFYKVREINNYHHAHDAYLNAVVGTALIKKYPKLESEFVYGDYKVYDVRKMIAKSEQEIGKATAKYFFYSNIMNFFKTEITLANGEIRKRPLIETNGETGEIVWDKGRDFATVRKVLSMPQVNIVKKTEVQTGGFSKESILPKRNSDKLIARKKDWDPKKYGGFDSPTVAYSVLVVAKVEKGKSKKLKSVKELLGITIMERSSFEKNPIDFLEAKGYKEVKKDLIIKLPKYSLFELENGRKRMLASAGELQKGNELALPSKYVNFLYLASHYEKLKGSPEDNEQKQLFVEQHKHYLDEIIEQISEFSKRVILADANLDKVLSAYNKHRDKPIREQAENIIHLFTLTNLGAPAAFKYFDTTIDRKRYTSTKEVLDATLIHQSITGLYETRIDLSQLGGDGGGSSGGGEAAAKGGTLNIEDEHRLHETSKEPDVSLGSTWLSDFPQAWAETGGMGLAVRQAPLIIPLKATSTPVSIKQYPMSQEARLGIKPHIQRLLDQGILVPCQSPWNTPLLPVKKPGTNDYRPVQDLREVNKRVEDIHPTVPNPYNLLSGLPPSHQWYTVLDLKDAFFCLRLHPTSQPLFAFEWRDPEMGISGQLTWTRLPQGFKNSPTLFNEALHRDLADFRIQHPDLILLQYVDDLLLAATSELDCQQGTRALLQTLGNLGYRASAKKAQICQKQVKYLGYLLKEGQRWLTEARKETVMGQPTPKTPRQLREFLGKAGFCRLFIPGFAEMAAPLYPLTKPGTLFNWGPDQQKAYQEIKQALLTAPALGLPDLTKPFELFVDEKQGYAKGVLTQKLGPWRRPVAYLSKKLDPVAAGWPPCLRMVAAIAVLTKDAGKLTMGQPLVILAPHAVEALVKQPPDRWLSNARMTHYQALLLDTDRVQFGPVVALNPATLLPLPEEGLQHNCLDILAEAHGTRPDLTDQPLPDADHTWYTDGSSLLQEGQRKAGAAVTTETEVIWAKALPAGTSAQRAELIALTQALKMAEGKKLNVYTDSRYAFATAHIHGEIYRRRGWLTSEGKEIKNKDEILALLKALFLPKRLSIIHCPGHQKGHSAEARGNRMADQAARKAAITETPDTSTLLAGKRTADGSEFEKRTADGSEFESPKKKAKVE

SEQ ID NO: 2811 - protein, 2094 aa, synthetic construct
MPAAKRVKLDGGDKKYSIGLDIGTNSVGWAVITDEYKVPSKKFKVLGNTDRHSIKKNLIGALLFDSGETAEATRLKRTARRRYTRRKNRICYLQEIFSNEMAKVDDSFFHRLEESFLVEEDKKHERHPIFGNIVDEVAYHEKYPTIYHLRKKLVDSTDKADLRLIYLALAHMIKFRGHFLIEGDLNPDNSDVDKLFIQLVQTYNQLFEENPINASGVDAKAILSARLSKSRRLENLIAQLPGEKKNGLFGNLIALSLGLTPNFKSNFDLAEDAKLQLSKDTYDDDLDNLLAQIGDQYADLFLAAKNLSDAILLSDILRVNTEITKAPLSASMIKRYDEHHQDLTLLKALVRQQLPEKYKEIFFDQSKNGYAGYIDGGASQEEFYKFIKPILEKMDGTEELLVKLNREDLLRKQRTFDNGSIPHQIHLGELHAILRRQEDFYPFLKDNREKIEKILTFRIPYYVGPLARGNSRFAWMTRKSEETITPWNFEEVVDKGASAQSFIERMTNFDKNLPNEKVLPKHSLLYEYFTVYNELTKVKYVTEGMRKPAFLSGEQKKAIVDLLFKTNRKVTVKQLKEDYFKKIECFDSVEISGVEDRFNASLGTYHDLLKIIKDKDFLDNEENEDILEDIVLTLTLFEDREMIEERLKTYAHLFDDKVMKQLKRRRYTGWGRLSRKLINGIRDKQSGKTILDFLKSDGFANRNFMQLIHDDSLTFKEDIQKAQVSGQGDSLHEHIANLAGSPAIKKGILQTVKVVDELVKVMGRHKPENIVIEMARENQTTQKGQKNSRERMKRIEEGIKELGSQILKEHPVENTQLQNEKLYLYYLQNGRDMYVDQELDINRLSDYDVDHIVPQSFLKDDSIDNKVLTRSDKARGKSDNVPSEEVVKKMKNYWRQLLNAKLITQRKFDNLTKAERGGLSELDKAGFIKRQLVETRQITKHVAQILDSRMNTKYDENDKLIREVKVITLKSKLVSDFRKDFQFYKVREINNYHHAHDAYLNAVVGTALIKKYPKLESEFVYGDYKVYDVRKMIAKSEQEIGKATAKYFFYSNIMNFFKTEITLANGEIRKRPLIETNGETGEIVWDKGRDFATVRKVLSMPQVNIVKKTEVQTGGFSKESILPKRNSDKLIARKKDWDPKKYGGFDSPTVAYSVLVVAKVEKGKSKKLKSVKELLGITIMERSSFEKNPIDFLEAKGYKEVKKDLIIKLPKYSLFELENGRKRMLASAGELQKGNELALPSKYVNFLYLASHYEKLKGSPEDNEQKQLFVEQHKHYLDEIIEQISEFSKRVILADANLDKVLSAYNKHRDKPIREQAENIIHLFTLTNLGAPAAFKYFDTTIDRKRYTSTKEVLDATLIHQSITGLYETRIDLSQLGGDGGGSSGSSGSSGGTLNIEDEHRLHETSKEPDVSLGSTWLSDFPQAWAETGGMGLAVRQAPLIIPLKATSTPVSIKQYPMSQEARLGIKPHIQRLLDQGILVPCQSPWNTPLLPVKKPGTNDYRPVQDLREVNKRVEDIHPTVPNPYNLLSGLPPSHQWYTVLDLKDAFFCLRLHPTSQPLFAFEWRDPEMGISGQLTWTRLPQGFKNSPTLFNEALHRDLADFRIQHPDLILLQYVDDLLLAATSELDCQQGTRALLQTLGNLGYRASAKKAQICQKQVKYLGYLLKEGQRWLTEARKETVMGQPTPKTPRQLREFLGKAGFCRLFIPGFAEMAAPLYPLTKPGTLFNWGPDQQKAYQEIKQALLTAPALGLPDLTKPFELFVDEKQGYAKGVLTQKLGPWRRPVAYLSKKLDPVAAGWPPCLRMVAAIAVLTKDAGKLTMGQPLVILAPHAVEALVKQPPDRWLSNARMTHYQALLLDTDRVQFGPVVALNPATLLPLPEEGLQHNCLDILAEAHGTRPDLTDQPLPDADHTWYTDGSSLLQEGQRKAGAAVTTETEVIWAKALPAGTSAQRAELIALTQALKMAEGKKLNVYTDSRYAFATAHIHGEIYRRRGWLTSEGKEIKNKDEILALLKALFLPKRLSIIHCPGHQKGHSAEARGNRMADQAARKAAITETPDTSTLLAGKRTADGSEFEKRTADGSEFESPKKKAKVE

SEQ ID NO: 2812 - protein, 2088 aa, synthetic construct
MPAAKRVKLDGGDKKYSIGLDIGTNSVGWAVITDEYKVPSKKFKVLGNTDRHSIKKNLIGALLFDSGETAEATRLKRTARRRYTRRKNRICYLQEIFSNEMAKVDDSFFHRLEESFLVEEDKKHERHPIFGNIVDEVAYHEKYPTIYHLRKKLVDSTDKADLRLIYLALAHMIKFRGHFLIEGDLNPDNSDVDKLFIQLVQTYNQLFEENPINASGVDAKAILSARLSKSRRLENLIAQLPGEKKNGLFGNLIALSLGLTPNFKSNFDLAEDAKLQLSKDTYDDDLDNLLAQIGDQYADLFLAAKNLSDAILLSDILRVNTEITKAPLSASMIKRYDEHHQDLTLLKALVRQQLPEKYKEIFFDQSKNGYAGYIDGGASQEEFYKFIKPILEKMDGTEELLVKLNREDLLRKQRTFDNGSIPHQIHLGELHAILRRQEDFYPFLKDNREKIEKILTFRIPYYVGPLARGNSRFAWMTRKSEETITPWNFEEVVDKGASAQSFIERMTNFDKNLPNEKVLPKHSLLYEYFTVYNELTKVKYVTEGMRKPAFLSGEQKKAIVDLLFKTNRKVTVKQLKEDYFKKIECFDSVEISGVEDRFNASLGTYHDLLKIIKDKDFLDNEENEDILEDIVLTLTLFEDREMIEERLKTYAHLFDDKVMKQLKRRRYTGWGRLSRKLINGIRDKQSGKTILDFLKSDGFANRNFMQLIHDDSLTFKEDIQKAQVSGQGDSLHEHIANLAGSPAIKKGILQTVKVVDELVKVMGRHKPENIVIEMARENQTTQKGQKNSRERMKRIEEGIKELGSQILKEHPVENTQLQNEKLYLYYLQNGRDMYVDQELDINRLSDYDVDHIVPQSFLKDDSIDNKVLTRSDKARGKSDNVPSEEVVKKMKNYWRQLLNAKLITQRKFDNLTKAERGGLSELDKAGFIKRQLVETRQITKHVAQILDSRMNTKYDENDKLIREVKVITLKSKLVSDFRKDFQFYKVREINNYHHAHDAYLNAVVGTALIKKYPKLESEFVYGDYKVYDVRKMIAKSEQEIGKATAKYFFYSNIMNFFKTEITLANGEIRKRPLIETNGETGEIVWDKGRDFATVRKVLSMPQVNIVKKTEVQTGGFSKESILPKRNSDKLIARKKDWDPKKYGGFDSPTVAYSVLVVAKVEKGKSKKLKSVKELLGITIMERSSFEKNPIDFLEAKGYKEVKKDLIIKLPKYSLFELENGRKRMLASAGELQKGNELALPSKYVNFLYLASHYEKLKGSPEDNEQKQLFVEQHKHYLDEIIEQISEFSKRVILADANLDKVLSAYNKHRDKPIREQAENIIHLFTLTNLGAPAAFKYFDTTIDRKRYTSTKEVLDATLIHQSITGLYETRIDLSQLGGDGGPAPGGTLNIEDEHRLHETSKEPDVSLGSTWLSDFPQAWAETGGMGLAVRQAPLIIPLKATSTPVSIKQYPMSQEARLGIKPHIQRLLDQGILVPCQSPWNTPLLPVKKPGTNDYRPVQDLREVNKRVEDIHPTVPNPYNLLSGLPPSHQWYTVLDLKDAFFCLRLHPTSQPLFAFEWRDPEMGISGQLTWTRLPQGFKNSPTLFNEALHRDLADFRIQHPDLILLQYVDDLLLAATSELDCQQGTRALLQTLGNLGYRASAKKAQICQKQVKYLGYLLKEGQRWLTEARKETVMGQPTPKTPRQLREFLGKAGFCRLFIPGFAEMAAPLYPLTKPGTLFNWGPDQQKAYQEIKQALLTAPALGLPDLTKPFELFVDEKQGYAKGVLTQKLGPWRRPVAYLSKKLDPVAAGWPPCLRMVAAIAVLTKDAGKLTMGQPLVILAPHAVEALVKQPPDRWLSNARMTHYQALLLDTDRVQFGPVVALNPATLLPLPEEGLQHNCLDILAEAHGTRPDLTDQPLPDADHTWYTDGSSLLQEGQRKAGAAVTTETEVIWAKALPAGTSAQRAELIALTQALKMAEGKKLNVYTDSRYAFATAHIHGEIYRRRGWLTSEGKEIKNKDEILALLKALFLPKRLSIIHCPGHQKGHSAEARGNRMADQAARKAAITETPDTSTLLAGKRTADGSEFEKRTADGSEFESPKKKAKVE

SEQ ID NO: 2813 - protein, 2115 aa, synthetic construct
MPAAKRVKLDGGDKKYSIGLDIGTNSVGWAVITDEYKVPSKKFKVLGNTDRHSIKKNLIGALLFDSGETAEATRLKRTARRRYTRRKNRICYLQEIFSNEMAKVDDSFFHRLEESFLVEEDKKHERHPIFGNIVDEVAYHEKYPTIYHLRKKLVDSTDKADLRLIYLALAHMIKFRGHFLIEGDLNPDNSDVDKLFIQLVQTYNQLFEENPINASGVDAKAILSARLSKSRRLENLIAQLPGEKKNGLFGNLIALSLGLTPNFKSNFDLAEDAKLQLSKDTYDDDLDNLLAQIGDQYADLFLAAKNLSDAILLSDILRVNTEITKAPLSASMIKRYDEHHQDLTLLKALVRQQLPEKYKEIFFDQSKNGYAGYIDGGASQEEFYKFIKPILEKMDGTEELLVKLNREDLLRKQRTFDNGSIPHQIHLGELHAILRRQEDFYPFLKDNREKIEKILTFRIPYYVGPLARGNSRFAWMTRKSEETITPWNFEEVVDKGASAQSFIERMTNFDKNLPNEKVLPKHSLLYEYFTVYNELTKVKYVTEGMRKPAFLSGEQKKAIVDLLFKTNRKVTVKQLKEDYFKKIECFDSVEISGVEDRFNASLGTYHDLLKIIKDKDFLDNEENEDILEDIVLTLTLFEDREMIEERLKTYAHLFDDKVMKQLKRRRYTGWGRLSRKLINGIRDKQSGKTILDFLKSDGFANRNFMQLIHDDSLTFKEDIQKAQVSGQGDSLHEHIANLAGSPAIKKGILQTVKVVDELVKVMGRHKPENIVIEMARENQTTQKGQKNSRERMKRIEEGIKELGSQILKEHPVENTQLQNEKLYLYYLQNGRDMYVDQELDINRLSDYDVDHIVPQSFLKDDSIDNKVLTRSDKARGKSDNVPSEEVVKKMKNYWRQLLNAKLITQRKFDNLTKAERGGLSELDKAGFIKRQLVETRQITKHVAQILDSRMNTKYDENDKLIREVKVITLKSKLVSDFRKDFQFYKVREINNYHHAHDAYLNAVVGTALIKKYPKLESEFVYGDYKVYDVRKMIAKSEQEIGKATAKYFFYSNIMNFFKTEITLANGEIRKRPLIETNGETGEIVWDKGRDFATVRKVLSMPQVNIVKKTEVQTGGFSKESILPKRNSDKLIARKKDWDPKKYGGFDSPTVAYSVLVVAKVEKGKSKKLKSVKELLGITIMERSSFEKNPIDFLEAKGYKEVKKDLIIKLPKYSLFELENGRKRMLASAGELQKGNELALPSKYVNFLYLASHYEKLKGSPEDNEQKQLFVEQHKHYLDEIIEQISEFSKRVILADANLDKVLSAYNKHRDKPIREQAENIIHLFTLTNLGAPAAFKYFDTTIDRKRYTSTKEVLDATLIHQSITGLYETRIDLSQLGGDGGEAAAKEAAAKEAAAKEAAAKEAAAKEAAAKGGTLNIEDEHRLHETSKEPDVSLGSTWLSDFPQAWAETGGMGLAVRQAPLIIPLKATSTPVSIKQYPMSQEARLGIKPHIQRLLDQGILVPCQSPWNTPLLPVKKPGTNDYRPVQDLREVNKRVEDIHPTVPNPYNLLSGLPPSHQWYTVLDLKDAFFCLRLHPTSQPLFAFEWRDPEMGISGQLTWTRLPQGFKNSPTLFNEALHRDLADFRIQHPDLILLQYVDDLLLAATSELDCQQGTRALLQTLGNLGYRASAKKAQICQKQVKYLGYLLKEGQRWLTEARKETVMGQPTPKTPRQLREFLGKAGFCRLFIPGFAEMAAPLYPLTKPGTLFNWGPDQQKAYQEIKQALLTAPALGLPDLTKPFELFVDEKQGYAKGVLTQKLGPWRRPVAYLSKKLDPVAAGWPPCLRMVAAIAVLTKDAGKLTMGQPLVILAPHAVEALVKQPPDRWLSNARMTHYQALLLDTDRVQFGPVVALNPATLLPLPEEGLQHNCLDILAEAHGTRPDLTDQPLPDADHTWYTDGSSLLQEGQRKAGAAVTTETEVIWAKALPAGTSAQRAELIALTQALKMAEGKKLNVYTDSRYAFATAHIHGEIYRRRGWLTSEGKEIKNKDEILALLKALFLPKRLSIIHCPGHQKGHSAEARGNRMADQAARKAAITETPDTSTLLAGKRTADGSEFEKRTADGSEFESPKKKAKVE

SEQ ID NO: 2814 - protein, 2097 aa, synthetic construct
MPAAKRVKLDGGDKKYSIGLDIGTNSVGWAVITDEYKVPSKKFKVLGNTDRHSIKKNLIGALLFDSGETAEATRLKRTARRRYTRRKNRICYLQEIFSNEMAKVDDSFFHRLEESFLVEEDKKHERHPIFGNIVDEVAYHEKYPTIYHLRKKLVDSTDKADLRLIYLALAHMIKFRGHFLIEGDLNPDNSDVDKLFIQLVQTYNQLFEENPINASGVDAKAILSARLSKSRRLENLIAQLPGEKKNGLFGNLIALSLGLTPNFKSNFDLAEDAKLQLSKDTYDDDLDNLLAQIGDQYADLFLAAKNLSDAILLSDILRVNTEITKAPLSASMIKRYDEHHQDLTLLKALVRQQLPEKYKEIFFDQSKNGYAGYIDGGASQEEFYKFIKPILEKMDGTEELLVKLNREDLLRKQRTFDNGSIPHQIHLGELHAILRRQEDFYPFLKDNREKIEKILTFRIPYYVGPLARGNSRFAWMTRKSEETITPWNFEEVVDKGASAQSFIERMTNFDKNLPNEKVLPKHSLLYEYFTVYNELTKVKYVTEGMRKPAFLSGEQKKAIVDLLFKTNRKVTVKQLKEDYFKKIECFDSVEISGVEDRFNASLGTYHDLLKIIKDKDFLDNEENEDILEDIVLTLTLFEDREMIEERLKTYAHLFDDKVMKQLKRRRYTGWGRLSRKLINGIRDKQSGKTILDFLKSDGFANRNFMQLIHDDSLTFKEDIQKAQVSGQGDSLHEHIANLAGSPAIKKGILQTVKVVDELVKVMGRHKPENIVIEMARENQTTQKGQKNSRERMKRIEEGIKELGSQILKEHPVENTQLQNEKLYLYYLQNGRDMYVDQELDINRLSDYDVDHIVPQSFLKDDSIDNKVLTRSDKARGKSDNVPSEEVVKKMKNYWRQLLNAKLITQRKFDNLTKAERGGLSELDKAGFIKRQLVETRQITKHVAQILDSRMNTKYDENDKLIREVKVITLKSKLVSDFRKDFQFYKVREINNYHHAHDAYLNAVVGTALIKKYPKLESEFVYGDYKVYDVRKMIAKSEQEIGKATAKYFFYSNIMNFFKTEITLANGEIRKRPLIETNGETGEIVWDKGRDFATVRKVLSMPQVNIVKKTEVQTGGFSKESILPKRNSDKLIARKKDWDPKKYGGFDSPTVAYSVLVVAKVEKGKSKKLKSVKELLGITIMERSSFEKNPIDFLEAKGYKEVKKDLIIKLPKYSLFELENGRKRMLASAGELQKGNELALPSKYVNFLYLASHYEKLKGSPEDNEQKQLFVEQHKHYLDEIIEQISEFSKRVILADANLDKVLSAYNKHRDKPIREQAENIIHLFTLTNLGAPAAFKYFDTTIDRKRYTSTKEVLDATLIHQSITGLYETRIDLSQLGGDGGGSAGSAAGSGEFGGTLNIEDEHRLHETSKEPDVSLGSTWLSDFPQAWAETGGMGLAVRQAPLIIPLKATSTPVSIKQYPMSQEARLGIKPHIQRLLDQGILVPCQSPWNTPLLPVKKPGTNDYRPVQDLREVNKRVEDIHPTVPNPYNLLSGLPPSHQWYTVLDLKDAFFCLRLHPTSQPLFAFEWRDPEMGISGQLTWTRLPQGFKNSPTLFNEALHRDLADFRIQHPDLILLQYVDDLLLAATSELDCQQGTRALLQTLGNLGYRASAKKAQICQKQVKYLGYLLKEGQRWLTEARKETVMGQPTPKTPRQLREFLGKAGFCRLFIPGFAEMAAPLYPLTKPGTLFNWGPDQQKAYQEIKQALLTAPALGLPDLTKPFELFVDEKQGYAKGVLTQKLGPWRRPVAYLSKKLDPVAAGWPPCLRMVAAIAVLTKDAGKLTMGQPLVILAPHAVEALVKQPPDRWLSNARMTHYQALLLDTDRVQFGPVVALNPATLLPLPEEGLQHNCLDILAEAHGTRPDLTDQPLPDADHTWYTDGSSLLQEGQRKAGAAVTTETEVIWAKALPAGTSAQRAELIALTQALKMAEGKKLNVYTDSRYAFATAHIHGEIYRRRGWLTSEGKEIKNKDEILALLKALFLPKRLSIIHCPGHQKGHSAEARGNRMADQAARKAAITETPDTSTLLAGKRTADGSEFEKRTADGSEFESPKKKAKVE

SEQ ID NO: 2815 - protein, 2096 aa, synthetic construct
MPAAKRVKLDGGDKKYSIGLDIGTNSVGWAVITDEYKVPSKKFKVLGNTDRHSIKKNLIGALLFDSGETAEATRLKRTARRRYTRRKNRICYLQEIFSNEMAKVDDSFFHRLEESFLVEEDKKHERHPIFGNIVDEVAYHEKYPTIYHLRKKLVDSTDKADLRLIYLALAHMIKFRGHFLIEGDLNPDNSDVDKLFIQLVQTYNQLFEENPINASGVDAKAILSARLSKSRRLENLIAQLPGEKKNGLFGNLIALSLGLTPNFKSNFDLAEDAKLQLSKDTYDDDLDNLLAQIGDQYADLFLAAKNLSDAILLSDILRVNTEITKAPLSASMIKRYDEHHQDLTLLKALVRQQLPEKYKEIFFDQSKNGYAGYIDGGASQEEFYKFIKPILEKMDGTEELLVKLNREDLLRKQRTFDNGSIPHQIHLGELHAILRRQEDFYPFLKDNREKIEKILTFRIPYYVGPLARGNSRFAWMTRKSEETITPWNFEEVVDKGASAQSFIERMTNFDKNLPNEKVLPKHSLLYEYFTVYNELTKVKYVTEGMRKPAFLSGEQKKAIVDLLFKTNRKVTVKQLKEDYFKKIECFDSVEISGVEDRFNASLGTYHDLLKIIKDKDFLDNEENEDILEDIVLTLTLFEDREMIEERLKTYAHLFDDKVMKQLKRRRYTGWGRLSRKLINGIRDKQSGKTILDFLKSDGFANRNFMQLIHDDSLTFKEDIQKAQVSGQGDSLHEHIANLAGSPAIKKGILQTVKVVDELVKVMGRHKPENIVIEMARENQTTQKGQKNSRERMKRIEEGIKELGSQILKEHPVENTQLQNEKLYLYYLQNGRDMYVDQELDINRLSDYDVDHIVPQSFLKDDSIDNKVLTRSDKARGKSDNVPSEEVVKKMKNYWRQLLNAKLITQRKFDNLTKAERGGLSELDKAGFIKRQLVETRQITKHVAQILDSRMNTKYDENDKLIREVKVITLKSKLVSDFRKDFQFYKVREINNYHHAHDAYLNAVVGTALIKKYPKLESEFVYGDYKVYDVRKMIAKSEQEIGKATAKYFFYSNIMNFFKTEITLANGEIRKRPLIETNGETGEIVWDKGRDFATVRKVLSMPQVNIVKKTEVQTGGFSKESILPKRNSDKLIARKKDWDPKKYGGFDSPTVAYSVLVVAKVEKGKSKKLKSVKELLGITIMERSSFEKNPIDFLEAKGYKEVKKDLIIKLPKYSLFELENGRKRMLASAGELQKGNELALPSKYVNFLYLASHYEKLKGSPEDNEQKQLFVEQHKHYLDEIIEQISEFSKRVILADANLDKVLSAYNKHRDKPIREQAENIIHLFTLTNLGAPAAFKYFDTTIDRKRYTSTKEVLDATLIHQSITGLYETRIDLSQLGGDGGEAAAKGGGGGSGGTLNIEDEHRLHETSKEPDVSLGSTWLSDFPQAWAETGGMGLAVRQAPLIIPLKATSTPVSIKQYPMSQEARLGIKPHIQRLLDQGILVPCQSPWNTPLLPVKKPGTNDYRPVQDLREVNKRVEDIHPTVPNPYNLLSGLPPSHQWYTVLDLKDAFFCLRLHPTSQPLFAFEWRDPEMGISGQLTWTRLPQGFKNSPTLFNEALHRDLADFRIQHPDLILLQYVDDLLLAATSELDCQQGTRALLQTLGNLGYRASAKKAQICQKQVKYLGYLLKEGQRWLTEARKETVMGQPTPKTPRQLREFLGKAGFCRLFIPGFAEMAAPLYPLTKPGTLFNWGPDQQKAYQEIKQALLTAPALGLPDLTKPFELFVDEKQGYAKGVLTQKLGPWRRPVAYLSKKLDPVAAGWPPCLRMVAAIAVLTKDAGKLTMGQPLVILAPHAVEALVKQPPDRWLSNARMTHYQALLLDTDRVQFGPVVALNPATLLPLPEEGLQHNCLDILAEAHGTRPDLTDQPLPDADHTWYTDGSSLLQEGQRKAGAAVTTETEVIWAKALPAGTSAQRAELIALTQALKMAEGKKLNVYTDSRYAFATAHIHGEIYRRRGWLTSEGKEIKNKDEILALLKALFLPKRLSIIHCPGHQKGHSAEARGNRMADQAARKAAITETPDTSTLLAGKRTADGSEFEKRTADGSEFESPKKKAKVE

SEQ ID NO: 2816 - protein, 2103 aa, synthetic construct
MPAAKRVKLDGGDKKYSIGLDIGTNSVGWAVITDEYKVPSKKFKVLGNTDRHSIKKNLIGALLFDSGETAEATRLKRTARRRYTRRKNRICYLQEIFSNEMAKVDDSFFHRLEESFLVEEDKKHERHPIFGNIVDEVAYHEKYPTIYHLRKKLVDSTDKADLRLIYLALAHMIKFRGHFLIEGDLNPDNSDVDKLFIQLVQTYNQLFEENPINASGVDAKAILSARLSKSRRLENLIAQLPGEKKNGLFGNLIALSLGLTPNFKSNFDLAEDAKLQLSKDTYDDDLDNLLAQIGDQYADLFLAAKNLSDAILLSDILRVNTEITKAPLSASMIKRYDEHHQDLTLLKALVRQQLPEKYKEIFFDQSKNGYAGYIDGGASQEEFYKFIKPILEKMDGTEELLVKLNREDLLRKQRTFDNGSIPHQIHLGELHAILRRQEDFYPFLKDNREKIEKILTFRIPYYVGPLARGNSRFAWMTRKSEETITPWNFEEVVDKGASAQSFIERMTNFDKNLPNEKVLPKHSLLYEYFTVYNELTKVKYVTEGMRKPAFLSGEQKKAIVDLLFKTNRKVTVKQLKEDYFKKIECFDSVEISGVEDRFNASLGTYHDLLKIIKDKDFLDNEENEDILEDIVLTLTLFEDREMIEERLKTYAHLFDDKVMKQLKRRRYTGWGRLSRKLINGIRDKQSGKTILDFLKSDGFANRNFMQLIHDDSLTFKEDIQKAQVSGQGDSLHEHIANLAGSPAIKKGILQTVKVVDELVKVMGRHKPENIVIEMARENQTTQKGQKNSRERMKRIEEGIKELGSQILKEHPVENTQLQNEKLYLYYLQNGRDMYVDQELDINRLSDYDVDHIVPQSFLKDDSIDNKVLTRSDKARGKSDNVPSEEVVKKMKNYWRQLLNAKLITQRKFDNLTKAERGGLSELDKAGFIKRQLVETRQITKHVAQILDSRMNTKYDENDKLIREVKVITLKSKLVSDFRKDFQFYKVREINNYHHAHDAYLNAVVGTALIKKYPKLESEFVYGDYKVYDVRKMIAKSEQEIGKATAKYFFYSNIMNFFKTEITLANGEIRKRPLIETNGETGEIVWDKGRDFATVRKVLSMPQVNIVKKTEVQTGGFSKESILPKRNSDKLIARKKDWDPKKYGGFDSPTVAYSVLVVAKVEKGKSKKLKSVKELLGITIMERSSFEKNPIDFLEAKGYKEVKKDLIIKLPKYSLFELENGRKRMLASAGELQKGNELALPSKYVNFLYLASHYEKLKGSPEDNEQKQLFVEQHKHYLDEIIEQISEFSKRVILADANLDKVLSAYNKHRDKPIREQAENIIHLFTLTNLGAPAAFKYFDTTIDRKRYTSTKEVLDATLIHQSITGLYETRIDLSQLGGDGGGSSGSSGSSGSSGSSGSSGGTLNIEDEHRLHETSKEPDVSLGSTWLSDFPQAWAETGGMGLAVRQAPLIIPLKATSTPVSIKQYPMSQEARLGIKPHIQRLLDQGILVPCQSPWNTPLLPVKKPGTNDYRPVQDLREVNKRVEDIHPTVPNPYNLLSGLPPSHQWYTVLDLKDAFFCLRLHPTSQPLFAFEWRDPEMGISGQLTWTRLPQGFKNSPTLFNEALHRDLADFRIQHPDLILLQYVDDLLLAATSELDCQQGTRALLQTLGNLGYRASAKKAQICQKQVKYLGYLLKEGQRWLTEARKETVMGQPTPKTPRQLREFLGKAGFCRLFIPGFAEMAAPLYPLTKPGTLFNWGPDQQKAYQEIKQALLTAPALGLPDLTKPFELFVDEKQGYAKGVLTQKLGPWRRPVAYLSKKLDPVAAGWPPCLRMVAAIAVLTKDAGKLTMGQPLVILAPHAVEALVKQPPDRWLSNARMTHYQALLLDTDRVQFGPVVALNPATLLPLPEEGLQHNCLDILAEAHGTRPDLTDQPLPDADHTWYTDGSSLLQEGQRKAGAAVTTETEVIWAKALPAGTSAQRAELIALTQALKMAEGKKLNVYTDSRYAFATAHIHGEIYRRRGWLTSEGKEIKNKDEILALLKALFLPKRLSIIHCPGHQKGHSAEARGNRMADQAARKAAITETPDTSTLLAGKRTADGSEFEKRTADGSEFESPKKKAKVE

SEQ ID NO: 2817 - protein, 2096 aa, synthetic construct
MPAAKRVKLDGGDKKYSIGLDIGTNSVGWAVITDEYKVPSKKFKVLGNTDRHSIKKNLIGALLFDSGETAEATRLKRTARRRYTRRKNRICYLQEIFSNEMAKVDDSFFHRLEESFLVEEDKKHERHPIFGNIVDEVAYHEKYPTIYHLRKKLVDSTDKADLRLIYLALAHMIKFRGHFLIEGDLNPDNSDVDKLFIQLVQTYNQLFEENPINASGVDAKAILSARLSKSRRLENLIAQLPGEKKNGLFGNLIALSLGLTPNFKSNFDLAEDAKLQLSKDTYDDDLDNLLAQIGDQYADLFLAAKNLSDAILLSDILRVNTEITKAPLSASMIKRYDEHHQDLTLLKALVRQQLPEKYKEIFFDQSKNGYAGYIDGGASQEEFYKFIKPILEKMDGTEELLVKLNREDLLRKQRTFDNGSIPHQIHLGELHAILRRQEDFYPFLKDNREKIEKILTFRIPYYVGPLARGNSRFAWMTRKSEETITPWNFEEVVDKGASAQSFIERMTNFDKNLPNEKVLPKHSLLYEYFTVYNELTKVKYVTEGMRKPAFLSGEQKKAIVDLLFKTNRKVTVKQLKEDYFKKIECFDSVEISGVEDRFNASLGTYHDLLKIIKDKDFLDNEENEDILEDIVLTLTLFEDREMIEERLKTYAHLFDDKVMKQLKRRRYTGWGRLSRKLINGIRDKQSGKTILDFLKSDGFANRNFMQLIHDDSLTFKEDIQKAQVSGQGDSLHEHIANLAGSPAIKKGILQTVKVVDELVKVMGRHKPENIVIEMARENQTTQKGQKNSRERMKRIEEGIKELGSQILKEHPVENTQLQNEKLYLYYLQNGRDMYVDQELDINRLSDYDVDHIVPQSFLKDDSIDNKVLTRSDKARGKSDNVPSEEVVKKMKNYWRQLLNAKLITQRKFDNLTKAERGGLSELDKAGFIKRQLVETRQITKHVAQILDSRMNTKYDENDKLIREVKVITLKSKLVSDFRKDFQFYKVREINNYHHAHDAYLNAVVGTALIKKYPKLESEFVYGDYKVYDVRKMIAKSEQEIGKATAKYFFYSNIMNFFKTEITLANGEIRKRPLIETNGETGEIVWDKGRDFATVRKVLSMPQVNIVKKTEVQTGGFSKESILPKRNSDKLIARKKDWDPKKYGGFDSPTVAYSVLVVAKVEKGKSKKLKSVKELLGITIMERSSFEKNPIDFLEAKGYKEVKKDLIIKLPKYSLFELENGRKRMLASAGELQKGNELALPSKYVNFLYLASHYEKLKGSPEDNEQKQLFVEQHKHYLDEIIEQISEFSKRVILADANLDKVLSAYNKHRDKPIREQAENIIHLFTLTNLGAPAAFKYFDTTIDRKRYTSTKEVLDATLIHQSITGLYETRIDLSQLGGDGGEAAAKGGSGSSGGTLNIEDEHRLHETSKEPDVSLGSTWLSDFPQAWAETGGMGLAVRQAPLIIPLKATSTPVSIKQYPMSQEARLGIKPHIQRLLDQGILVPCQSPWNTPLLPVKKPGTNDYRPVQDLREVNKRVEDIHPTVPNPYNLLSGLPPSHQWYTVLDLKDAFFCLRLHPTSQPLFAFEWRDPEMGISGQLTWTRLPQGFKNSPTLFNEALHRDLADFRIQHPDLILLQYVDDLLLAATSELDCQQGTRALLQTLGNLGYRASAKKAQICQKQVKYLGYLLKEGQRWLTEARKETVMGQPTPKTPRQLREFLGKAGFCRLFIPGFAEMAAPLYPLTKPGTLFNWGPDQQKAYQEIKQALLTAPALGLPDLTKPFELFVDEKQGYAKGVLTQKLGPWRRPVAYLSKKLDPVAAGWPPCLRMVAAIAVLTKDAGKLTMGQPLVILAPHAVEALVKQPPDRWLSNARMTHYQALLLDTDRVQFGPVVALNPATLLPLPEEGLQHNCLDILAEAHGTRPDLTDQPLPDADHTWYTDGSSLLQEGQRKAGAAVTTETEVIWAKALPAGTSAQRAELIALTQALKMAEGKKLNVYTDSRYAFATAHIHGEIYRRRGWLTSEGKEIKNKDEILALLKALFLPKRLSIIHCPGHQKGHSAEARGNRMADQAARKAAITETPDTSTLLAGKRTADGSEFEKRTADGSEFESPKKKAKVE

SEQ ID NO: 2818 - protein, 2094 aa, synthetic construct
MPAAKRVKLDGGDKKYSIGLDIGTNSVGWAVITDEYKVPSKKFKVLGNTDRHSIKKNLIGALLFDSGETAEATRLKRTARRRYTRRKNRICYLQEIFSNEMAKVDDSFFHRLEESFLVEEDKKHERHPIFGNIVDEVAYHEKYPTIYHLRKKLVDSTDKADLRLIYLALAHMIKFRGHFLIEGDLNPDNSDVDKLFIQLVQTYNQLFEENPINASGVDAKAILSARLSKSRRLENLIAQLPGEKKNGLFGNLIALSLGLTPNFKSNFDLAEDAKLQLSKDTYDDDLDNLLAQIGDQYADLFLAAKNLSDAILLSDILRVNTEITKAPLSASMIKRYDEHHQDLTLLKALVRQQLPEKYKEIFFDQSKNGYAGYIDGGASQEEFYKFIKPILEKMDGTEELLVKLNREDLLRKQRTFDNGSIPHQIHLGELHAILRRQEDFYPFLKDNREKIEKILTFRIPYYVGPLARGNSRFAWMTRKSEETITPWNFEEVVDKGASAQSFIERMTNFDKNLPNEKVLPKHSLLYEYFTVYNELTKVKYVTEGMRKPAFLSGEQKKAIVDLLFKTNRKVTVKQLKEDYFKKIECFDSVEISGVEDRFNASLGTYHDLLKIIKDKDFLDNEENEDILEDIVLTLTLFEDREMIEERLKTYAHLFDDKVMKQLKRRRYTGWGRLSRKLINGIRDKQSGKTILDFLKSDGFANRNFMQLIHDDSLTFKEDIQKAQVSGQGDSLHEHIANLAGSPAIKKGILQTVKVVDELVKVMGRHKPENIVIEMARENQTTQKGQKNSRERMKRIEEGIKELGSQILKEHPVENTQLQNEKLYLYYLQNGRDMYVDQELDINRLSDYDVDHIVPQSFLKDDSIDNKVLTRSDKARGKSDNVPSEEVVKKMKNYWRQLLNAKLITQRKFDNLTKAERGGLSELDKAGFIKRQLVETRQITKHVAQILDSRMNTKYDENDKLIREVKVITLKSKLVSDFRKDFQFYKVREINNYHHAHDAYLNAVVGTALIKKYPKLESEFVYGDYKVYDVRKMIAKSEQEIGKATAKYFFYSNIMNFFKTEITLANGEIRKRPLIETNGETGEIVWDKGRDFATVRKVLSMPQVNIVKKTEVQTGGFSKESILPKRNSDKLIARKKDWDPKKYGGFDSPTVAYSVLVVAKVEKGKSKKLKSVKELLGITIMERSSFEKNPIDFLEAKGYKEVKKDLIIKLPKYSLFELENGRKRMLASAGELQKGNELALPSKYVNFLYLASHYEKLKGSPEDNEQKQLFVEQHKHYLDEIIEQISEFSKRVILADANLDKVLSAYNKHRDKPIREQAENIIHLFTLTNLGAPAAFKYFDTTIDRKRYTSTKEVLDATLIHQSITGLYETRIDLSQLGGDGGGGSGSSGGGGGTLNIEDEHRLHETSKEPDVSLGSTWLSDFPQAWAETGGMGLAVRQAPLIIPLKATSTPVSIKQYPMSQEARLGIKPHIQRLLDQGILVPCQSPWNTPLLPVKKPGTNDYRPVQDLREVNKRVEDIHPTVPNPYNLLSGLPPSHQWYTVLDLKDAFFCLRLHPTSQPLFAFEWRDPEMGISGQLTWTRLPQGFKNSPTLFNEALHRDLADFRIQHPDLILLQYVDDLLLAATSELDCQQGTRALLQTLGNLGYRASAKKAQICQKQVKYLGYLLKEGQRWLTEARKETVMGQPTPKTPRQLREFLGKAGFCRLFIPGFAEMAAPLYPLTKPGTLFNWGPDQQKAYQEIKQALLTAPALGLPDLTKPFELFVDEKQGYAKGVLTQKLGPWRRPVAYLSKKLDPVAAGWPPCLRMVAAIAVLTKDAGKLTMGQPLVILAPHAVEALVKQPPDRWLSNARMTHYQALLLDTDRVQFGPVVALNPATLLPLPEEGLQHNCLDILAEAHGTRPDLTDQPLPDADHTWYTDGSSLLQEGQRKAGAAVTTETEVIWAKALPAGTSAQRAELIALTQALKMAEGKKLNVYTDSRYAFATAHIHGEIYRRRGWLTSEGKEIKNKDEILALLKALFLPKRLSIIHCPGHQKGHSAEARGNRMADQAARKAAITETPDTSTLLAGKRTADGSEFEKRTADGSEFESPKKKAKVE

SEQ ID NO: 2819 - protein, 2100 aa, synthetic construct
MPAAKRVKLDGGDKKYSIGLDIGTNSVGWAVITDEYKVPSKKFKVLGNTDRHSIKKNLIGALLFDSGETAEATRLKRTARRRYTRRKNRICYLQEIFSNEMAKVDDSFFHRLEESFLVEEDKKHERHPIFGNIVDEVAYHEKYPTIYHLRKKLVDSTDKADLRLIYLALAHMIKFRGHFLIEGDLNPDNSDVDKLFIQLVQTYNQLFEENPINASGVDAKAILSARLSKSRRLENLIAQLPGEKKNGLFGNLIALSLGLTPNFKSNFDLAEDAKLQLSKDTYDDDLDNLLAQIGDQYADLFLAAKNLSDAILLSDILRVNTEITKAPLSASMIKRYDEHHQDLTLLKALVRQQLPEKYKEIFFDQSKNGYAGYIDGGASQEEFYKFIKPILEKMDGTEELLVKLNREDLLRKQRTFDNGSIPHQIHLGELHAILRRQEDFYPFLKDNREKIEKILTFRIPYYVGPLARGNSRFAWMTRKSEETITPWNFEEVVDKGASAQSFIERMTNFDKNLPNEKVLPKHSLLYEYFTVYNELTKVKYVTEGMRKPAFLSGEQKKAIVDLLFKTNRKVTVKQLKEDYFKKIECFDSVEISGVEDRFNASLGTYHDLLKIIKDKDFLDNEENEDILEDIVLTLTLFEDREMIEERLKTYAHLFDDKVMKQLKRRRYTGWGRLSRKLINGIRDKQSGKTILDFLKSDGFANRNFMQLIHDDSLTFKEDIQKAQVSGQGDSLHEHIANLAGSPAIKKGILQTVKVVDELVKVMGRHKPENIVIEMARENQTTQKGQKNSRERMKRIEEGIKELGSQILKEHPVENTQLQNEKLYLYYLQNGRDMYVDQELDINRLSDYDVDHIVPQSFLKDDSIDNKVLTRSDKARGKSDNVPSEEVVKKMKNYWRQLLNAKLITQRKFDNLTKAERGGLSELDKAGFIKRQLVETRQITKHVAQILDSRMNTKYDENDKLIREVKVITLKSKLVSDFRKDFQFYKVREINNYHHAHDAYLNAVVGTALIKKYPKLESEFVYGDYKVYDVRKMIAKSEQEIGKATAKYFFYSNIMNFFKTEITLANGEIRKRPLIETNGETGEIVWDKGRDFATVRKVLSMPQVNIVKKTEVQTGGFSKESILPKRNSDKLIARKKDWDPKKYGGFDSPTVAYSVLVVAKVEKGKSKKLKSVKELLGITIMERSSFEKNPIDFLEAKGYKEVKKDLIIKLPKYSLFELENGRKRMLASAGELQKGNELALPSKYVNFLYLASHYEKLKGSPEDNEQKQLFVEQHKHYLDEIIEQISEFSKRVILADANLDKVLSAYNKHRDKPIREQAENIIHLFTLTNLGAPAAFKYFDTTIDRKRYTSTKEVLDATLIHQSITGLYETRIDLSQLGGDGGGGGGSGGGGSGGGGSGGTLNIEDEHRLHETSKEPDVSLGSTWLSDFPQAWAETGGMGLAVRQAPLIIPLKATSTPVSIKQYPMSQEARLGIKPHIQRLLDQGILVPCQSPWNTPLLPVKKPGTNDYRPVQDLREVNKRVEDIHPTVPNPYNLLSGLPPSHQWYTVLDLKDAFFCLRLHPTSQPLFAFEWRDPEMGISGQLTWTRLPQGFKNSPTLFNEALHRDLADFRIQHPDLILLQYVDDLLLAATSELDCQQGTRALLQTLGNLGYRASAKKAQICQKQVKYLGYLLKEGQRWLTEARKETVMGQPTPKTPRQLREFLGKAGFCRLFIPGFAEMAAPLYPLTKPGTLFNWGPDQQKAYQEIKQALLTAPALGLPDLTKPFELFVDEKQGYAKGVLTQKLGPWRRPVAYLSKKLDPVAAGWPPCLRMVAAIAVLTKDAGKLTMGQPLVILAPHAVEALVKQPPDRWLSNARMTHYQALLLDTDRVQFGPVVALNPATLLPLPEEGLQHNCLDILAEAHGTRPDLTDQPLPDADHTWYTDGSSLLQEGQRKAGAAVTTETEVIWAKALPAGTSAQRAELIALTQALKMAEGKKLNVYTDSRYAFATAHIHGEIYRRRGWLTSEGKEIKNKDEILALLKALFLPKRLSIIHCPGHQKGHSAEARGNRMADQAARKAAITETPDTSTLLAGKRTADGSEFEKRTADGSEFESPKKKAKVE

SEQ ID NO: 2820 - protein, 2091 aa, synthetic construct
MPAAKRVKLDGGDKKYSIGLDIGTNSVGWAVITDEYKVPSKKFKVLGNTDRHSIKKNLIGALLFDSGETAEATRLKRTARRRYTRRKNRICYLQEIFSNEMAKVDDSFFHRLEESFLVEEDKKHERHPIFGNIVDEVAYHEKYPTIYHLRKKLVDSTDKADLRLIYLALAHMIKFRGHFLIEGDLNPDNSDVDKLFIQLVQTYNQLFEENPINASGVDAKAILSARLSKSRRLENLIAQLPGEKKNGLFGNLIALSLGLTPNFKSNFDLAEDAKLQLSKDTYDDDLDNLLAQIGDQYADLFLAAKNLSDAILLSDILRVNTEITKAPLSASMIKRYDEHHQDLTLLKALVRQQLPEKYKEIFFDQSKNGYAGYIDGGASQEEFYKFIKPILEKMDGTEELLVKLNREDLLRKQRTFDNGSIPHQIHLGELHAILRRQEDFYPFLKDNREKIEKILTFRIPYYVGPLARGNSRFAWMTRKSEETITPWNFEEVVDKGASAQSFIERMTNFDKNLPNEKVLPKHSLLYEYFTVYNELTKVKYVTEGMRKPAFLSGEQKKAIVDLLFKTNRKVTVKQLKEDYFKKIECFDSVEISGVEDRFNASLGTYHDLLKIIKDKDFLDNEENEDILEDIVLTLTLFEDREMIEERLKTYAHLFDDKVMKQLKRRRYTGWGRLSRKLINGIRDKQSGKTILDFLKSDGFANRNFMQLIHDDSLTFKEDIQKAQVSGQGDSLHEHIANLAGSPAIKKGILQTVKVVDELVKVMGRHKPENIVIEMARENQTTQKGQKNSRERMKRIEEGIKELGSQILKEHPVENTQLQNEKLYLYYLQNGRDMYVDQELDINRLSDYDVDHIVPQSFLKDDSIDNKVLTRSDKARGKSDNVPSEEVVKKMKNYWRQLLNAKLITQRKFDNLTKAERGGLSELDKAGFIKRQLVETRQITKHVAQILDSRMNTKYDENDKLIREVKVITLKSKLVSDFRKDFQFYKVREINNYHHAHDAYLNAVVGTALIKKYPKLESEFVYGDYKVYDVRKMIAKSEQEIGKATAKYFFYSNIMNFFKTEITLANGEIRKRPLIETNGETGEIVWDKGRDFATVRKVLSMPQVNIVKKTEVQTGGFSKESILPKRNSDKLIARKKDWDPKKYGGFDSPTVAYSVLVVAKVEKGKSKKLKSVKELLGITIMERSSFEKNPIDFLEAKGYKEVKKDLIIKLPKYSLFELENGRKRMLASAGELQKGNELALPSKYVNFLYLASHYEKLKGSPEDNEQKQLFVEQHKHYLDEIIEQISEFSKRVILADANLDKVLSAYNKHRDKPIREQAENIIHLFTLTNLGAPAAFKYFDTTIDRKRYTSTKEVLDATLIHQSITGLYETRIDLSQLGGDGGGGGGSSGGTLNIEDEHRLHETSKEPDVSLGSTWLSDFPQAWAETGGMGLAVRQAPLIIPLKATSTPVSIKQYPMSQEARLGIKPHIQRLLDQGILVPCQSPWNTPLLPVKKPGTNDYRPVQDLREVNKRVEDIHPTVPNPYNLLSGLPPSHQWYTVLDLKDAFFCLRLHPTSQPLFAFEWRDPEMGISGQLTWTRLPQGFKNSPTLFNEALHRDLADFRIQHPDLILLQYVDDLLLAATSELDCQQGTRALLQTLGNLGYRASAKKAQICQKQVKYLGYLLKEGQRWLTEARKETVMGQPTPKTPRQLREFLGKAGFCRLFIPGFAEMAAPLYPLTKPGTLFNWGPDQQKAYQEIKQALLTAPALGLPDLTKPFELFVDEKQGYAKGVLTQKLGPWRRPVAYLSKKLDPVAAGWPPCLRMVAAIAVLTKDAGKLTMGQPLVILAPHAVEALVKQPPDRWLSNARMTHYQALLLDTDRVQFGPVVALNPATLLPLPEEGLQHNCLDILAEAHGTRPDLTDQPLPDADHTWYTDGSSLLQEGQRKAGAAVTTETEVIWAKALPAGTSAQRAELIALTQALKMAEGKKLNVYTDSRYAFATAHIHGEIYRRRGWLTSEGKEIKNKDEILALLKALFLPKRLSIIHCPGHQKGHSAEARGNRMADQAARKAAITETPDTSTLLAGKRTADGSEFEKRTADGSEFESPKKKAKVE

SEQ ID NO: 2821 - protein, 2093 aa, synthetic construct
MPAAKRVKLDGGDKKYSIGLDIGTNSVGWAVITDEYKVPSKKFKVLGNTDRHSIKKNLIGALLFDSGETAEATRLKRTARRRYTRRKNRICYLQEIFSNEMAKVDDSFFHRLEESFLVEEDKKHERHPIFGNIVDEVAYHEKYPTIYHLRKKLVDSTDKADLRLIYLALAHMIKFRGHFLIEGDLNPDNSDVDKLFIQLVQTYNQLFEENPINASGVDAKAILSARLSKSRRLENLIAQLPGEKKNGLFGNLIALSLGLTPNFKSNFDLAEDAKLQLSKDTYDDDLDNLLAQIGDQYADLFLAAKNLSDAILLSDILRVNTEITKAPLSASMIKRYDEHHQDLTLLKALVRQQLPEKYKEIFFDQSKNGYAGYIDGGASQEEFYKFIKPILEKMDGTEELLVKLNREDLLRKQRTFDNGSIPHQIHLGELHAILRRQEDFYPFLKDNREKIEKILTFRIPYYVGPLARGNSRFAWMTRKSEETITPWNFEEVVDKGASAQSFIERMTNFDKNLPNEKVLPKHSLLYEYFTVYNELTKVKYVTEGMRKPAFLSGEQKKAIVDLLFKTNRKVTVKQLKEDYFKKIECFDSVEISGVEDRFNASLGTYHDLLKIIKDKDFLDNEENEDILEDIVLTLTLFEDREMIEERLKTYAHLFDDKVMKQLKRRRYTGWGRLSRKLINGIRDKQSGKTILDFLKSDGFANRNFMQLIHDDSLTFKEDIQKAQVSGQGDSLHEHIANLAGSPAIKKGILQTVKVVDELVKVMGRHKPENIVIEMARENQTTQKGQKNSRERMKRIEEGIKELGSQILKEHPVENTQLQNEKLYLYYLQNGRDMYVDQELDINRLSDYDVDHIVPQSFLKDDSIDNKVLTRSDKARGKSDNVPSEEVVKKMKNYWRQLLNAKLITQRKFDNLTKAERGGLSELDKAGFIKRQLVETRQITKHVAQILDSRMNTKYDENDKLIREVKVITLKSKLVSDFRKDFQFYKVREINNYHHAHDAYLNAVVGTALIKKYPKLESEFVYGDYKVYDVRKMIAKSEQEIGKATAKYFFYSNIMNFFKTEITLANGEIRKRPLIETNGETGEIVWDKGRDFATVRKVLSMPQVNIVKKTEVQTGGFSKESILPKRNSDKLIARKKDWDPKKYGGFDSPTVAYSVLVVAKVEKGKSKKLKSVKELLGITIMERSSFEKNPIDFLEAKGYKEVKKDLIIKLPKYSLFELENGRKRMLASAGELQKGNELALPSKYVNFLYLASHYEKLKGSPEDNEQKQLFVEQHKHYLDEIIEQISEFSKRVILADANLDKVLSAYNKHRDKPIREQAENIIHLFTLTNLGAPAAFKYFDTTIDRKRYTSTKEVLDATLIHQSITGLYETRIDLSQLGGDGGEAAAKGSSGGTLNIEDEHRLHETSKEPDVSLGSTWLSDFPQAWAETGGMGLAVRQAPLIIPLKATSTPVSIKQYPMSQEARLGIKPHIQRLLDQGILVPCQSPWNTPLLPVKKPGTNDYRPVQDLREVNKRVEDIHPTVPNPYNLLSGLPPSHQWYTVLDLKDAFFCLRLHPTSQPLFAFEWRDPEMGISGQLTWTRLPQGFKNSPTLFNEALHRDLADFRIQHPDLILLQYVDDLLLAATSELDCQQGTRALLQTLGNLGYRASAKKAQICQKQVKYLGYLLKEGQRWLTEARKETVMGQPTPKTPRQLREFLGKAGFCRLFIPGFAEMAAPLYPLTKPGTLFNWGPDQQKAYQEIKQALLTAPALGLPDLTKPFELFVDEKQGYAKGVLTQKLGPWRRPVAYLSKKLDPVAAGWPPCLRMVAAIAVLTKDAGKLTMGQPLVILAPHAVEALVKQPPDRWLSNARMTHYQALLLDTDRVQFGPVVALNPATLLPLPEEGLQHNCLDILAEAHGTRPDLTDQPLPDADHTWYTDGSSLLQEGQRKAGAAVTTETEVIWAKALPAGTSAQRAELIALTQALKMAEGKKLNVYTDSRYAFATAHIHGEIYRRRGWLTSEGKEIKNKDEILALLKALFLPKRLSIIHCPGHQKGHSAEARGNRMADQAARKAAITETPDTSTLLAGKRTADGSEFEKRTADGSEFESPKKKAKVE

SEQ ID NO: 2822 - protein, 2096 aa, synthetic construct
MPAAKRVKLDGGDKKYSIGLDIGTNSVGWAVITDEYKVPSKKFKVLGNTDRHSIKKNLIGALLFDSGETAEATRLKRTARRRYTRRKNRICYLQEIFSNEMAKVDDSFFHRLEESFLVEEDKKHERHPIFGNIVDEVAYHEKYPTIYHLRKKLVDSTDKADLRLIYLALAHMIKFRGHFLIEGDLNPDNSDVDKLFIQLVQTYNQLFEENPINASGVDAKAILSARLSKSRRLENLIAQLPGEKKNGLFGNLIALSLGLTPNFKSNFDLAEDAKLQLSKDTYDDDLDNLLAQIGDQYADLFLAAKNLSDAILLSDILRVNTEITKAPLSASMIKRYDEHHQDLTLLKALVRQQLPEKYKEIFFDQSKNGYAGYIDGGASQEEFYKFIKPILEKMDGTEELLVKLNREDLLRKQRTFDNGSIPHQIHLGELHAILRRQEDFYPFLKDNREKIEKILTFRIPYYVGPLARGNSRFAWMTRKSEETITPWNFEEVVDKGASAQSFIERMTNFDKNLPNEKVLPKHSLLYEYFTVYNELTKVKYVTEGMRKPAFLSGEQKKAIVDLLFKTNRKVTVKQLKEDYFKKIECFDSVEISGVEDRFNASLGTYHDLLKIIKDKDFLDNEENEDILEDIVLTLTLFEDREMIEERLKTYAHLFDDKVMKQLKRRRYTGWGRLSRKLINGIRDKQSGKTILDFLKSDGFANRNFMQLIHDDSLTFKEDIQKAQVSGQGDSLHEHIANLAGSPAIKKGILQTVKVVDELVKVMGRHKPENIVIEMARENQTTQKGQKNSRERMKRIEEGIKELGSQILKEHPVENTQLQNEKLYLYYLQNGRDMYVDQELDINRLSDYDVDHIVPQSFLKDDSIDNKVLTRSDKARGKSDNVPSEEVVKKMKNYWRQLLNAKLITQRKFDNLTKAERGGLSELDKAGFIKRQLVETRQITKHVAQILDSRMNTKYDENDKLIREVKVITLKSKLVSDFRKDFQFYKVREINNYHHAHDAYLNAVVGTALIKKYPKLESEFVYGDYKVYDVRKMIAKSEQEIGKATAKYFFYSNIMNFFKTEITLANGEIRKRPLIETNGETGEIVWDKGRDFATVRKVLSMPQVNIVKKTEVQTGGFSKESILPKRNSDKLIARKKDWDPKKYGGFDSPTVAYSVLVVAKVEKGKSKKLKSVKELLGITIMERSSFEKNPIDFLEAKGYKEVKKDLIIKLPKYSLFELENGRKRMLASAGELQKGNELALPSKYVNFLYLASHYEKLKGSPEDNEQKQLFVEQHKHYLDEIIEQISEFSKRVILADANLDKVLSAYNKHRDKPIREQAENIIHLFTLTNLGAPAAFKYFDTTIDRKRYTSTKEVLDATLIHQSITGLYETRIDLSQLGGDGGPAPGGGEAAAKGGTLNIEDEHRLHETSKEPDVSLGSTWLSDFPQAWAETGGMGLAVRQAPLIIPLKATSTPVSIKQYPMSQEARLGIKPHIQRLLDQGILVPCQSPWNTPLLPVKKPGTNDYRPVQDLREVNKRVEDIHPTVPNPYNLLSGLPPSHQWYTVLDLKDAFFCLRLHPTSQPLFAFEWRDPEMGISGQLTWTRLPQGFKNSPTLFNEALHRDLADFRIQHPDLILLQYVDDLLLAATSELDCQQGTRALLQTLGNLGYRASAKKAQICQKQVKYLGYLLKEGQRWLTEARKETVMGQPTPKTPRQLREFLGKAGFCRLFIPGFAEMAAPLYPLTKPGTLFNWGPDQQKAYQEIKQALLTAPALGLPDLTKPFELFVDEKQGYAKGVLTQKLGPWRRPVAYLSKKLDPVAAGWPPCLRMVAAIAVLTKDAGKLTMGQPLVILAPHAVEALVKQPPDRWLSNARMTHYQALLLDTDRVQFGPVVALNPATLLPLPEEGLQHNCLDILAEAHGTRPDLTDQPLPDADHTWYTDGSSLLQEGQRKAGAAVTTETEVIWAKALPAGTSAQRAELIALTQALKMAEGKKLNVYTDSRYAFATAHIHGEIYRRRGWLTSEGKEIKNKDEILALLKALFLPKRLSIIHCPGHQKGHSAEARGNRMADQAARKAAITETPDTSTLLAGKRTADGSEFEKRTADGSEFESPKKKAKVE

SEQ ID NO: 2823 - protein, 2090 aa, synthetic construct
MPAAKRVKLDGGDKKYSIGLDIGTNSVGWAVITDEYKVPSKKFKVLGNTDRHSIKKNLIGALLFDSGETAEATRLKRTARRRYTRRKNRICYLQEIFSNEMAKVDDSFFHRLEESFLVEEDKKHERHPIFGNIVDEVAYHEKYPTIYHLRKKLVDSTDKADLRLIYLALAHMIKFRGHFLIEGDLNPDNSDVDKLFIQLVQTYNQLFEENPINASGVDAKAILSARLSKSRRLENLIAQLPGEKKNGLFGNLIALSLGLTPNFKSNFDLAEDAKLQLSKDTYDDDLDNLLAQIGDQYADLFLAAKNLSDAILLSDILRVNTEITKAPLSASMIKRYDEHHQDLTLLKALVRQQLPEKYKEIFFDQSKNGYAGYIDGGASQEEFYKFIKPILEKMDGTEELLVKLNREDLLRKQRTFDNGSIPHQIHLGELHAILRRQEDFYPFLKDNREKIEKILTFRIPYYVGPLARGNSRFAWMTRKSEETITPWNFEEVVDKGASAQSFIERMTNFDKNLPNEKVLPKHSLLYEYFTVYNELTKVKYVTEGMRKPAFLSGEQKKAIVDLLFKTNRKVTVKQLKEDYFKKIECFDSVEISGVEDRFNASLGTYHDLLKIIKDKDFLDNEENEDILEDIVLTLTLFEDREMIEERLKTYAHLFDDKVMKQLKRRRYTGWGRLSRKLINGIRDKQSGKTILDFLKSDGFANRNFMQLIHDDSLTFKEDIQKAQVSGQGDSLHEHIANLAGSPAIKKGILQTVKVVDELVKVMGRHKPENIVIEMARENQTTQKGQKNSRERMKRIEEGIKELGSQILKEHPVENTQLQNEKLYLYYLQNGRDMYVDQELDINRLSDYDVDHIVPQSFLKDDSIDNKVLTRSDKARGKSDNVPSEEVVKKMKNYWRQLLNAKLITQRKFDNLTKAERGGLSELDKAGFIKRQLVETRQITKHVAQILDSRMNTKYDENDKLIREVKVITLKSKLVSDFRKDFQFYKVREINNYHHAHDAYLNAVVGTALIKKYPKLESEFVYGDYKVYDVRKMIAKSEQEIGKATAKYFFYSNIMNFFKTEITLANGEIRKRPLIETNGETGEIVWDKGRDFATVRKVLSMPQVNIVKKTEVQTGGFSKESILPKRNSDKLIARKKDWDPKKYGGFDSPTVAYSVLVVAKVEKGKSKKLKSVKELLGITIMERSSFEKNPIDFLEAKGYKEVKKDLIIKLPKYSLFELENGRKRMLASAGELQKGNELALPSKYVNFLYLASHYEKLKGSPEDNEQKQLFVEQHKHYLDEIIEQISEFSKRVILADANLDKVLSAYNKHRDKPIREQAENIIHLFTLTNLGAPAAFKYFDTTIDRKRYTSTKEVLDATLIHQSITGLYETRIDLSQLGGDGGEAAAKGGTLNIEDEHRLHETSKEPDVSLGSTWLSDFPQAWAETGGMGLAVRQAPLIIPLKATSTPVSIKQYPMSQEARLGIKPHIQRLLDQGILVPCQSPWNTPLLPVKKPGTNDYRPVQDLREVNKRVEDIHPTVPNPYNLLSGLPPSHQWYTVLDLKDAFFCLRLHPTSQPLFAFEWRDPEMGISGQLTWTRLPQGFKNSPTLFNEALHRDLADFRIQHPDLILLQYVDDLLLAATSELDCQQGTRALLQTLGNLGYRASAKKAQICQKQVKYLGYLLKEGQRWLTEARKETVMGQPTPKTPRQLREFLGKAGFCRLFIPGFAEMAAPLYPLTKPGTLFNWGPDQQKAYQEIKQALLTAPALGLPDLTKPFELFVDEKQGYAKGVLTQKLGPWRRPVAYLSKKLDPVAAGWPPCLRMVAAIAVLTKDAGKLTMGQPLVILAPHAVEALVKQPPDRWLSNARMTHYQALLLDTDRVQFGPVVALNPATLLPLPEEGLQHNCLDILAEAHGTRPDLTDQPLPDADHTWYTDGSSLLQEGQRKAGAAVTTETEVIWAKALPAGTSAQRAELIALTQALKMAEGKKLNVYTDSRYAFATAHIHGEIYRRRGWLTSEGKEIKNKDEILALLKALFLPKRLSIIHCPGHQKGHSAEARGNRMADQAARKAAITETPDTSTLLAGKRTADGSEFEKRTADGSEFESPKKKAKVE

SEQ ID NO: 2824 - protein, 2088 aa, synthetic construct
MPAAKRVKLDGGDKKYSIGLDIGTNSVGWAVITDEYKVPSKKFKVLGNTDRHSIKKNLIGALLFDSGETAEATRLKRTARRRYTRRKNRICYLQEIFSNEMAKVDDSFFHRLEESFLVEEDKKHERHPIFGNIVDEVAYHEKYPTIYHLRKKLVDSTDKADLRLIYLALAHMIKFRGHFLIEGDLNPDNSDVDKLFIQLVQTYNQLFEENPINASGVDAKAILSARLSKSRRLENLIAQLPGEKKNGLFGNLIALSLGLTPNFKSNFDLAEDAKLQLSKDTYDDDLDNLLAQIGDQYADLFLAAKNLSDAILLSDILRVNTEITKAPLSASMIKRYDEHHQDLTLLKALVRQQLPEKYKEIFFDQSKNGYAGYIDGGASQEEFYKFIKPILEKMDGTEELLVKLNREDLLRKQRTFDNGSIPHQIHLGELHAILRRQEDFYPFLKDNREKIEKILTFRIPYYVGPLARGNSRFAWMTRKSEETITPWNFEEVVDKGASAQSFIERMTNFDKNLPNEKVLPKHSLLYEYFTVYNELTKVKYVTEGMRKPAFLSGEQKKAIVDLLFKTNRKVTVKQLKEDYFKKIECFDSVEISGVEDRFNASLGTYHDLLKIIKDKDFLDNEENEDILEDIVLTLTLFEDREMIEERLKTYAHLFDDKVMKQLKRRRYTGWGRLSRKLINGIRDKQSGKTILDFLKSDGFANRNFMQLIHDDSLTFKEDIQKAQVSGQGDSLHEHIANLAGSPAIKKGILQTVKVVDELVKVMGRHKPENIVIEMARENQTTQKGQKNSRERMKRIEEGIKELGSQILKEHPVENTQLQNEKLYLYYLQNGRDMYVDQELDINRLSDYDVDHIVPQSFLKDDSIDNKVLTRSDKARGKSDNVPSEEVVKKMKNYWRQLLNAKLITQRKFDNLTKAERGGLSELDKAGFIKRQLVETRQITKHVAQILDSRMNTKYDENDKLIREVKVITLKSKLVSDFRKDFQFYKVREINNYHHAHDAYLNAVVGTALIKKYPKLESEFVYGDYKVYDVRKMIAKSEQEIGKATAKYFFYSNIMNFFKTEITLANGEIRKRPLIETNGETGEIVWDKGRDFATVRKVLSMPQVNIVKKTEVQTGGFSKESILPKRNSDKLIARKKDWDPKKYGGFDSPTVAYSVLVVAKVEKGKSKKLKSVKELLGITIMERSSFEKNPIDFLEAKGYKEVKKDLIIKLPKYSLFELENGRKRMLASAGELQKGNELALPSKYVNFLYLASHYEKLKGSPEDNEQKQLFVEQHKHYLDEIIEQISEFSKRVILADANLDKVLSAYNKHRDKPIREQAENIIHLFTLTNLGAPAAFKYFDTTIDRKRYTSTKEVLDATLIHQSITGLYETRIDLSQLGGDGGGGGGGTLNIEDEHRLHETSKEPDVSLGSTWLSDFPQAWAETGGMGLAVRQAPLIIPLKATSTPVSIKQYPMSQEARLGIKPHIQRLLDQGILVPCQSPWNTPLLPVKKPGTNDYRPVQDLREVNKRVEDIHPTVPNPYNLLSGLPPSHQWYTVLDLKDAFFCLRLHPTSQPLFAFEWRDPEMGISGQLTWTRLPQGFKNSPTLFNEALHRDLADFRIQHPDLILLQYVDDLLLAATSELDCQQGTRALLQTLGNLGYRASAKKAQICQKQVKYLGYLLKEGQRWLTEARKETVMGQPTPKTPRQLREFLGKAGFCRLFIPGFAEMAAPLYPLTKPGTLFNWGPDQQKAYQEIKQALLTAPALGLPDLTKPFELFVDEKQGYAKGVLTQKLGPWRRPVAYLSKKLDPVAAGWPPCLRMVAAIAVLTKDAGKLTMGQPLVILAPHAVEALVKQPPDRWLSNARMTHYQALLLDTDRVQFGPVVALNPATLLPLPEEGLQHNCLDILAEAHGTRPDLTDQPLPDADHTWYTDGSSLLQEGQRKAGAAVTTETEVIWAKALPAGTSAQRAELIALTQALKMAEGKKLNVYTDSRYAFATAHIHGEIYRRRGWLTSEGKEIKNKDEILALLKALFLPKRLSIIHCPGHQKGHSAEARGNRMADQAARKAAITETPDTSTLLAGKRTADGSEFEKRTADGSEFESPKKKAKVE

SEQ ID NO: 2825 - protein, 2090 aa, synthetic construct
MPAAKRVKLDGGDKKYSIGLDIGTNSVGWAVITDEYKVPSKKFKVLGNTDRHSIKKNLIGALLFDSGETAEATRLKRTARRRYTRRKNRICYLQEIFSNEMAKVDDSFFHRLEESFLVEEDKKHERHPIFGNIVDEVAYHEKYPTIYHLRKKLVDSTDKADLRLIYLALAHMIKFRGHFLIEGDLNPDNSDVDKLFIQLVQTYNQLFEENPINASGVDAKAILSARLSKSRRLENLIAQLPGEKKNGLFGNLIALSLGLTPNFKSNFDLAEDAKLQLSKDTYDDDLDNLLAQIGDQYADLFLAAKNLSDAILLSDILRVNTEITKAPLSASMIKRYDEHHQDLTLLKALVRQQLPEKYKEIFFDQSKNGYAGYIDGGASQEEFYKFIKPILEKMDGTEELLVKLNREDLLRKQRTFDNGSIPHQIHLGELHAILRRQEDFYPFLKDNREKIEKILTFRIPYYVGPLARGNSRFAWMTRKSEETITPWNFEEVVDKGASAQSFIERMTNFDKNLPNEKVLPKHSLLYEYFTVYNELTKVKYVTEGMRKPAFLSGEQKKAIVDLLFKTNRKVTVKQLKEDYFKKIECFDSVEISGVEDRFNASLGTYHDLLKIIKDKDFLDNEENEDILEDIVLTLTLFEDREMIEERLKTYAHLFDDKVMKQLKRRRYTGWGRLSRKLINGIRDKQSGKTILDFLKSDGFANRNFMQLIHDDSLTFKEDIQKAQVSGQGDSLHEHIANLAGSPAIKKGILQTVKVVDELVKVMGRHKPENIVIEMARENQTTQKGQKNSRERMKRIEEGIKELGSQILKEHPVENTQLQNEKLYLYYLQNGRDMYVDQELDINRLSDYDVDHIVPQSFLKDDSIDNKVLTRSDKARGKSDNVPSEEVVKKMKNYWRQLLNAKLITQRKFDNLTKAERGGLSELDKAGFIKRQLVETRQITKHVAQILDSRMNTKYDENDKLIREVKVITLKSKLVSDFRKDFQFYKVREINNYHHAHDAYLNAVVGTALIKKYPKLESEFVYGDYKVYDVRKMIAKSEQEIGKATAKYFFYSNIMNFFKTEITLANGEIRKRPLIETNGETGEIVWDKGRDFATVRKVLSMPQVNIVKKTEVQTGGFSKESILPKRNSDKLIARKKDWDPKKYGGFDSPTVAYSVLVVAKVEKGKSKKLKSVKELLGITIMERSSFEKNPIDFLEAKGYKEVKKDLIIKLPKYSLFELENGRKRMLASAGELQKGNELALPSKYVNFLYLASHYEKLKGSPEDNEQKQLFVEQHKHYLDEIIEQISEFSKRVILADANLDKVLSAYNKHRDKPIREQAENIIHLFTLTNLGAPAAFKYFDTTIDRKRYTSTKEVLDATLIHQSITGLYETRIDLSQLGGDGGGGGGSGGTLNIEDEHRLHETSKEPDVSLGSTWLSDFPQAWAETGGMGLAVRQAPLIIPLKATSTPVSIKQYPMSQEARLGIKPHIQRLLDQGILVPCQSPWNTPLLPVKKPGTNDYRPVQDLREVNKRVEDIHPTVPNPYNLLSGLPPSHQWYTVLDLKDAFFCLRLHPTSQPLFAFEWRDPEMGISGQLTWTRLPQGFKNSPTLFNEALHRDLADFRIQHPDLILLQYVDDLLLAATSELDCQQGTRALLQTLGNLGYRASAKKAQICQKQVKYLGYLLKEGQRWLTEARKETVMGQPTPKTPRQLREFLGKAGFCRLFIPGFAEMAAPLYPLTKPGTLFNWGPDQQKAYQEIKQALLTAPALGLPDLTKPFELFVDEKQGYAKGVLTQKLGPWRRPVAYLSKKLDPVAAGWPPCLRMVAAIAVLTKDAGKLTMGQPLVILAPHAVEALVKQPPDRWLSNARMTHYQALLLDTDRVQFGPVVALNPATLLPLPEEGLQHNCLDILAEAHGTRPDLTDQPLPDADHTWYTDGSSLLQEGQRKAGAAVTTETEVIWAKALPAGTSAQRAELIALTQALKMAEGKKLNVYTDSRYAFATAHIHGEIYRRRGWLTSEGKEIKNKDEILALLKALFLPKRLSIIHCPGHQKGHSAEARGNRMADQAARKAAITETPDTSTLLAGKRTADGSEFEKRTADGSEFESPKKKAKVE

SEQ ID NO: 2826 - protein, 2096 aa, synthetic construct
MPAAKRVKLDGGDKKYSIGLDIGTNSVGWAVITDEYKVPSKKFKVLGNTDRHSIKKNLIGALLFDSGETAEATRLKRTARRRYTRRKNRICYLQEIFSNEMAKVDDSFFHRLEESFLVEEDKKHERHPIFGNIVDEVAYHEKYPTIYHLRKKLVDSTDKADLRLIYLALAHMIKFRGHFLIEGDLNPDNSDVDKLFIQLVQTYNQLFEENPINASGVDAKAILSARLSKSRRLENLIAQLPGEKKNGLFGNLIALSLGLTPNFKSNFDLAEDAKLQLSKDTYDDDLDNLLAQIGDQYADLFLAAKNLSDAILLSDILRVNTEITKAPLSASMIKRYDEHHQDLTLLKALVRQQLPEKYKEIFFDQSKNGYAGYIDGGASQEEFYKFIKPILEKMDGTEELLVKLNREDLLRKQRTFDNGSIPHQIHLGELHAILRRQEDFYPFLKDNREKIEKILTFRIPYYVGPLARGNSRFAWMTRKSEETITPWNFEEVVDKGASAQSFIERMTNFDKNLPNEKVLPKHSLLYEYFTVYNELTKVKYVTEGMRKPAFLSGEQKKAIVDLLFKTNRKVTVKQLKEDYFKKIECFDSVEISGVEDRFNASLGTYHDLLKIIKDKDFLDNEENEDILEDIVLTLTLFEDREMIEERLKTYAHLFDDKVMKQLKRRRYTGWGRLSRKLINGIRDKQSGKTILDFLKSDGFANRNFMQLIHDDSLTFKEDIQKAQVSGQGDSLHEHIANLAGSPAIKKGILQTVKVVDELVKVMGRHKPENIVIEMARENQTTQKGQKNSRERMKRIEEGIKELGSQILKEHPVENTQLQNEKLYLYYLQNGRDMYVDQELDINRLSDYDVDHIVPQSFLKDDSIDNKVLTRSDKARGKSDNVPSEEVVKKMKNYWRQLLNAKLITQRKFDNLTKAERGGLSELDKAGFIKRQLVETRQITKHVAQILDSRMNTKYDENDKLIREVKVITLKSKLVSDFRKDFQFYKVREINNYHHAHDAYLNAVVGTALIKKYPKLESEFVYGDYKVYDVRKMIAKSEQEIGKATAKYFFYSNIMNFFKTEITLANGEIRKRPLIETNGETGEIVWDKGRDFATVRKVLSMPQVNIVKKTEVQTGGFSKESILPKRNSDKLIARKKDWDPKKYGGFDSPTVAYSVLVVAKVEKGKSKKLKSVKELLGITIMERSSFEKNPIDFLEAKGYKEVKKDLIIKLPKYSLFELENGRKRMLASAGELQKGNELALPSKYVNFLYLASHYEKLKGSPEDNEQKQLFVEQHKHYLDEIIEQISEFSKRVILADANLDKVLSAYNKHRDKPIREQAENIIHLFTLTNLGAPAAFKYFDTTIDRKRYTSTKEVLDATLIHQSITGLYETRIDLSQLGGDGGGGSEAAAKGSSGGTLNIEDEHRLHETSKEPDVSLGSTWLSDFPQAWAETGGMGLAVRQAPLIIPLKATSTPVSIKQYPMSQEARLGIKPHIQRLLDQGILVPCQSPWNTPLLPVKKPGTNDYRPVQDLREVNKRVEDIHPTVPNPYNLLSGLPPSHQWYTVLDLKDAFFCLRLHPTSQPLFAFEWRDPEMGISGQLTWTRLPQGFKNSPTLFNEALHRDLADFRIQHPDLILLQYVDDLLLAATSELDCQQGTRALLQTLGNLGYRASAKKAQICQKQVKYLGYLLKEGQRWLTEARKETVMGQPTPKTPRQLREFLGKAGFCRLFIPGFAEMAAPLYPLTKPGTLFNWGPDQQKAYQEIKQALLTAPALGLPDLTKPFELFVDEKQGYAKGVLTQKLGPWRRPVAYLSKKLDPVAAGWPPCLRMVAAIAVLTKDAGKLTMGQPLVILAPHAVEALVKQPPDRWLSNARMTHYQALLLDTDRVQFGPVVALNPATLLPLPEEGLQHNCLDILAEAHGTRPDLTDQPLPDADHTWYTDGSSLLQEGQRKAGAAVTTETEVIWAKALPAGTSAQRAELIALTQALKMAEGKKLNVYTDSRYAFATAHIHGEIYRRRGWLTSEGKEIKNKDEILALLKALFLPKRLSIIHCPGHQKGHSAEARGNRMADQAARKAAITETPDTSTLLAGKRTADGSEFEKRTADGSEFESPKKKAKVE

SEQ ID NO: 2827 - protein, 2115 aa, synthetic construct
MPAAKRVKLDGGDKKYSIGLDIGTNSVGWAVITDEYKVPSKKFKVLGNTDRHSIKKNLIGALLFDSGETAEATRLKRTARRRYTRRKNRICYLQEIFSNEMAKVDDSFFHRLEESFLVEEDKKHERHPIFGNIVDEVAYHEKYPTIYHLRKKLVDSTDKADLRLIYLALAHMIKFRGHFLIEGDLNPDNSDVDKLFIQLVQTYNQLFEENPINASGVDAKAILSARLSKSRRLENLIAQLPGEKKNGLFGNLIALSLGLTPNFKSNFDLAEDAKLQLSKDTYDDDLDNLLAQIGDQYADLFLAAKNLSDAILLSDILRVNTEITKAPLSASMIKRYDEHHQDLTLLKALVRQQLPEKYKEIFFDQSKNGYAGYIDGGASQEEFYKFIKPILEKMDGTEELLVKLNREDLLRKQRTFDNGSIPHQIHLGELHAILRRQEDFYPFLKDNREKIEKILTFRIPYYVGPLARGNSRFAWMTRKSEETITPWNFEEVVDKGASAQSFIERMTNFDKNLPNEKVLPKHSLLYEYFTVYNELTKVKYVTEGMRKPAFLSGEQKKAIVDLLFKTNRKVTVKQLKEDYFKKIECFDSVEISGVEDRFNASLGTYHDLLKIIKDKDFLDNEENEDILEDIVLTLTLFEDREMIEERLKTYAHLFDDKVMKQLKRRRYTGWGRLSRKLINGIRDKQSGKTILDFLKSDGFANRNFMQLIHDDSLTFKEDIQKAQVSGQGDSLHEHIANLAGSPAIKKGILQTVKVVDELVKVMGRHKPENIVIEMARENQTTQKGQKNSRERMKRIEEGIKELGSQILKEHPVENTQLQNEKLYLYYLQNGRDMYVDQELDINRLSDYDVDHIVPQSFLKDDSIDNKVLTRSDKARGKSDNVPSEEVVKKMKNYWRQLLNAKLITQRKFDNLTKAERGGLSELDKAGFIKRQLVETRQITKHVAQILDSRMNTKYDENDKLIREVKVITLKSKLVSDFRKDFQFYKVREINNYHHAHDAYLNAVVGTALIKKYPKLESEFVYGDYKVYDVRKMIAKSEQEIGKATAKYFFYSNIMNFFKTEITLANGEIRKRPLIETNGETGEIVWDKGRDFATVRKVLSMPQVNIVKKTEVQTGGFSKESILPKRNSDKLIARKKDWDPKKYGGFDSPTVAYSVLVVAKVEKGKSKKLKSVKELLGITIMERSSFEKNPIDFLEAKGYKEVKKDLIIKLPKYSLFELENGRKRMLASAGELQKGNELALPSKYVNFLYLASHYEKLKGSPEDNEQKQLFVEQHKHYLDEIIEQISEFSKRVILADANLDKVLSAYNKHRDKPIREQAENIIHLFTLTNLGAPAAFKYFDTTIDRKRYTSTKEVLDATLIHQSITGLYETRIDLSQLGGDGGGGGGSGGGGSGGGGSGGGGSGGGGSGGGGSGGTLNIEDEHRLHETSKEPDVSLGSTWLSDFPQAWAETGGMGLAVRQAPLIIPLKATSTPVSIKQYPMSQEARLGIKPHIQRLLDQGILVPCQSPWNTPLLPVKKPGTNDYRPVQDLREVNKRVEDIHPTVPNPYNLLSGLPPSHQWYTVLDLKDAFFCLRLHPTSQPLFAFEWRDPEMGISGQLTWTRLPQGFKNSPTLFNEALHRDLADFRIQHPDLILLQYVDDLLLAATSELDCQQGTRALLQTLGNLGYRASAKKAQICQKQVKYLGYLLKEGQRWLTEARKETVMGQPTPKTPRQLREFLGKAGFCRLFIPGFAEMAAPLYPLTKPGTLFNWGPDQQKAYQEIKQALLTAPALGLPDLTKPFELFVDEKQGYAKGVLTQKLGPWRRPVAYLSKKLDPVAAGWPPCLRMVAAIAVLTKDAGKLTMGQPLVILAPHAVEALVKQPPDRWLSNARMTHYQALLLDTDRVQFGPVVALNPATLLPLPEEGLQHNCLDILAEAHGTRPDLTDQPLPDADHTWYTDGSSLLQEGQRKAGAAVTTETEVIWAKALPAGTSAQRAELIALTQALKMAEGKKLNVYTDSRYAFATAHIHGEIYRRRGWLTSEGKEIKNKDEILALLKALFLPKRLSIIHCPGHQKGHSAEARGNRMADQAARKAAITETPDTSTLLAGKRTADGSEFEKRTADGSEFESPKKKAKVE

SEQ ID NO: 2828 - protein, 2093 aa, synthetic construct
MPAAKRVKLDGGDKKYSIGLDIGTNSVGWAVITDEYKVPSKKFKVLGNTDRHSIKKNLIGALLFDSGETAEATRLKRTARRRYTRRKNRICYLQEIFSNEMAKVDDSFFHRLEESFLVEEDKKHERHPIFGNIVDEVAYHEKYPTIYHLRKKLVDSTDKADLRLIYLALAHMIKFRGHFLIEGDLNPDNSDVDKLFIQLVQTYNQLFEENPINASGVDAKAILSARLSKSRRLENLIAQLPGEKKNGLFGNLIALSLGLTPNFKSNFDLAEDAKLQLSKDTYDDDLDNLLAQIGDQYADLFLAAKNLSDAILLSDILRVNTEITKAPLSASMIKRYDEHHQDLTLLKALVRQQLPEKYKEIFFDQSKNGYAGYIDGGASQEEFYKFIKPILEKMDGTEELLVKLNREDLLRKQRTFDNGSIPHQIHLGELHAILRRQEDFYPFLKDNREKIEKILTFRIPYYVGPLARGNSRFAWMTRKSEETITPWNFEEVVDKGASAQSFIERMTNFDKNLPNEKVLPKHSLLYEYFTVYNELTKVKYVTEGMRKPAFLSGEQKKAIVDLLFKTNRKVTVKQLKEDYFKKIECFDSVEISGVEDRFNASLGTYHDLLKIIKDKDFLDNEENEDILEDIVLTLTLFEDREMIEERLKTYAHLFDDKVMKQLKRRRYTGWGRLSRKLINGIRDKQSGKTILDFLKSDGFANRNFMQLIHDDSLTFKEDIQKAQVSGQGDSLHEHIANLAGSPAIKKGILQTVKVVDELVKVMGRHKPENIVIEMARENQTTQKGQKNSRERMKRIEEGIKELGSQILKEHPVENTQLQNEKLYLYYLQNGRDMYVDQELDINRLSDYDVDHIVPQSFLKDDSIDNKVLTRSDKARGKSDNVPSEEVVKKMKNYWRQLLNAKLITQRKFDNLTKAERGGLSELDKAGFIKRQLVETRQITKHVAQILDSRMNTKYDENDKLIREVKVITLKSKLVSDFRKDFQFYKVREINNYHHAHDAYLNAVVGTALIKKYPKLESEFVYGDYKVYDVRKMIAKSEQEIGKATAKYFFYSNIMNFFKTEITLANGEIRKRPLIETNGETGEIVWDKGRDFATVRKVLSMPQVNIVKKTEVQTGGFSKESILPKRNSDKLIARKKDWDPKKYGGFDSPTVAYSVLVVAKVEKGKSKKLKSVKELLGITIMERSSFEKNPIDFLEAKGYKEVKKDLIIKLPKYSLFELENGRKRMLASAGELQKGNELALPSKYVNFLYLASHYEKLKGSPEDNEQKQLFVEQHKHYLDEIIEQISEFSKRVILADANLDKVLSAYNKHRDKPIREQAENIIHLFTLTNLGAPAAFKYFDTTIDRKRYTSTKEVLDATLIHQSITGLYETRIDLSQLGGDGGGSSEAAAKGGTLNIEDEHRLHETSKEPDVSLGSTWLSDFPQAWAETGGMGLAVRQAPLIIPLKATSTPVSIKQYPMSQEARLGIKPHIQRLLDQGILVPCQSPWNTPLLPVKKPGTNDYRPVQDLREVNKRVEDIHPTVPNPYNLLSGLPPSHQWYTVLDLKDAFFCLRLHPTSQPLFAFEWRDPEMGISGQLTWTRLPQGFKNSPTLFNEALHRDLADFRIQHPDLILLQYVDDLLLAATSELDCQQGTRALLQTLGNLGYRASAKKAQICQKQVKYLGYLLKEGQRWLTEARKETVMGQPTPKTPRQLREFLGKAGFCRLFIPGFAEMAAPLYPLTKPGTLFNWGPDQQKAYQEIKQALLTAPALGLPDLTKPFELFVDEKQGYAKGVLTQKLGPWRRPVAYLSKKLDPVAAGWPPCLRMVAAIAVLTKDAGKLTMGQPLVILAPHAVEALVKQPPDRWLSNARMTHYQALLLDTDRVQFGPVVALNPATLLPLPEEGLQHNCLDILAEAHGTRPDLTDQPLPDADHTWYTDGSSLLQEGQRKAGAAVTTETEVIWAKALPAGTSAQRAELIALTQALKMAEGKKLNVYTDSRYAFATAHIHGEIYRRRGWLTSEGKEIKNKDEILALLKALFLPKRLSIIHCPGHQKGHSAEARGNRMADQAARKAAITETPDTSTLLAGKRTADGSEFEKRTADGSEFESPKKKAKVE

SEQ ID NO: 2829 - protein, 2096 aa, synthetic construct
MPAAKRVKLDGGDKKYSIGLDIGTNSVGWAVITDEYKVPSKKFKVLGNTDRHSIKKNLIGALLFDSGETAEATRLKRTARRRYTRRKNRICYLQEIFSNEMAKVDDSFFHRLEESFLVEEDKKHERHPIFGNIVDEVAYHEKYPTIYHLRKKLVDSTDKADLRLIYLALAHMIKFRGHFLIEGDLNPDNSDVDKLFIQLVQTYNQLFEENPINASGVDAKAILSARLSKSRRLENLIAQLPGEKKNGLFGNLIALSLGLTPNFKSNFDLAEDAKLQLSKDTYDDDLDNLLAQIGDQYADLFLAAKNLSDAILLSDILRVNTEITKAPLSASMIKRYDEHHQDLTLLKALVRQQLPEKYKEIFFDQSKNGYAGYIDGGASQEEFYKFIKPILEKMDGTEELLVKLNREDLLRKQRTFDNGSIPHQIHLGELHAILRRQEDFYPFLKDNREKIEKILTFRIPYYVGPLARGNSRFAWMTRKSEETITPWNFEEVVDKGASAQSFIERMTNFDKNLPNEKVLPKHSLLYEYFTVYNELTKVKYVTEGMRKPAFLSGEQKKAIVDLLFKTNRKVTVKQLKEDYFKKIECFDSVEISGVEDRFNASLGTYHDLLKIIKDKDFLDNEENEDILEDIVLTLTLFEDREMIEERLKTYAHLFDDKVMKQLKRRRYTGWGRLSRKLINGIRDKQSGKTILDFLKSDGFANRNFMQLIHDDSLTFKEDIQKAQVSGQGDSLHEHIANLAGSPAIKKGILQTVKVVDELVKVMGRHKPENIVIEMARENQTTQKGQKNSRERMKRIEEGIKELGSQILKEHPVENTQLQNEKLYLYYLQNGRDMYVDQELDINRLSDYDVDHIVPQSFLKDDSIDNKVLTRSDKARGKSDNVPSEEVVKKMKNYWRQLLNAKLITQRKFDNLTKAERGGLSELDKAGFIKRQLVETRQITKHVAQILDSRMNTKYDENDKLIREVKVITLKSKLVSDFRKDFQFYKVREINNYHHAHDAYLNAVVGTALIKKYPKLESEFVYGDYKVYDVRKMIAKSEQEIGKATAKYFFYSNIMNFFKTEITLANGEIRKRPLIETNGETGEIVWDKGRDFATVRKVLSMPQVNIVKKTEVQTGGFSKESILPKRNSDKLIARKKDWDPKKYGGFDSPTVAYSVLVVAKVEKGKSKKLKSVKELLGITIMERSSFEKNPIDFLEAKGYKEVKKDLIIKLPKYSLFELENGRKRMLASAGELQKGNELALPSKYVNFLYLASHYEKLKGSPEDNEQKQLFVEQHKHYLDEIIEQISEFSKRVILADANLDKVLSAYNKHRDKPIREQAENIIHLFTLTNLGAPAAFKYFDTTIDRKRYTSTKEVLDATLIHQSITGLYETRIDLSQLGGDGGPAPEAAAKGGSGGTLNIEDEHRLHETSKEPDVSLGSTWLSDFPQAWAETGGMGLAVRQAPLIIPLKATSTPVSIKQYPMSQEARLGIKPHIQRLLDQGILVPCQSPWNTPLLPVKKPGTNDYRPVQDLREVNKRVEDIHPTVPNPYNLLSGLPPSHQWYTVLDLKDAFFCLRLHPTSQPLFAFEWRDPEMGISGQLTWTRLPQGFKNSPTLFNEALHRDLADFRIQHPDLILLQYVDDLLLAATSELDCQQGTRALLQTLGNLGYRASAKKAQICQKQVKYLGYLLKEGQRWLTEARKETVMGQPTPKTPRQLREFLGKAGFCRLFIPGFAEMAAPLYPLTKPGTLFNWGPDQQKAYQEIKQALLTAPALGLPDLTKPFELFVDEKQGYAKGVLTQKLGPWRRPVAYLSKKLDPVAAGWPPCLRMVAAIAVLTKDAGKLTMGQPLVILAPHAVEALVKQPPDRWLSNARMTHYQALLLDTDRVQFGPVVALNPATLLPLPEEGLQHNCLDILAEAHGTRPDLTDQPLPDADHTWYTDGSSLLQEGQRKAGAAVTTETEVIWAKALPAGTSAQRAELIALTQALKMAEGKKLNVYTDSRYAFATAHIHGEIYRRRGWLTSEGKEIKNKDEILALLKALFLPKRLSIIHCPGHQKGHSAEARGNRMADQAARKAAITETPDTSTLLAGKRTADGSEFEKRTADGSEFESPKKKAKVE

SEQ ID NO: 2830 - protein, 2096 aa, synthetic construct
MPAAKRVKLDGGDKKYSIGLDIGTNSVGWAVITDEYKVPSKKFKVLGNTDRHSIKKNLIGALLFDSGETAEATRLKRTARRRYTRRKNRICYLQEIFSNEMAKVDDSFFHRLEESFLVEEDKKHERHPIFGNIVDEVAYHEKYPTIYHLRKKLVDSTDKADLRLIYLALAHMIKFRGHFLIEGDLNPDNSDVDKLFIQLVQTYNQLFEENPINASGVDAKAILSARLSKSRRLENLIAQLPGEKKNGLFGNLIALSLGLTPNFKSNFDLAEDAKLQLSKDTYDDDLDNLLAQIGDQYADLFLAAKNLSDAILLSDILRVNTEITKAPLSASMIKRYDEHHQDLTLLKALVRQQLPEKYKEIFFDQSKNGYAGYIDGGASQEEFYKFIKPILEKMDGTEELLVKLNREDLLRKQRTFDNGSIPHQIHLGELHAILRRQEDFYPFLKDNREKIEKILTFRIPYYVGPLARGNSRFAWMTRKSEETITPWNFEEVVDKGASAQSFIERMTNFDKNLPNEKVLPKHSLLYEYFTVYNELTKVKYVTEGMRKPAFLSGEQKKAIVDLLFKTNRKVTVKQLKEDYFKKIECFDSVEISGVEDRFNASLGTYHDLLKIIKDKDFLDNEENEDILEDIVLTLTLFEDREMIEERLKTYAHLFDDKVMKQLKRRRYTGWGRLSRKLINGIRDKQSGKTILDFLKSDGFANRNFMQLIHDDSLTFKEDIQKAQVSGQGDSLHEHIANLAGSPAIKKGILQTVKVVDELVKVMGRHKPENIVIEMARENQTTQKGQKNSRERMKRIEEGIKELGSQILKEHPVENTQLQNEKLYLYYLQNGRDMYVDQELDINRLSDYDVDHIVPQSFLKDDSIDNKVLTRSDKARGKSDNVPSEEVVKKMKNYWRQLLNAKLITQRKFDNLTKAERGGLSELDKAGFIKRQLVETRQITKHVAQILDSRMNTKYDENDKLIREVKVITLKSKLVSDFRKDFQFYKVREINNYHHAHDAYLNAVVGTALIKKYPKLESEFVYGDYKVYDVRKMIAKSEQEIGKATAKYFFYSNIMNFFKTEITLANGEIRKRPLIETNGETGEIVWDKGRDFATVRKVLSMPQVNIVKKTEVQTGGFSKESILPKRNSDKLIARKKDWDPKKYGGFDSPTVAYSVLVVAKVEKGKSKKLKSVKELLGITIMERSSFEKNPIDFLEAKGYKEVKKDLIIKLPKYSLFELENGRKRMLASAGELQKGNELALPSKYVNFLYLASHYEKLKGSPEDNEQKQLFVEQHKHYLDEIIEQISEFSKRVILADANLDKVLSAYNKHRDKPIREQAENIIHLFTLTNLGAPAAFKYFDTTIDRKRYTSTKEVLDATLIHQSITGLYETRIDLSQLGGDGGGGGEAAAKPAPGGTLNIEDEHRLHETSKEPDVSLGSTWLSDFPQAWAETGGMGLAVRQAPLIIPLKATSTPVSIKQYPMSQEARLGIKPHIQRLLDQGILVPCQSPWNTPLLPVKKPGTNDYRPVQDLREVNKRVEDIHPTVPNPYNLLSGLPPSHQWYTVLDLKDAFFCLRLHPTSQPLFAFEWRDPEMGISGQLTWTRLPQGFKNSPTLFNEALHRDLADFRIQHPDLILLQYVDDLLLAATSELDCQQGTRALLQTLGNLGYRASAKKAQICQKQVKYLGYLLKEGQRWLTEARKETVMGQPTPKTPRQLREFLGKAGFCRLFIPGFAEMAAPLYPLTKPGTLFNWGPDQQKAYQEIKQALLTAPALGLPDLTKPFELFVDEKQGYAKGVLTQKLGPWRRPVAYLSKKLDPVAAGWPPCLRMVAAIAVLTKDAGKLTMGQPLVILAPHAVEALVKQPPDRWLSNARMTHYQALLLDTDRVQFGPVVALNPATLLPLPEEGLQHNCLDILAEAHGTRPDLTDQPLPDADHTWYTDGSSLLQEGQRKAGAAVTTETEVIWAKALPAGTSAQRAELIALTQALKMAEGKKLNVYTDSRYAFATAHIHGEIYRRRGWLTSEGKEIKNKDEILALLKALFLPKRLSIIHCPGHQKGHSAEARGNRMADQAARKAAITETPDTSTLLAGKRTADGSEFEKRTADGSEFESPKKKAKVE

SEQ ID NO: 2831 - protein, 2096 aa, synthetic construct
MPAAKRVKLDGGDKKYSIGLDIGTNSVGWAVITDEYKVPSKKFKVLGNTDRHSIKKNLIGALLFDSGETAEATRLKRTARRRYTRRKNRICYLQEIFSNEMAKVDDSFFHRLEESFLVEEDKKHERHPIFGNIVDEVAYHEKYPTIYHLRKKLVDSTDKADLRLIYLALAHMIKFRGHFLIEGDLNPDNSDVDKLFIQLVQTYNQLFEENPINASGVDAKAILSARLSKSRRLENLIAQLPGEKKNGLFGNLIALSLGLTPNFKSNFDLAEDAKLQLSKDTYDDDLDNLLAQIGDQYADLFLAAKNLSDAILLSDILRVNTEITKAPLSASMIKRYDEHHQDLTLLKALVRQQLPEKYKEIFFDQSKNGYAGYIDGGASQEEFYKFIKPILEKMDGTEELLVKLNREDLLRKQRTFDNGSIPHQIHLGELHAILRRQEDFYPFLKDNREKIEKILTFRIPYYVGPLARGNSRFAWMTRKSEETITPWNFEEVVDKGASAQSFIERMTNFDKNLPNEKVLPKHSLLYEYFTVYNELTKVKYVTEGMRKPAFLSGEQKKAIVDLLFKTNRKVTVKQLKEDYFKKIECFDSVEISGVEDRFNASLGTYHDLLKIIKDKDFLDNEENEDILEDIVLTLTLFEDREMIEERLKTYAHLFDDKVMKQLKRRRYTGWGRLSRKLINGIRDKQSGKTILDFLKSDGFANRNFMQLIHDDSLTFKEDIQKAQVSGQGDSLHEHIANLAGSPAIKKGILQTVKVVDELVKVMGRHKPENIVIEMARENQTTQKGQKNSRERMKRIEEGIKELGSQILKEHPVENTQLQNEKLYLYYLQNGRDMYVDQELDINRLSDYDVDHIVPQSFLKDDSIDNKVLTRSDKARGKSDNVPSEEVVKKMKNYWRQLLNAKLITQRKFDNLTKAERGGLSELDKAGFIKRQLVETRQITKHVAQILDSRMNTKYDENDKLIREVKVITLKSKLVSDFRKDFQFYKVREINNYHHAHDAYLNAVVGTALIKKYPKLESEFVYGDYKVYDVRKMIAKSEQEIGKATAKYFFYSNIMNFFKTEITLANGEIRKRPLIETNGETGEIVWDKGRDFATVRKVLSMPQVNIVKKTEVQTGGFSKESILPKRNSDKLIARKKDWDPKKYGGFDSPTVAYSVLVVAKVEKGKSKKLKSVKELLGITIMERSSFEKNPIDFLEAKGYKEVKKDLIIKLPKYSLFELENGRKRMLASAGELQKGNELALPSKYVNFLYLASHYEKLKGSPEDNEQKQLFVEQHKHYLDEIIEQISEFSKRVILADANLDKVLSAYNKHRDKPIREQAENIIHLFTLTNLGAPAAFKYFDTTIDRKRYTSTKEVLDATLIHQSITGLYETRIDLSQLGGDGGGGGGSSEAAAKGGTLNIEDEHRLHETSKEPDVSLGSTWLSDFPQAWAETGGMGLAVRQAPLIIPLKATSTPVSIKQYPMSQEARLGIKPHIQRLLDQGILVPCQSPWNTPLLPVKKPGTNDYRPVQDLREVNKRVEDIHPTVPNPYNLLSGLPPSHQWYTVLDLKDAFFCLRLHPTSQPLFAFEWRDPEMGISGQLTWTRLPQGFKNSPTLFNEALHRDLADFRIQHPDLILLQYVDDLLLAATSELDCQQGTRALLQTLGNLGYRASAKKAQICQKQVKYLGYLLKEGQRWLTEARKETVMGQPTPKTPRQLREFLGKAGFCRLFIPGFAEMAAPLYPLTKPGTLFNWGPDQQKAYQEIKQALLTAPALGLPDLTKPFELFVDEKQGYAKGVLTQKLGPWRRPVAYLSKKLDPVAAGWPPCLRMVAAIAVLTKDAGKLTMGQPLVILAPHAVEALVKQPPDRWLSNARMTHYQALLLDTDRVQFGPVVALNPATLLPLPEEGLQHNCLDILAEAHGTRPDLTDQPLPDADHTWYTDGSSLLQEGQRKAGAAVTTETEVIWAKALPAGTSAQRAELIALTQALKMAEGKKLNVYTDSRYAFATAHIHGEIYRRRGWLTSEGKEIKNKDEILALLKALFLPKRLSIIHCPGHQKGHSAEARGNRMADQAARKAAITETPDTSTLLAGKRTADGSEFEKRTADGSEFESPKKKAKVE

SEQ ID NO: 2832 - protein, 2091 aa, synthetic construct
MPAAKRVKLDGGDKKYSIGLDIGTNSVGWAVITDEYKVPSKKFKVLGNTDRHSIKKNLIGALLFDSGETAEATRLKRTARRRYTRRKNRICYLQEIFSNEMAKVDDSFFHRLEESFLVEEDKKHERHPIFGNIVDEVAYHEKYPTIYHLRKKLVDSTDKADLRLIYLALAHMIKFRGHFLIEGDLNPDNSDVDKLFIQLVQTYNQLFEENPINASGVDAKAILSARLSKSRRLENLIAQLPGEKKNGLFGNLIALSLGLTPNFKSNFDLAEDAKLQLSKDTYDDDLDNLLAQIGDQYADLFLAAKNLSDAILLSDILRVNTEITKAPLSASMIKRYDEHHQDLTLLKALVRQQLPEKYKEIFFDQSKNGYAGYIDGGASQEEFYKFIKPILEKMDGTEELLVKLNREDLLRKQRTFDNGSIPHQIHLGELHAILRRQEDFYPFLKDNREKIEKILTFRIPYYVGPLARGNSRFAWMTRKSEETITPWNFEEVVDKGASAQSFIERMTNFDKNLPNEKVLPKHSLLYEYFTVYNELTKVKYVTEGMRKPAFLSGEQKKAIVDLLFKTNRKVTVKQLKEDYFKKIECFDSVEISGVEDRFNASLGTYHDLLKIIKDKDFLDNEENEDILEDIVLTLTLFEDREMIEERLKTYAHLFDDKVMKQLKRRRYTGWGRLSRKLINGIRDKQSGKTILDFLKSDGFANRNFMQLIHDDSLTFKEDIQKAQVSGQGDSLHEHIANLAGSPAIKKGILQTVKVVDELVKVMGRHKPENIVIEMARENQTTQKGQKNSRERMKRIEEGIKELGSQILKEHPVENTQLQNEKLYLYYLQNGRDMYVDQELDINRLSDYDVDHIVPQSFLKDDSIDNKVLTRSDKARGKSDNVPSEEVVKKMKNYWRQLLNAKLITQRKFDNLTKAERGGLSELDKAGFIKRQLVETRQITKHVAQILDSRMNTKYDENDKLIREVKVITLKSKLVSDFRKDFQFYKVREINNYHHAHDAYLNAVVGTALIKKYPKLESEFVYGDYKVYDVRKMIAKSEQEIGKATAKYFFYSNIMNFFKTEITLANGEIRKRPLIETNGETGEIVWDKGRDFATVRKVLSMPQVNIVKKTEVQTGGFSKESILPKRNSDKLIARKKDWDPKKYGGFDSPTVAYSVLVVAKVEKGKSKKLKSVKELLGITIMERSSFEKNPIDFLEAKGYKEVKKDLIIKLPKYSLFELENGRKRMLASAGELQKGNELALPSKYVNFLYLASHYEKLKGSPEDNEQKQLFVEQHKHYLDEIIEQISEFSKRVILADANLDKVLSAYNKHRDKPIREQAENIIHLFTLTNLGAPAAFKYFDTTIDRKRYTSTKEVLDATLIHQSITGLYETRIDLSQLGGDGGGSSGSSGGTLNIEDEHRLHETSKEPDVSLGSTWLSDFPQAWAETGGMGLAVRQAPLIIPLKATSTPVSIKQYPMSQEARLGIKPHIQRLLDQGILVPCQSPWNTPLLPVKKPGTNDYRPVQDLREVNKRVEDIHPTVPNPYNLLSGLPPSHQWYTVLDLKDAFFCLRLHPTSQPLFAFEWRDPEMGISGQLTWTRLPQGFKNSPTLFNEALHRDLADFRIQHPDLILLQYVDDLLLAATSELDCQQGTRALLQTLGNLGYRASAKKAQICQKQVKYLGYLLKEGQRWLTEARKETVMGQPTPKTPRQLREFLGKAGFCRLFIPGFAEMAAPLYPLTKPGTLFNWGPDQQKAYQEIKQALLTAPALGLPDLTKPFELFVDEKQGYAKGVLTQKLGPWRRPVAYLSKKLDPVAAGWPPCLRMVAAIAVLTKDAGKLTMGQPLVILAPHAVEALVKQPPDRWLSNARMTHYQALLLDTDRVQFGPVVALNPATLLPLPEEGLQHNCLDILAEAHGTRPDLTDQPLPDADHTWYTDGSSLLQEGQRKAGAAVTTETEVIWAKALPAGTSAQRAELIALTQALKMAEGKKLNVYTDSRYAFATAHIHGEIYRRRGWLTSEGKEIKNKDEILALLKALFLPKRLSIIHCPGHQKGHSAEARGNRMADQAARKAAITETPDTSTLLAGKRTADGSEFEKRTADGSEFESPKKKAKVE

SEQ ID NO: 2833 - protein, 2094 aa, synthetic construct
MPAAKRVKLDGGDKKYSIGLDIGTNSVGWAVITDEYKVPSKKFKVLGNTDRHSIKKNLIGALLFDSGETAEATRLKRTARRRYTRRKNRICYLQEIFSNEMAKVDDSFFHRLEESFLVEEDKKHERHPIFGNIVDEVAYHEKYPTIYHLRKKLVDSTDKADLRLIYLALAHMIKFRGHFLIEGDLNPDNSDVDKLFIQLVQTYNQLFEENPINASGVDAKAILSARLSKSRRLENLIAQLPGEKKNGLFGNLIALSLGLTPNFKSNFDLAEDAKLQLSKDTYDDDLDNLLAQIGDQYADLFLAAKNLSDAILLSDILRVNTEITKAPLSASMIKRYDEHHQDLTLLKALVRQQLPEKYKEIFFDQSKNGYAGYIDGGASQEEFYKFIKPILEKMDGTEELLVKLNREDLLRKQRTFDNGSIPHQIHLGELHAILRRQEDFYPFLKDNREKIEKILTFRIPYYVGPLARGNSRFAWMTRKSEETITPWNFEEVVDKGASAQSFIERMTNFDKNLPNEKVLPKHSLLYEYFTVYNELTKVKYVTEGMRKPAFLSGEQKKAIVDLLFKTNRKVTVKQLKEDYFKKIECFDSVEISGVEDRFNASLGTYHDLLKIIKDKDFLDNEENEDILEDIVLTLTLFEDREMIEERLKTYAHLFDDKVMKQLKRRRYTGWGRLSRKLINGIRDKQSGKTILDFLKSDGFANRNFMQLIHDDSLTFKEDIQKAQVSGQGDSLHEHIANLAGSPAIKKGILQTVKVVDELVKVMGRHKPENIVIEMARENQTTQKGQKNSRERMKRIEEGIKELGSQILKEHPVENTQLQNEKLYLYYLQNGRDMYVDQELDINRLSDYDVDHIVPQSFLKDDSIDNKVLTRSDKARGKSDNVPSEEVVKKMKNYWRQLLNAKLITQRKFDNLTKAERGGLSELDKAGFIKRQLVETRQITKHVAQILDSRMNTKYDENDKLIREVKVITLKSKLVSDFRKDFQFYKVREINNYHHAHDAYLNAVVGTALIKKYPKLESEFVYGDYKVYDVRKMIAKSEQEIGKATAKYFFYSNIMNFFKTEITLANGEIRKRPLIETNGETGEIVWDKGRDFATVRKVLSMPQVNIVKKTEVQTGGFSKESILPKRNSDKLIARKKDWDPKKYGGFDSPTVAYSVLVVAKVEKGKSKKLKSVKELLGITIMERSSFEKNPIDFLEAKGYKEVKKDLIIKLPKYSLFELENGRKRMLASAGELQKGNELALPSKYVNFLYLASHYEKLKGSPEDNEQKQLFVEQHKHYLDEIIEQISEFSKRVILADANLDKVLSAYNKHRDKPIREQAENIIHLFTLTNLGAPAAFKYFDTTIDRKRYTSTKEVLDATLIHQSITGLYETRIDLSQLGGDGGPAPGGSGGGGGTLNIEDEHRLHETSKEPDVSLGSTWLSDFPQAWAETGGMGLAVRQAPLIIPLKATSTPVSIKQYPMSQEARLGIKPHIQRLLDQGILVPCQSPWNTPLLPVKKPGTNDYRPVQDLREVNKRVEDIHPTVPNPYNLLSGLPPSHQWYTVLDLKDAFFCLRLHPTSQPLFAFEWRDPEMGISGQLTWTRLPQGFKNSPTLFNEALHRDLADFRIQHPDLILLQYVDDLLLAATSELDCQQGTRALLQTLGNLGYRASAKKAQICQKQVKYLGYLLKEGQRWLTEARKETVMGQPTPKTPRQLREFLGKAGFCRLFIPGFAEMAAPLYPLTKPGTLFNWGPDQQKAYQEIKQALLTAPALGLPDLTKPFELFVDEKQGYAKGVLTQKLGPWRRPVAYLSKKLDPVAAGWPPCLRMVAAIAVLTKDAGKLTMGQPLVILAPHAVEALVKQPPDRWLSNARMTHYQALLLDTDRVQFGPVVALNPATLLPLPEEGLQHNCLDILAEAHGTRPDLTDQPLPDADHTWYTDGSSLLQEGQRKAGAAVTTETEVIWAKALPAGTSAQRAELIALTQALKMAEGKKLNVYTDSRYAFATAHIHGEIYRRRGWLTSEGKEIKNKDEILALLKALFLPKRLSIIHCPGHQKGHSAEARGNRMADQAARKAAITETPDTSTLLAGKRTADGSEFEKRTADGSEFESPKKKAKVE

SEQ ID NO: 2834 - protein, 2090 aa, synthetic construct
MPAAKRVKLDGGDKKYSIGLDIGTNSVGWAVITDEYKVPSKKFKVLGNTDRHSIKKNLIGALLFDSGETAEATRLKRTARRRYTRRKNRICYLQEIFSNEMAKVDDSFFHRLEESFLVEEDKKHERHPIFGNIVDEVAYHEKYPTIYHLRKKLVDSTDKADLRLIYLALAHMIKFRGHFLIEGDLNPDNSDVDKLFIQLVQTYNQLFEENPINASGVDAKAILSARLSKSRRLENLIAQLPGEKKNGLFGNLIALSLGLTPNFKSNFDLAEDAKLQLSKDTYDDDLDNLLAQIGDQYADLFLAAKNLSDAILLSDILRVNTEITKAPLSASMIKRYDEHHQDLTLLKALVRQQLPEKYKEIFFDQSKNGYAGYIDGGASQEEFYKFIKPILEKMDGTEELLVKLNREDLLRKQRTFDNGSIPHQIHLGELHAILRRQEDFYPFLKDNREKIEKILTFRIPYYVGPLARGNSRFAWMTRKSEETITPWNFEEVVDKGASAQSFIERMTNFDKNLPNEKVLPKHSLLYEYFTVYNELTKVKYVTEGMRKPAFLSGEQKKAIVDLLFKTNRKVTVKQLKEDYFKKIECFDSVEISGVEDRFNASLGTYHDLLKIIKDKDFLDNEENEDILEDIVLTLTLFEDREMIEERLKTYAHLFDDKVMKQLKRRRYTGWGRLSRKLINGIRDKQSGKTILDFLKSDGFANRNFMQLIHDDSLTFKEDIQKAQVSGQGDSLHEHIANLAGSPAIKKGILQTVKVVDELVKVMGRHKPENIVIEMARENQTTQKGQKNSRERMKRIEEGIKELGSQILKEHPVENTQLQNEKLYLYYLQNGRDMYVDQELDINRLSDYDVDHIVPQSFLKDDSIDNKVLTRSDKARGKSDNVPSEEVVKKMKNYWRQLLNAKLITQRKFDNLTKAERGGLSELDKAGFIKRQLVETRQITKHVAQILDSRMNTKYDENDKLIREVKVITLKSKLVSDFRKDFQFYKVREINNYHHAHDAYLNAVVGTALIKKYPKLESEFVYGDYKVYDVRKMIAKSEQEIGKATAKYFFYSNIMNFFKTEITLANGEIRKRPLIETNGETGEIVWDKGRDFATVRKVLSMPQVNIVKKTEVQTGGFSKESILPKRNSDKLIARKKDWDPKKYGGFDSPTVAYSVLVVAKVEKGKSKKLKSVKELLGITIMERSSFEKNPIDFLEAKGYKEVKKDLIIKLPKYSLFELENGRKRMLASAGELQKGNELALPSKYVNFLYLASHYEKLKGSPEDNEQKQLFVEQHKHYLDEIIEQISEFSKRVILADANLDKVLSAYNKHRDKPIREQAENIIHLFTLTNLGAPAAFKYFDTTIDRKRYTSTKEVLDATLIHQSITGLYETRIDLSQLGGDGGGGGGGGGTLNIEDEHRLHETSKEPDVSLGSTWLSDFPQAWAETGGMGLAVRQAPLIIPLKATSTPVSIKQYPMSQEARLGIKPHIQRLLDQGILVPCQSPWNTPLLPVKKPGTNDYRPVQDLREVNKRVEDIHPTVPNPYNLLSGLPPSHQWYTVLDLKDAFFCLRLHPTSQPLFAFEWRDPEMGISGQLTWTRLPQGFKNSPTLFNEALHRDLADFRIQHPDLILLQYVDDLLLAATSELDCQQGTRALLQTLGNLGYRASAKKAQICQKQVKYLGYLLKEGQRWLTEARKETVMGQPTPKTPRQLREFLGKAGFCRLFIPGFAEMAAPLYPLTKPGTLFNWGPDQQKAYQEIKQALLTAPALGLPDLTKPFELFVDEKQGYAKGVLTQKLGPWRRPVAYLSKKLDPVAAGWPPCLRMVAAIAVLTKDAGKLTMGQPLVILAPHAVEALVKQPPDRWLSNARMTHYQALLLDTDRVQFGPVVALNPATLLPLPEEGLQHNCLDILAEAHGTRPDLTDQPLPDADHTWYTDGSSLLQEGQRKAGAAVTTETEVIWAKALPAGTSAQRAELIALTQALKMAEGKKLNVYTDSRYAFATAHIHGEIYRRRGWLTSEGKEIKNKDEILALLKALFLPKRLSIIHCPGHQKGHSAEARGNRMADQAARKAAITETPDTSTLLAGKRTADGSEFEKRTADGSEFESPKKKAKVE

SEQ ID NO: 2835 - protein, 2094 aa, synthetic construct
MPAAKRVKLDGGDKKYSIGLDIGTNSVGWAVITDEYKVPSKKFKVLGNTDRHSIKKNLIGALLFDSGETAEATRLKRTARRRYTRRKNRICYLQEIFSNEMAKVDDSFFHRLEESFLVEEDKKHERHPIFGNIVDEVAYHEKYPTIYHLRKKLVDSTDKADLRLIYLALAHMIKFRGHFLIEGDLNPDNSDVDKLFIQLVQTYNQLFEENPINASGVDAKAILSARLSKSRRLENLIAQLPGEKKNGLFGNLIALSLGLTPNFKSNFDLAEDAKLQLSKDTYDDDLDNLLAQIGDQYADLFLAAKNLSDAILLSDILRVNTEITKAPLSASMIKRYDEHHQDLTLLKALVRQQLPEKYKEIFFDQSKNGYAGYIDGGASQEEFYKFIKPILEKMDGTEELLVKLNREDLLRKQRTFDNGSIPHQIHLGELHAILRRQEDFYPFLKDNREKIEKILTFRIPYYVGPLARGNSRFAWMTRKSEETITPWNFEEVVDKGASAQSFIERMTNFDKNLPNEKVLPKHSLLYEYFTVYNELTKVKYVTEGMRKPAFLSGEQKKAIVDLLFKTNRKVTVKQLKEDYFKKIECFDSVEISGVEDRFNASLGTYHDLLKIIKDKDFLDNEENEDILEDIVLTLTLFEDREMIEERLKTYAHLFDDKVMKQLKRRRYTGWGRLSRKLINGIRDKQSGKTILDFLKSDGFANRNFMQLIHDDSLTFKEDIQKAQVSGQGDSLHEHIANLAGSPAIKKGILQTVKVVDELVKVMGRHKPENIVIEMARENQTTQKGQKNSRERMKRIEEGIKELGSQILKEHPVENTQLQNEKLYLYYLQNGRDMYVDQELDINRLSDYDVDHIVPQSFLKDDSIDNKVLTRSDKARGKSDNVPSEEVVKKMKNYWRQLLNAKLITQRKFDNLTKAERGGLSELDKAGFIKRQLVETRQITKHVAQILDSRMNTKYDENDKLIREVKVITLKSKLVSDFRKDFQFYKVREINNYHHAHDAYLNAVVGTALIKKYPKLESEFVYGDYKVYDVRKMIAKSEQEIGKATAKYFFYSNIMNFFKTEITLANGEIRKRPLIETNGETGEIVWDKGRDFATVRKVLSMPQVNIVKKTEVQTGGFSKESILPKRNSDKLIARKKDWDPKKYGGFDSPTVAYSVLVVAKVEKGKSKKLKSVKELLGITIMERSSFEKNPIDFLEAKGYKEVKKDLIIKLPKYSLFELENGRKRMLASAGELQKGNELALPSKYVNFLYLASHYEKLKGSPEDNEQKQLFVEQHKHYLDEIIEQISEFSKRVILADANLDKVLSAYNKHRDKPIREQAENIIHLFTLTNLGAPAAFKYFDTTIDRKRYTSTKEVLDATLIHQSITGLYETRIDLSQLGGDGGGSSPAPGGGGGTLNIEDEHRLHETSKEPDVSLGSTWLSDFPQAWAETGGMGLAVRQAPLIIPLKATSTPVSIKQYPMSQEARLGIKPHIQRLLDQGILVPCQSPWNTPLLPVKKPGTNDYRPVQDLREVNKRVEDIHPTVPNPYNLLSGLPPSHQWYTVLDLKDAFFCLRLHPTSQPLFAFEWRDPEMGISGQLTWTRLPQGFKNSPTLFNEALHRDLADFRIQHPDLILLQYVDDLLLAATSELDCQQGTRALLQTLGNLGYRASAKKAQICQKQVKYLGYLLKEGQRWLTEARKETVMGQPTPKTPRQLREFLGKAGFCRLFIPGFAEMAAPLYPLTKPGTLFNWGPDQQKAYQEIKQALLTAPALGLPDLTKPFELFVDEKQGYAKGVLTQKLGPWRRPVAYLSKKLDPVAAGWPPCLRMVAAIAVLTKDAGKLTMGQPLVILAPHAVEALVKQPPDRWLSNARMTHYQALLLDTDRVQFGPVVALNPATLLPLPEEGLQHNCLDILAEAHGTRPDLTDQPLPDADHTWYTDGSSLLQEGQRKAGAAVTTETEVIWAKALPAGTSAQRAELIALTQALKMAEGKKLNVYTDSRYAFATAHIHGEIYRRRGWLTSEGKEIKNKDEILALLKALFLPKRLSIIHCPGHQKGHSAEARGNRMADQAARKAAITETPDTSTLLAGKRTADGSEFEKRTADGSEFESPKKKAKVE

SEQ ID NO: 2836 - protein, 2100 aa, synthetic construct
MPAAKRVKLDGGDKKYSIGLDIGTNSVGWAVITDEYKVPSKKFKVLGNTDRHSIKKNLIGALLFDSGETAEATRLKRTARRRYTRRKNRICYLQEIFSNEMAKVDDSFFHRLEESFLVEEDKKHERHPIFGNIVDEVAYHEKYPTIYHLRKKLVDSTDKADLRLIYLALAHMIKFRGHFLIEGDLNPDNSDVDKLFIQLVQTYNQLFEENPINASGVDAKAILSARLSKSRRLENLIAQLPGEKKNGLFGNLIALSLGLTPNFKSNFDLAEDAKLQLSKDTYDDDLDNLLAQIGDQYADLFLAAKNLSDAILLSDILRVNTEITKAPLSASMIKRYDEHHQDLTLLKALVRQQLPEKYKEIFFDQSKNGYAGYIDGGASQEEFYKFIKPILEKMDGTEELLVKLNREDLLRKQRTFDNGSIPHQIHLGELHAILRRQEDFYPFLKDNREKIEKILTFRIPYYVGPLARGNSRFAWMTRKSEETITPWNFEEVVDKGASAQSFIERMTNFDKNLPNEKVLPKHSLLYEYFTVYNELTKVKYVTEGMRKPAFLSGEQKKAIVDLLFKTNRKVTVKQLKEDYFKKIECFDSVEISGVEDRFNASLGTYHDLLKIIKDKDFLDNEENEDILEDIVLTLTLFEDREMIEERLKTYAHLFDDKVMKQLKRRRYTGWGRLSRKLINGIRDKQSGKTILDFLKSDGFANRNFMQLIHDDSLTFKEDIQKAQVSGQGDSLHEHIANLAGSPAIKKGILQTVKVVDELVKVMGRHKPENIVIEMARENQTTQKGQKNSRERMKRIEEGIKELGSQILKEHPVENTQLQNEKLYLYYLQNGRDMYVDQELDINRLSDYDVDHIVPQSFLKDDSIDNKVLTRSDKARGKSDNVPSEEVVKKMKNYWRQLLNAKLITQRKFDNLTKAERGGLSELDKAGFIKRQLVETRQITKHVAQILDSRMNTKYDENDKLIREVKVITLKSKLVSDFRKDFQFYKVREINNYHHAHDAYLNAVVGTALIKKYPKLESEFVYGDYKVYDVRKMIAKSEQEIGKATAKYFFYSNIMNFFKTEITLANGEIRKRPLIETNGETGEIVWDKGRDFATVRKVLSMPQVNIVKKTEVQTGGFSKESILPKRNSDKLIARKKDWDPKKYGGFDSPTVAYSVLVVAKVEKGKSKKLKSVKELLGITIMERSSFEKNPIDFLEAKGYKEVKKDLIIKLPKYSLFELENGRKRMLASAGELQKGNELALPSKYVNFLYLASHYEKLKGSPEDNEQKQLFVEQHKHYLDEIIEQISEFSKRVILADANLDKVLSAYNKHRDKPIREQAENIIHLFTLTNLGAPAAFKYFDTTIDRKRYTSTKEVLDATLIHQSITGLYETRIDLSQLGGDGGGGGGSEAAAKGGGGSGGTLNIEDEHRLHETSKEPDVSLGSTWLSDFPQAWAETGGMGLAVRQAPLIIPLKATSTPVSIKQYPMSQEARLGIKPHIQRLLDQGILVPCQSPWNTPLLPVKKPGTNDYRPVQDLREVNKRVEDIHPTVPNPYNLLSGLPPSHQWYTVLDLKDAFFCLRLHPTSQPLFAFEWRDPEMGISGQLTWTRLPQGFKNSPTLFNEALHRDLADFRIQHPDLILLQYVDDLLLAATSELDCQQGTRALLQTLGNLGYRASAKKAQICQKQVKYLGYLLKEGQRWLTEARKETVMGQPTPKTPRQLREFLGKAGFCRLFIPGFAEMAAPLYPLTKPGTLFNWGPDQQKAYQEIKQALLTAPALGLPDLTKPFELFVDEKQGYAKGVLTQKLGPWRRPVAYLSKKLDPVAAGWPPCLRMVAAIAVLTKDAGKLTMGQPLVILAPHAVEALVKQPPDRWLSNARMTHYQALLLDTDRVQFGPVVALNPATLLPLPEEGLQHNCLDILAEAHGTRPDLTDQPLPDADHTWYTDGSSLLQEGQRKAGAAVTTETEVIWAKALPAGTSAQRAELIALTQALKMAEGKKLNVYTDSRYAFATAHIHGEIYRRRGWLTSEGKEIKNKDEILALLKALFLPKRLSIIHCPGHQKGHSAEARGNRMADQAARKAAITETPDTSTLLAGKRTADGSEFEKRTADGSEFESPKKKAKVE

SEQ ID NO: 2837 - protein, 2091 aa, synthetic construct
MPAAKRVKLDGGDKKYSIGLDIGTNSVGWAVITDEYKVPSKKFKVLGNTDRHSIKKNLIGALLFDSGETAEATRLKRTARRRYTRRKNRICYLQEIFSNEMAKVDDSFFHRLEESFLVEEDKKHERHPIFGNIVDEVAYHEKYPTIYHLRKKLVDSTDKADLRLIYLALAHMIKFRGHFLIEGDLNPDNSDVDKLFIQLVQTYNQLFEENPINASGVDAKAILSARLSKSRRLENLIAQLPGEKKNGLFGNLIALSLGLTPNFKSNFDLAEDAKLQLSKDTYDDDLDNLLAQIGDQYADLFLAAKNLSDAILLSDILRVNTEITKAPLSASMIKRYDEHHQDLTLLKALVRQQLPEKYKEIFFDQSKNGYAGYIDGGASQEEFYKFIKPILEKMDGTEELLVKLNREDLLRKQRTFDNGSIPHQIHLGELHAILRRQEDFYPFLKDNREKIEKILTFRIPYYVGPLARGNSRFAWMTRKSEETITPWNFEEVVDKGASAQSFIERMTNFDKNLPNEKVLPKHSLLYEYFTVYNELTKVKYVTEGMRKPAFLSGEQKKAIVDLLFKTNRKVTVKQLKEDYFKKIECFDSVEISGVEDRFNASLGTYHDLLKIIKDKDFLDNEENEDILEDIVLTLTLFEDREMIEERLKTYAHLFDDKVMKQLKRRRYTGWGRLSRKLINGIRDKQSGKTILDFLKSDGFANRNFMQLIHDDSLTFKEDIQKAQVSGQGDSLHEHIANLAGSPAIKKGILQTVKVVDELVKVMGRHKPENIVIEMARENQTTQKGQKNSRERMKRIEEGIKELGSQILKEHPVENTQLQNEKLYLYYLQNGRDMYVDQELDINRLSDYDVDHIVPQSFLKDDSIDNKVLTRSDKARGKSDNVPSEEVVKKMKNYWRQLLNAKLITQRKFDNLTKAERGGLSELDKAGFIKRQLVETRQITKHVAQILDSRMNTKYDENDKLIREVKVITLKSKLVSDFRKDFQFYKVREINNYHHAHDAYLNAVVGTALIKKYPKLESEFVYGDYKVYDVRKMIAKSEQEIGKATAKYFFYSNIMNFFKTEITLANGEIRKRPLIETNGETGEIVWDKGRDFATVRKVLSMPQVNIVKKTEVQTGGFSKESILPKRNSDKLIARKKDWDPKKYGGFDSPTVAYSVLVVAKVEKGKSKKLKSVKELLGITIMERSSFEKNPIDFLEAKGYKEVKKDLIIKLPKYSLFELENGRKRMLASAGELQKGNELALPSKYVNFLYLASHYEKLKGSPEDNEQKQLFVEQHKHYLDEIIEQISEFSKRVILADANLDKVLSAYNKHRDKPIREQAENIIHLFTLTNLGAPAAFKYFDTTIDRKRYTSTKEVLDATLIHQSITGLYETRIDLSQLGGDGGPAPGGGGGTLNIEDEHRLHETSKEPDVSLGSTWLSDFPQAWAETGGMGLAVRQAPLIIPLKATSTPVSIKQYPMSQEARLGIKPHIQRLLDQGILVPCQSPWNTPLLPVKKPGTNDYRPVQDLREVNKRVEDIHPTVPNPYNLLSGLPPSHQWYTVLDLKDAFFCLRLHPTSQPLFAFEWRDPEMGISGQLTWTRLPQGFKNSPTLFNEALHRDLADFRIQHPDLILLQYVDDLLLAATSELDCQQGTRALLQTLGNLGYRASAKKAQICQKQVKYLGYLLKEGQRWLTEARKETVMGQPTPKTPRQLREFLGKAGFCRLFIPGFAEMAAPLYPLTKPGTLFNWGPDQQKAYQEIKQALLTAPALGLPDLTKPFELFVDEKQGYAKGVLTQKLGPWRRPVAYLSKKLDPVAAGWPPCLRMVAAIAVLTKDAGKLTMGQPLVILAPHAVEALVKQPPDRWLSNARMTHYQALLLDTDRVQFGPVVALNPATLLPLPEEGLQHNCLDILAEAHGTRPDLTDQPLPDADHTWYTDGSSLLQEGQRKAGAAVTTETEVIWAKALPAGTSAQRAELIALTQALKMAEGKKLNVYTDSRYAFATAHIHGEIYRRRGWLTSEGKEIKNKDEILALLKALFLPKRLSIIHCPGHQKGHSAEARGNRMADQAARKAAITETPDTSTLLAGKRTADGSEFEKRTADGSEFESPKKKAKVE

SEQ ID NO: 2838 - protein, 2096 aa, synthetic construct
MPAAKRVKLDGGDKKYSIGLDIGTNSVGWAVITDEYKVPSKKFKVLGNTDRHSIKKNLIGALLFDSGETAEATRLKRTARRRYTRRKNRICYLQEIFSNEMAKVDDSFFHRLEESFLVEEDKKHERHPIFGNIVDEVAYHEKYPTIYHLRKKLVDSTDKADLRLIYLALAHMIKFRGHFLIEGDLNPDNSDVDKLFIQLVQTYNQLFEENPINASGVDAKAILSARLSKSRRLENLIAQLPGEKKNGLFGNLIALSLGLTPNFKSNFDLAEDAKLQLSKDTYDDDLDNLLAQIGDQYADLFLAAKNLSDAILLSDILRVNTEITKAPLSASMIKRYDEHHQDLTLLKALVRQQLPEKYKEIFFDQSKNGYAGYIDGGASQEEFYKFIKPILEKMDGTEELLVKLNREDLLRKQRTFDNGSIPHQIHLGELHAILRRQEDFYPFLKDNREKIEKILTFRIPYYVGPLARGNSRFAWMTRKSEETITPWNFEEVVDKGASAQSFIERMTNFDKNLPNEKVLPKHSLLYEYFTVYNELTKVKYVTEGMRKPAFLSGEQKKAIVDLLFKTNRKVTVKQLKEDYFKKIECFDSVEISGVEDRFNASLGTYHDLLKIIKDKDFLDNEENEDILEDIVLTLTLFEDREMIEERLKTYAHLFDDKVMKQLKRRRYTGWGRLSRKLINGIRDKQSGKTILDFLKSDGFANRNFMQLIHDDSLTFKEDIQKAQVSGQGDSLHEHIANLAGSPAIKKGILQTVKVVDELVKVMGRHKPENIVIEMARENQTTQKGQKNSRERMKRIEEGIKELGSQILKEHPVENTQLQNEKLYLYYLQNGRDMYVDQELDINRLSDYDVDHIVPQSFLKDDSIDNKVLTRSDKARGKSDNVPSEEVVKKMKNYWRQLLNAKLITQRKFDNLTKAERGGLSELDKAGFIKRQLVETRQITKHVAQILDSRMNTKYDENDKLIREVKVITLKSKLVSDFRKDFQFYKVREINNYHHAHDAYLNAVVGTALIKKYPKLESEFVYGDYKVYDVRKMIAKSEQEIGKATAKYFFYSNIMNFFKTEITLANGEIRKRPLIETNGETGEIVWDKGRDFATVRKVLSMPQVNIVKKTEVQTGGFSKESILPKRNSDKLIARKKDWDPKKYGGFDSPTVAYSVLVVAKVEKGKSKKLKSVKELLGITIMERSSFEKNPIDFLEAKGYKEVKKDLIIKLPKYSLFELENGRKRMLASAGELQKGNELALPSKYVNFLYLASHYEKLKGSPEDNEQKQLFVEQHKHYLDEIIEQISEFSKRVILADANLDKVLSAYNKHRDKPIREQAENIIHLFTLTNLGAPAAFKYFDTTIDRKRYTSTKEVLDATLIHQSITGLYETRIDLSQLGGDGGEAAAKPAPGGGGGTLNIEDEHRLHETSKEPDVSLGSTWLSDFPQAWAETGGMGLAVRQAPLIIPLKATSTPVSIKQYPMSQEARLGIKPHIQRLLDQGILVPCQSPWNTPLLPVKKPGTNDYRPVQDLREVNKRVEDIHPTVPNPYNLLSGLPPSHQWYTVLDLKDAFFCLRLHPTSQPLFAFEWRDPEMGISGQLTWTRLPQGFKNSPTLFNEALHRDLADFRIQHPDLILLQYVDDLLLAATSELDCQQGTRALLQTLGNLGYRASAKKAQICQKQVKYLGYLLKEGQRWLTEARKETVMGQPTPKTPRQLREFLGKAGFCRLFIPGFAEMAAPLYPLTKPGTLFNWGPDQQKAYQEIKQALLTAPALGLPDLTKPFELFVDEKQGYAKGVLTQKLGPWRRPVAYLSKKLDPVAAGWPPCLRMVAAIAVLTKDAGKLTMGQPLVILAPHAVEALVKQPPDRWLSNARMTHYQALLLDTDRVQFGPVVALNPATLLPLPEEGLQHNCLDILAEAHGTRPDLTDQPLPDADHTWYTDGSSLLQEGQRKAGAAVTTETEVIWAKALPAGTSAQRAELIALTQALKMAEGKKLNVYTDSRYAFATAHIHGEIYRRRGWLTSEGKEIKNKDEILALLKALFLPKRLSIIHCPGHQKGHSAEARGNRMADQAARKAAITETPDTSTLLAGKRTADGSEFEKRTADGSEFESPKKKAKVE

SEQ ID NO: 2839 - protein, 2096 aa, synthetic construct
MPAAKRVKLDGGDKKYSIGLDIGTNSVGWAVITDEYKVPSKKFKVLGNTDRHSIKKNLIGALLFDSGETAEATRLKRTARRRYTRRKNRICYLQEIFSNEMAKVDDSFFHRLEESFLVEEDKKHERHPIFGNIVDEVAYHEKYPTIYHLRKKLVDSTDKADLRLIYLALAHMIKFRGHFLIEGDLNPDNSDVDKLFIQLVQTYNQLFEENPINASGVDAKAILSARLSKSRRLENLIAQLPGEKKNGLFGNLIALSLGLTPNFKSNFDLAEDAKLQLSKDTYDDDLDNLLAQIGDQYADLFLAAKNLSDAILLSDILRVNTEITKAPLSASMIKRYDEHHQDLTLLKALVRQQLPEKYKEIFFDQSKNGYAGYIDGGASQEEFYKFIKPILEKMDGTEELLVKLNREDLLRKQRTFDNGSIPHQIHLGELHAILRRQEDFYPFLKDNREKIEKILTFRIPYYVGPLARGNSRFAWMTRKSEETITPWNFEEVVDKGASAQSFIERMTNFDKNLPNEKVLPKHSLLYEYFTVYNELTKVKYVTEGMRKPAFLSGEQKKAIVDLLFKTNRKVTVKQLKEDYFKKIECFDSVEISGVEDRFNASLGTYHDLLKIIKDKDFLDNEENEDILEDIVLTLTLFEDREMIEERLKTYAHLFDDKVMKQLKRRRYTGWGRLSRKLINGIRDKQSGKTILDFLKSDGFANRNFMQLIHDDSLTFKEDIQKAQVSGQGDSLHEHIANLAGSPAIKKGILQTVKVVDELVKVMGRHKPENIVIEMARENQTTQKGQKNSRERMKRIEEGIKELGSQILKEHPVENTQLQNEKLYLYYLQNGRDMYVDQELDINRLSDYDVDHIVPQSFLKDDSIDNKVLTRSDKARGKSDNVPSEEVVKKMKNYWRQLLNAKLITQRKFDNLTKAERGGLSELDKAGFIKRQLVETRQITKHVAQILDSRMNTKYDENDKLIREVKVITLKSKLVSDFRKDFQFYKVREINNYHHAHDAYLNAVVGTALIKKYPKLESEFVYGDYKVYDVRKMIAKSEQEIGKATAKYFFYSNIMNFFKTEITLANGEIRKRPLIETNGETGEIVWDKGRDFATVRKVLSMPQVNIVKKTEVQTGGFSKESILPKRNSDKLIARKKDWDPKKYGGFDSPTVAYSVLVVAKVEKGKSKKLKSVKELLGITIMERSSFEKNPIDFLEAKGYKEVKKDLIIKLPKYSLFELENGRKRMLASAGELQKGNELALPSKYVNFLYLASHYEKLKGSPEDNEQKQLFVEQHKHYLDEIIEQISEFSKRVILADANLDKVLSAYNKHRDKPIREQAENIIHLFTLTNLGAPAAFKYFDTTIDRKRYTSTKEVLDATLIHQSITGLYETRIDLSQLGGDGGGSSPAPEAAAKGGTLNIEDEHRLHETSKEPDVSLGSTWLSDFPQAWAETGGMGLAVRQAPLIIPLKATSTPVSIKQYPMSQEARLGIKPHIQRLLDQGILVPCQSPWNTPLLPVKKPGTNDYRPVQDLREVNKRVEDIHPTVPNPYNLLSGLPPSHQWYTVLDLKDAFFCLRLHPTSQPLFAFEWRDPEMGISGQLTWTRLPQGFKNSPTLFNEALHRDLADFRIQHPDLILLQYVDDLLLAATSELDCQQGTRALLQTLGNLGYRASAKKAQICQKQVKYLGYLLKEGQRWLTEARKETVMGQPTPKTPRQLREFLGKAGFCRLFIPGFAEMAAPLYPLTKPGTLFNWGPDQQKAYQEIKQALLTAPALGLPDLTKPFELFVDEKQGYAKGVLTQKLGPWRRPVAYLSKKLDPVAAGWPPCLRMVAAIAVLTKDAGKLTMGQPLVILAPHAVEALVKQPPDRWLSNARMTHYQALLLDTDRVQFGPVVALNPATLLPLPEEGLQHNCLDILAEAHGTRPDLTDQPLPDADHTWYTDGSSLLQEGQRKAGAAVTTETEVIWAKALPAGTSAQRAELIALTQALKMAEGKKLNVYTDSRYAFATAHIHGEIYRRRGWLTSEGKEIKNKDEILALLKALFLPKRLSIIHCPGHQKGHSAEARGNRMADQAARKAAITETPDTSTLLAGKRTADGSEFEKRTADGSEFESPKKKAKVE

SEQ ID NO: 2840 - protein, 2094 aa, synthetic construct
MPAAKRVKLDGGDKKYSIGLDIGTNSVGWAVITDEYKVPSKKFKVLGNTDRHSIKKNLIGALLFDSGETAEATRLKRTARRRYTRRKNRICYLQEIFSNEMAKVDDSFFHRLEESFLVEEDKKHERHPIFGNIVDEVAYHEKYPTIYHLRKKLVDSTDKADLRLIYLALAHMIKFRGHFLIEGDLNPDNSDVDKLFIQLVQTYNQLFEENPINASGVDAKAILSARLSKSRRLENLIAQLPGEKKNGLFGNLIALSLGLTPNFKSNFDLAEDAKLQLSKDTYDDDLDNLLAQIGDQYADLFLAAKNLSDAILLSDILRVNTEITKAPLSASMIKRYDEHHQDLTLLKALVRQQLPEKYKEIFFDQSKNGYAGYIDGGASQEEFYKFIKPILEKMDGTEELLVKLNREDLLRKQRTFDNGSIPHQIHLGELHAILRRQEDFYPFLKDNREKIEKILTFRIPYYVGPLARGNSRFAWMTRKSEETITPWNFEEVVDKGASAQSFIERMTNFDKNLPNEKVLPKHSLLYEYFTVYNELTKVKYVTEGMRKPAFLSGEQKKAIVDLLFKTNRKVTVKQLKEDYFKKIECFDSVEISGVEDRFNASLGTYHDLLKIIKDKDFLDNEENEDILEDIVLTLTLFEDREMIEERLKTYAHLFDDKVMKQLKRRRYTGWGRLSRKLINGIRDKQSGKTILDFLKSDGFANRNFMQLIHDDSLTFKEDIQKAQVSGQGDSLHEHIANLAGSPAIKKGILQTVKVVDELVKVMGRHKPENIVIEMARENQTTQKGQKNSRERMKRIEEGIKELGSQILKEHPVENTQLQNEKLYLYYLQNGRDMYVDQELDINRLSDYDVDHIVPQSFLKDDSIDNKVLTRSDKARGKSDNVPSEEVVKKMKNYWRQLLNAKLITQRKFDNLTKAERGGLSELDKAGFIKRQLVETRQITKHVAQILDSRMNTKYDENDKLIREVKVITLKSKLVSDFRKDFQFYKVREINNYHHAHDAYLNAVVGTALIKKYPKLESEFVYGDYKVYDVRKMIAKSEQEIGKATAKYFFYSNIMNFFKTEITLANGEIRKRPLIETNGETGEIVWDKGRDFATVRKVLSMPQVNIVKKTEVQTGGFSKESILPKRNSDKLIARKKDWDPKKYGGFDSPTVAYSVLVVAKVEKGKSKKLKSVKELLGITIMERSSFEKNPIDFLEAKGYKEVKKDLIIKLPKYSLFELENGRKRMLASAGELQKGNELALPSKYVNFLYLASHYEKLKGSPEDNEQKQLFVEQHKHYLDEIIEQISEFSKRVILADANLDKVLSAYNKHRDKPIREQAENIIHLFTLTNLGAPAAFKYFDTTIDRKRYTSTKEVLDATLIHQSITGLYETRIDLSQLGGDGGGGGGGSPAPGGTLNIEDEHRLHETSKEPDVSLGSTWLSDFPQAWAETGGMGLAVRQAPLIIPLKATSTPVSIKQYPMSQEARLGIKPHIQRLLDQGILVPCQSPWNTPLLPVKKPGTNDYRPVQDLREVNKRVEDIHPTVPNPYNLLSGLPPSHQWYTVLDLKDAFFCLRLHPTSQPLFAFEWRDPEMGISGQLTWTRLPQGFKNSPTLFNEALHRDLADFRIQHPDLILLQYVDDLLLAATSELDCQQGTRALLQTLGNLGYRASAKKAQICQKQVKYLGYLLKEGQRWLTEARKETVMGQPTPKTPRQLREFLGKAGFCRLFIPGFAEMAAPLYPLTKPGTLFNWGPDQQKAYQEIKQALLTAPALGLPDLTKPFELFVDEKQGYAKGVLTQKLGPWRRPVAYLSKKLDPVAAGWPPCLRMVAAIAVLTKDAGKLTMGQPLVILAPHAVEALVKQPPDRWLSNARMTHYQALLLDTDRVQFGPVVALNPATLLPLPEEGLQHNCLDILAEAHGTRPDLTDQPLPDADHTWYTDGSSLLQEGQRKAGAAVTTETEVIWAKALPAGTSAQRAELIALTQALKMAEGKKLNVYTDSRYAFATAHIHGEIYRRRGWLTSEGKEIKNKDEILALLKALFLPKRLSIIHCPGHQKGHSAEARGNRMADQAARKAAITETPDTSTLLAGKRTADGSEFEKRTADGSEFESPKKKAKVE

SEQ ID NO: 2841 - protein, 2094 aa, synthetic construct
MPAAKRVKLDGGDKKYSIGLDIGTNSVGWAVITDEYKVPSKKFKVLGNTDRHSIKKNLIGALLFDSGETAEATRLKRTARRRYTRRKNRICYLQEIFSNEMAKVDDSFFHRLEESFLVEEDKKHERHPIFGNIVDEVAYHEKYPTIYHLRKKLVDSTDKADLRLIYLALAHMIKFRGHFLIEGDLNPDNSDVDKLFIQLVQTYNQLFEENPINASGVDAKAILSARLSKSRRLENLIAQLPGEKKNGLFGNLIALSLGLTPNFKSNFDLAEDAKLQLSKDTYDDDLDNLLAQIGDQYADLFLAAKNLSDAILLSDILRVNTEITKAPLSASMIKRYDEHHQDLTLLKALVRQQLPEKYKEIFFDQSKNGYAGYIDGGASQEEFYKFIKPILEKMDGTEELLVKLNREDLLRKQRTFDNGSIPHQIHLGELHAILRRQEDFYPFLKDNREKIEKILTFRIPYYVGPLARGNSRFAWMTRKSEETITPWNFEEVVDKGASAQSFIERMTNFDKNLPNEKVLPKHSLLYEYFTVYNELTKVKYVTEGMRKPAFLSGEQKKAIVDLLFKTNRKVTVKQLKEDYFKKIECFDSVEISGVEDRFNASLGTYHDLLKIIKDKDFLDNEENEDILEDIVLTLTLFEDREMIEERLKTYAHLFDDKVMKQLKRRRYTGWGRLSRKLINGIRDKQSGKTILDFLKSDGFANRNFMQLIHDDSLTFKEDIQKAQVSGQGDSLHEHIANLAGSPAIKKGILQTVKVVDELVKVMGRHKPENIVIEMARENQTTQKGQKNSRERMKRIEEGIKELGSQILKEHPVENTQLQNEKLYLYYLQNGRDMYVDQELDINRLSDYDVDHIVPQSFLKDDSIDNKVLTRSDKARGKSDNVPSEEVVKKMKNYWRQLLNAKLITQRKFDNLTKAERGGLSELDKAGFIKRQLVETRQITKHVAQILDSRMNTKYDENDKLIREVKVITLKSKLVSDFRKDFQFYKVREINNYHHAHDAYLNAVVGTALIKKYPKLESEFVYGDYKVYDVRKMIAKSEQEIGKATAKYFFYSNIMNFFKTEITLANGEIRKRPLIETNGETGEIVWDKGRDFATVRKVLSMPQVNIVKKTEVQTGGFSKESILPKRNSDKLIARKKDWDPKKYGGFDSPTVAYSVLVVAKVEKGKSKKLKSVKELLGITIMERSSFEKNPIDFLEAKGYKEVKKDLIIKLPKYSLFELENGRKRMLASAGELQKGNELALPSKYVNFLYLASHYEKLKGSPEDNEQKQLFVEQHKHYLDEIIEQISEFSKRVILADANLDKVLSAYNKHRDKPIREQAENIIHLFTLTNLGAPAAFKYFDTTIDRKRYTSTKEVLDATLIHQSITGLYETRIDLSQLGGDGGGGGPAPGSSGGTLNIEDEHRLHETSKEPDVSLGSTWLSDFPQAWAETGGMGLAVRQAPLIIPLKATSTPVSIKQYPMSQEARLGIKPHIQRLLDQGILVPCQSPWNTPLLPVKKPGTNDYRPVQDLREVNKRVEDIHPTVPNPYNLLSGLPPSHQWYTVLDLKDAFFCLRLHPTSQPLFAFEWRDPEMGISGQLTWTRLPQGFKNSPTLFNEALHRDLADFRIQHPDLILLQYVDDLLLAATSELDCQQGTRALLQTLGNLGYRASAKKAQICQKQVKYLGYLLKEGQRWLTEARKETVMGQPTPKTPRQLREFLGKAGFCRLFIPGFAEMAAPLYPLTKPGTLFNWGPDQQKAYQEIKQALLTAPALGLPDLTKPFELFVDEKQGYAKGVLTQKLGPWRRPVAYLSKKLDPVAAGWPPCLRMVAAIAVLTKDAGKLTMGQPLVILAPHAVEALVKQPPDRWLSNARMTHYQALLLDTDRVQFGPVVALNPATLLPLPEEGLQHNCLDILAEAHGTRPDLTDQPLPDADHTWYTDGSSLLQEGQRKAGAAVTTETEVIWAKALPAGTSAQRAELIALTQALKMAEGKKLNVYTDSRYAFATAHIHGEIYRRRGWLTSEGKEIKNKDEILALLKALFLPKRLSIIHCPGHQKGHSAEARGNRMADQAARKAAITETPDTSTLLAGKRTADGSEFEKRTADGSEFESPKKKAKVE

SEQ ID NO: 2842 - protein, 2096 aa, synthetic construct
MPAAKRVKLDGGDKKYSIGLDIGTNSVGWAVITDEYKVPSKKFKVLGNTDRHSIKKNLIGALLFDSGETAEATRLKRTARRRYTRRKNRICYLQEIFSNEMAKVDDSFFHRLEESFLVEEDKKHERHPIFGNIVDEVAYHEKYPTIYHLRKKLVDSTDKADLRLIYLALAHMIKFRGHFLIEGDLNPDNSDVDKLFIQLVQTYNQLFEENPINASGVDAKAILSARLSKSRRLENLIAQLPGEKKNGLFGNLIALSLGLTPNFKSNFDLAEDAKLQLSKDTYDDDLDNLLAQIGDQYADLFLAAKNLSDAILLSDILRVNTEITKAPLSASMIKRYDEHHQDLTLLKALVRQQLPEKYKEIFFDQSKNGYAGYIDGGASQEEFYKFIKPILEKMDGTEELLVKLNREDLLRKQRTFDNGSIPHQIHLGELHAILRRQEDFYPFLKDNREKIEKILTFRIPYYVGPLARGNSRFAWMTRKSEETITPWNFEEVVDKGASAQSFIERMTNFDKNLPNEKVLPKHSLLYEYFTVYNELTKVKYVTEGMRKPAFLSGEQKKAIVDLLFKTNRKVTVKQLKEDYFKKIECFDSVEISGVEDRFNASLGTYHDLLKIIKDKDFLDNEENEDILEDIVLTLTLFEDREMIEERLKTYAHLFDDKVMKQLKRRRYTGWGRLSRKLINGIRDKQSGKTILDFLKSDGFANRNFMQLIHDDSLTFKEDIQKAQVSGQGDSLHEHIANLAGSPAIKKGILQTVKVVDELVKVMGRHKPENIVIEMARENQTTQKGQKNSRERMKRIEEGIKELGSQILKEHPVENTQLQNEKLYLYYLQNGRDMYVDQELDINRLSDYDVDHIVPQSFLKDDSIDNKVLTRSDKARGKSDNVPSEEVVKKMKNYWRQLLNAKLITQRKFDNLTKAERGGLSELDKAGFIKRQLVETRQITKHVAQILDSRMNTKYDENDKLIREVKVITLKSKLVSDFRKDFQFYKVREINNYHHAHDAYLNAVVGTALIKKYPKLESEFVYGDYKVYDVRKMIAKSEQEIGKATAKYFFYSNIMNFFKTEITLANGEIRKRPLIETNGETGEIVWDKGRDFATVRKVLSMPQVNIVKKTEVQTGGFSKESILPKRNSDKLIARKKDWDPKKYGGFDSPTVAYSVLVVAKVEKGKSKKLKSVKELLGITIMERSSFEKNPIDFLEAKGYKEVKKDLIIKLPKYSLFELENGRKRMLASAGELQKGNELALPSKYVNFLYLASHYEKLKGSPEDNEQKQLFVEQHKHYLDEIIEQISEFSKRVILADANLDKVLSAYNKHRDKPIREQAENIIHLFTLTNLGAPAAFKYFDTTIDRKRYTSTKEVLDATLIHQSITGLYETRIDLSQLGGDGGGGSGSSEAAAKGGTLNIEDEHRLHETSKEPDVSLGSTWLSDFPQAWAETGGMGLAVRQAPLIIPLKATSTPVSIKQYPMSQEARLGIKPHIQRLLDQGILVPCQSPWNTPLLPVKKPGTNDYRPVQDLREVNKRVEDIHPTVPNPYNLLSGLPPSHQWYTVLDLKDAFFCLRLHPTSQPLFAFEWRDPEMGISGQLTWTRLPQGFKNSPTLFNEALHRDLADFRIQHPDLILLQYVDDLLLAATSELDCQQGTRALLQTLGNLGYRASAKKAQICQKQVKYLGYLLKEGQRWLTEARKETVMGQPTPKTPRQLREFLGKAGFCRLFIPGFAEMAAPLYPLTKPGTLFNWGPDQQKAYQEIKQALLTAPALGLPDLTKPFELFVDEKQGYAKGVLTQKLGPWRRPVAYLSKKLDPVAAGWPPCLRMVAAIAVLTKDAGKLTMGQPLVILAPHAVEALVKQPPDRWLSNARMTHYQALLLDTDRVQFGPVVALNPATLLPLPEEGLQHNCLDILAEAHGTRPDLTDQPLPDADHTWYTDGSSLLQEGQRKAGAAVTTETEVIWAKALPAGTSAQRAELIALTQALKMAEGKKLNVYTDSRYAFATAHIHGEIYRRRGWLTSEGKEIKNKDEILALLKALFLPKRLSIIHCPGHQKGHSAEARGNRMADQAARKAAITETPDTSTLLAGKRTADGSEFEKRTADGSEFESPKKKAKVE

SEQ ID NO: 2843 - protein, 2096 aa, synthetic construct
MPAAKRVKLDGGDKKYSIGLDIGTNSVGWAVITDEYKVPSKKFKVLGNTDRHSIKKNLIGALLFDSGETAEATRLKRTARRRYTRRKNRICYLQEIFSNEMAKVDDSFFHRLEESFLVEEDKKHERHPIFGNIVDEVAYHEKYPTIYHLRKKLVDSTDKADLRLIYLALAHMIKFRGHFLIEGDLNPDNSDVDKLFIQLVQTYNQLFEENPINASGVDAKAILSARLSKSRRLENLIAQLPGEKKNGLFGNLIALSLGLTPNFKSNFDLAEDAKLQLSKDTYDDDLDNLLAQIGDQYADLFLAAKNLSDAILLSDILRVNTEITKAPLSASMIKRYDEHHQDLTLLKALVRQQLPEKYKEIFFDQSKNGYAGYIDGGASQEEFYKFIKPILEKMDGTEELLVKLNREDLLRKQRTFDNGSIPHQIHLGELHAILRRQEDFYPFLKDNREKIEKILTFRIPYYVGPLARGNSRFAWMTRKSEETITPWNFEEVVDKGASAQSFIERMTNFDKNLPNEKVLPKHSLLYEYFTVYNELTKVKYVTEGMRKPAFLSGEQKKAIVDLLFKTNRKVTVKQLKEDYFKKIECFDSVEISGVEDRFNASLGTYHDLLKIIKDKDFLDNEENEDILEDIVLTLTLFEDREMIEERLKTYAHLFDDKVMKQLKRRRYTGWGRLSRKLINGIRDKQSGKTILDFLKSDGFANRNFMQLIHDDSLTFKEDIQKAQVSGQGDSLHEHIANLAGSPAIKKGILQTVKVVDELVKVMGRHKPENIVIEMARENQTTQKGQKNSRERMKRIEEGIKELGSQILKEHPVENTQLQNEKLYLYYLQNGRDMYVDQELDINRLSDYDVDHIVPQSFLKDDSIDNKVLTRSDKARGKSDNVPSEEVVKKMKNYWRQLLNAKLITQRKFDNLTKAERGGLSELDKAGFIKRQLVETRQITKHVAQILDSRMNTKYDENDKLIREVKVITLKSKLVSDFRKDFQFYKVREINNYHHAHDAYLNAVVGTALIKKYPKLESEFVYGDYKVYDVRKMIAKSEQEIGKATAKYFFYSNIMNFFKTEITLANGEIRKRPLIETNGETGEIVWDKGRDFATVRKVLSMPQVNIVKKTEVQTGGFSKESILPKRNSDKLIARKKDWDPKKYGGFDSPTVAYSVLVVAKVEKGKSKKLKSVKELLGITIMERSSFEKNPIDFLEAKGYKEVKKDLIIKLPKYSLFELENGRKRMLASAGELQKGNELALPSKYVNFLYLASHYEKLKGSPEDNEQKQLFVEQHKHYLDEIIEQISEFSKRVILADANLDKVLSAYNKHRDKPIREQAENIIHLFTLTNLGAPAAFKYFDTTIDRKRYTSTKEVLDATLIHQSITGLYETRIDLSQLGGDGGEAAAKGGGPAPGGTLNIEDEHRLHETSKEPDVSLGSTWLSDFPQAWAETGGMGLAVRQAPLIIPLKATSTPVSIKQYPMSQEARLGIKPHIQRLLDQGILVPCQSPWNTPLLPVKKPGTNDYRPVQDLREVNKRVEDIHPTVPNPYNLLSGLPPSHQWYTVLDLKDAFFCLRLHPTSQPLFAFEWRDPEMGISGQLTWTRLPQGFKNSPTLFNEALHRDLADFRIQHPDLILLQYVDDLLLAATSELDCQQGTRALLQTLGNLGYRASAKKAQICQKQVKYLGYLLKEGQRWLTEARKETVMGQPTPKTPRQLREFLGKAGFCRLFIPGFAEMAAPLYPLTKPGTLFNWGPDQQKAYQEIKQALLTAPALGLPDLTKPFELFVDEKQGYAKGVLTQKLGPWRRPVAYLSKKLDPVAAGWPPCLRMVAAIAVLTKDAGKLTMGQPLVILAPHAVEALVKQPPDRWLSNARMTHYQALLLDTDRVQFGPVVALNPATLLPLPEEGLQHNCLDILAEAHGTRPDLTDQPLPDADHTWYTDGSSLLQEGQRKAGAAVTTETEVIWAKALPAGTSAQRAELIALTQALKMAEGKKLNVYTDSRYAFATAHIHGEIYRRRGWLTSEGKEIKNKDEILALLKALFLPKRLSIIHCPGHQKGHSAEARGNRMADQAARKAAITETPDTSTLLAGKRTADGSEFEKRTADGSEFESPKKKAKVE

SEQ ID NO: 2844 - protein, 2105 aa, synthetic construct
MPAAKRVKLDGGDKKYSIGLDIGTNSVGWAVITDEYKVPSKKFKVLGNTDRHSIKKNLIGALLFDSGETAEATRLKRTARRRYTRRKNRICYLQEIFSNEMAKVDDSFFHRLEESFLVEEDKKHERHPIFGNIVDEVAYHEKYPTIYHLRKKLVDSTDKADLRLIYLALAHMIKFRGHFLIEGDLNPDNSDVDKLFIQLVQTYNQLFEENPINASGVDAKAILSARLSKSRRLENLIAQLPGEKKNGLFGNLIALSLGLTPNFKSNFDLAEDAKLQLSKDTYDDDLDNLLAQIGDQYADLFLAAKNLSDAILLSDILRVNTEITKAPLSASMIKRYDEHHQDLTLLKALVRQQLPEKYKEIFFDQSKNGYAGYIDGGASQEEFYKFIKPILEKMDGTEELLVKLNREDLLRKQRTFDNGSIPHQIHLGELHAILRRQEDFYPFLKDNREKIEKILTFRIPYYVGPLARGNSRFAWMTRKSEETITPWNFEEVVDKGASAQSFIERMTNFDKNLPNEKVLPKHSLLYEYFTVYNELTKVKYVTEGMRKPAFLSGEQKKAIVDLLFKTNRKVTVKQLKEDYFKKIECFDSVEISGVEDRFNASLGTYHDLLKIIKDKDFLDNEENEDILEDIVLTLTLFEDREMIEERLKTYAHLFDDKVMKQLKRRRYTGWGRLSRKLINGIRDKQSGKTILDFLKSDGFANRNFMQLIHDDSLTFKEDIQKAQVSGQGDSLHEHIANLAGSPAIKKGILQTVKVVDELVKVMGRHKPENIVIEMARENQTTQKGQKNSRERMKRIEEGIKELGSQILKEHPVENTQLQNEKLYLYYLQNGRDMYVDQELDINRLSDYDVDHIVPQSFLKDDSIDNKVLTRSDKARGKSDNVPSEEVVKKMKNYWRQLLNAKLITQRKFDNLTKAERGGLSELDKAGFIKRQLVETRQITKHVAQILDSRMNTKYDENDKLIREVKVITLKSKLVSDFRKDFQFYKVREINNYHHAHDAYLNAVVGTALIKKYPKLESEFVYGDYKVYDVRKMIAKSEQEIGKATAKYFFYSNIMNFFKTEITLANGEIRKRPLIETNGETGEIVWDKGRDFATVRKVLSMPQVNIVKKTEVQTGGFSKESILPKRNSDKLIARKKDWDPKKYGGFDSPTVAYSVLVVAKVEKGKSKKLKSVKELLGITIMERSSFEKNPIDFLEAKGYKEVKKDLIIKLPKYSLFELENGRKRMLASAGELQKGNELALPSKYVNFLYLASHYEKLKGSPEDNEQKQLFVEQHKHYLDEIIEQISEFSKRVILADANLDKVLSAYNKHRDKPIREQAENIIHLFTLTNLGAPAAFKYFDTTIDRKRYTSTKEVLDATLIHQSITGLYETRIDLSQLGGDGGEAAAKEAAAKEAAAKEAAAKGGTLNIEDEHRLHETSKEPDVSLGSTWLSDFPQAWAETGGMGLAVRQAPLIIPLKATSTPVSIKQYPMSQEARLGIKPHIQRLLDQGILVPCQSPWNTPLLPVKKPGTNDYRPVQDLREVNKRVEDIHPTVPNPYNLLSGLPPSHQWYTVLDLKDAFFCLRLHPTSQPLFAFEWRDPEMGISGQLTWTRLPQGFKNSPTLFNEALHRDLADFRIQHPDLILLQYVDDLLLAATSELDCQQGTRALLQTLGNLGYRASAKKAQICQKQVKYLGYLLKEGQRWLTEARKETVMGQPTPKTPRQLREFLGKAGFCRLFIPGFAEMAAPLYPLTKPGTLFNWGPDQQKAYQEIKQALLTAPALGLPDLTKPFELFVDEKQGYAKGVLTQKLGPWRRPVAYLSKKLDPVAAGWPPCLRMVAAIAVLTKDAGKLTMGQPLVILAPHAVEALVKQPPDRWLSNARMTHYQALLLDTDRVQFGPVVALNPATLLPLPEEGLQHNCLDILAEAHGTRPDLTDQPLPDADHTWYTDGSSLLQEGQRKAGAAVTTETEVIWAKALPAGTSAQRAELIALTQALKMAEGKKLNVYTDSRYAFATAHIHGEIYRRRGWLTSEGKEIKNKDEILALLKALFLPKRLSIIHCPGHQKGHSAEARGNRMADQAARKAAITETPDTSTLLAGKRTADGSEFEKRTADGSEFESPKKKAKVE

SEQ ID NO: 2845 - protein, 2095 aa, synthetic construct
MPAAKRVKLDGGDKKYSIGLDIGTNSVGWAVITDEYKVPSKKFKVLGNTDRHSIKKNLIGALLFDSGETAEATRLKRTARRRYTRRKNRICYLQEIFSNEMAKVDDSFFHRLEESFLVEEDKKHERHPIFGNIVDEVAYHEKYPTIYHLRKKLVDSTDKADLRLIYLALAHMIKFRGHFLIEGDLNPDNSDVDKLFIQLVQTYNQLFEENPINASGVDAKAILSARLSKSRRLENLIAQLPGEKKNGLFGNLIALSLGLTPNFKSNFDLAEDAKLQLSKDTYDDDLDNLLAQIGDQYADLFLAAKNLSDAILLSDILRVNTEITKAPLSASMIKRYDEHHQDLTLLKALVRQQLPEKYKEIFFDQSKNGYAGYIDGGASQEEFYKFIKPILEKMDGTEELLVKLNREDLLRKQRTFDNGSIPHQIHLGELHAILRRQEDFYPFLKDNREKIEKILTFRIPYYVGPLARGNSRFAWMTRKSEETITPWNFEEVVDKGASAQSFIERMTNFDKNLPNEKVLPKHSLLYEYFTVYNELTKVKYVTEGMRKPAFLSGEQKKAIVDLLFKTNRKVTVKQLKEDYFKKIECFDSVEISGVEDRFNASLGTYHDLLKIIKDKDFLDNEENEDILEDIVLTLTLFEDREMIEERLKTYAHLFDDKVMKQLKRRRYTGWGRLSRKLINGIRDKQSGKTILDFLKSDGFANRNFMQLIHDDSLTFKEDIQKAQVSGQGDSLHEHIANLAGSPAIKKGILQTVKVVDELVKVMGRHKPENIVIEMARENQTTQKGQKNSRERMKRIEEGIKELGSQILKEHPVENTQLQNEKLYLYYLQNGRDMYVDQELDINRLSDYDVDHIVPQSFLKDDSIDNKVLTRSDKARGKSDNVPSEEVVKKMKNYWRQLLNAKLITQRKFDNLTKAERGGLSELDKAGFIKRQLVETRQITKHVAQILDSRMNTKYDENDKLIREVKVITLKSKLVSDFRKDFQFYKVREINNYHHAHDAYLNAVVGTALIKKYPKLESEFVYGDYKVYDVRKMIAKSEQEIGKATAKYFFYSNIMNFFKTEITLANGEIRKRPLIETNGETGEIVWDKGRDFATVRKVLSMPQVNIVKKTEVQTGGFSKESILPKRNSDKLIARKKDWDPKKYGGFDSPTVAYSVLVVAKVEKGKSKKLKSVKELLGITIMERSSFEKNPIDFLEAKGYKEVKKDLIIKLPKYSLFELENGRKRMLASAGELQKGNELALPSKYVNFLYLASHYEKLKGSPEDNEQKQLFVEQHKHYLDEIIEQISEFSKRVILADANLDKVLSAYNKHRDKPIREQAENIIHLFTLTNLGAPAAFKYFDTTIDRKRYTSTKEVLDATLIHQSITGLYETRIDLSQLGGDGGEAAAKEAAAKGGTLNIEDEHRLHETSKEPDVSLGSTWLSDFPQAWAETGGMGLAVRQAPLIIPLKATSTPVSIKQYPMSQEARLGIKPHIQRLLDQGILVPCQSPWNTPLLPVKKPGTNDYRPVQDLREVNKRVEDIHPTVPNPYNLLSGLPPSHQWYTVLDLKDAFFCLRLHPTSQPLFAFEWRDPEMGISGQLTWTRLPQGFKNSPTLFNEALHRDLADFRIQHPDLILLQYVDDLLLAATSELDCQQGTRALLQTLGNLGYRASAKKAQICQKQVKYLGYLLKEGQRWLTEARKETVMGQPTPKTPRQLREFLGKAGFCRLFIPGFAEMAAPLYPLTKPGTLFNWGPDQQKAYQEIKQALLTAPALGLPDLTKPFELFVDEKQGYAKGVLTQKLGPWRRPVAYLSKKLDPVAAGWPPCLRMVAAIAVLTKDAGKLTMGQPLVILAPHAVEALVKQPPDRWLSNARMTHYQALLLDTDRVQFGPVVALNPATLLPLPEEGLQHNCLDILAEAHGTRPDLTDQPLPDADHTWYTDGSSLLQEGQRKAGAAVTTETEVIWAKALPAGTSAQRAELIALTQALKMAEGKKLNVYTDSRYAFATAHIHGEIYRRRGWLTSEGKEIKNKDEILALLKALFLPKRLSIIHCPGHQKGHSAEARGNRMADQAARKAAITETPDTSTLLAGKRTADGSEFEKRTADGSEFESPKKKAKVE

SEQ ID NO: 2846 - protein, 2094 aa, synthetic construct
MPAAKRVKLDGGDKKYSIGLDIGTNSVGWAVITDEYKVPSKKFKVLGNTDRHSIKKNLIGALLFDSGETAEATRLKRTARRRYTRRKNRICYLQEIFSNEMAKVDDSFFHRLEESFLVEEDKKHERHPIFGNIVDEVAYHEKYPTIYHLRKKLVDSTDKADLRLIYLALAHMIKFRGHFLIEGDLNPDNSDVDKLFIQLVQTYNQLFEENPINASGVDAKAILSARLSKSRRLENLIAQLPGEKKNGLFGNLIALSLGLTPNFKSNFDLAEDAKLQLSKDTYDDDLDNLLAQIGDQYADLFLAAKNLSDAILLSDILRVNTEITKAPLSASMIKRYDEHHQDLTLLKALVRQQLPEKYKEIFFDQSKNGYAGYIDGGASQEEFYKFIKPILEKMDGTEELLVKLNREDLLRKQRTFDNGSIPHQIHLGELHAILRRQEDFYPFLKDNREKIEKILTFRIPYYVGPLARGNSRFAWMTRKSEETITPWNFEEVVDKGASAQSFIERMTNFDKNLPNEKVLPKHSLLYEYFTVYNELTKVKYVTEGMRKPAFLSGEQKKAIVDLLFKTNRKVTVKQLKEDYFKKIECFDSVEISGVEDRFNASLGTYHDLLKIIKDKDFLDNEENEDILEDIVLTLTLFEDREMIEERLKTYAHLFDDKVMKQLKRRRYTGWGRLSRKLINGIRDKQSGKTILDFLKSDGFANRNFMQLIHDDSLTFKEDIQKAQVSGQGDSLHEHIANLAGSPAIKKGILQTVKVVDELVKVMGRHKPENIVIEMARENQTTQKGQKNSRERMKRIEEGIKELGSQILKEHPVENTQLQNEKLYLYYLQNGRDMYVDQELDINRLSDYDVDHIVPQSFLKDDSIDNKVLTRSDKARGKSDNVPSEEVVKKMKNYWRQLLNAKLITQRKFDNLTKAERGGLSELDKAGFIKRQLVETRQITKHVAQILDSRMNTKYDENDKLIREVKVITLKSKLVSDFRKDFQFYKVREINNYHHAHDAYLNAVVGTALIKKYPKLESEFVYGDYKVYDVRKMIAKSEQEIGKATAKYFFYSNIMNFFKTEITLANGEIRKRPLIETNGETGEIVWDKGRDFATVRKVLSMPQVNIVKKTEVQTGGFSKESILPKRNSDKLIARKKDWDPKKYGGFDSPTVAYSVLVVAKVEKGKSKKLKSVKELLGITIMERSSFEKNPIDFLEAKGYKEVKKDLIIKLPKYSLFELENGRKRMLASAGELQKGNELALPSKYVNFLYLASHYEKLKGSPEDNEQKQLFVEQHKHYLDEIIEQISEFSKRVILADANLDKVLSAYNKHRDKPIREQAENIIHLFTLTNLGAPAAFKYFDTTIDRKRYTSTKEVLDATLIHQSITGLYETRIDLSQLGGDGGGGGGGSGSSGGTLNIEDEHRLHETSKEPDVSLGSTWLSDFPQAWAETGGMGLAVRQAPLIIPLKATSTPVSIKQYPMSQEARLGIKPHIQRLLDQGILVPCQSPWNTPLLPVKKPGTNDYRPVQDLREVNKRVEDIHPTVPNPYNLLSGLPPSHQWYTVLDLKDAFFCLRLHPTSQPLFAFEWRDPEMGISGQLTWTRLPQGFKNSPTLFNEALHRDLADFRIQHPDLILLQYVDDLLLAATSELDCQQGTRALLQTLGNLGYRASAKKAQICQKQVKYLGYLLKEGQRWLTEARKETVMGQPTPKTPRQLREFLGKAGFCRLFIPGFAEMAAPLYPLTKPGTLFNWGPDQQKAYQEIKQALLTAPALGLPDLTKPFELFVDEKQGYAKGVLTQKLGPWRRPVAYLSKKLDPVAAGWPPCLRMVAAIAVLTKDAGKLTMGQPLVILAPHAVEALVKQPPDRWLSNARMTHYQALLLDTDRVQFGPVVALNPATLLPLPEEGLQHNCLDILAEAHGTRPDLTDQPLPDADHTWYTDGSSLLQEGQRKAGAAVTTETEVIWAKALPAGTSAQRAELIALTQALKMAEGKKLNVYTDSRYAFATAHIHGEIYRRRGWLTSEGKEIKNKDEILALLKALFLPKRLSIIHCPGHQKGHSAEARGNRMADQAARKAAITETPDTSTLLAGKRTADGSEFEKRTADGSEFESPKKKAKVE

SEQ ID NO: 2847 - protein, 2094 aa, synthetic construct
MPAAKRVKLDGGDKKYSIGLDIGTNSVGWAVITDEYKVPSKKFKVLGNTDRHSIKKNLIGALLFDSGETAEATRLKRTARRRYTRRKNRICYLQEIFSNEMAKVDDSFFHRLEESFLVEEDKKHERHPIFGNIVDEVAYHEKYPTIYHLRKKLVDSTDKADLRLIYLALAHMIKFRGHFLIEGDLNPDNSDVDKLFIQLVQTYNQLFEENPINASGVDAKAILSARLSKSRRLENLIAQLPGEKKNGLFGNLIALSLGLTPNFKSNFDLAEDAKLQLSKDTYDDDLDNLLAQIGDQYADLFLAAKNLSDAILLSDILRVNTEITKAPLSASMIKRYDEHHQDLTLLKALVRQQLPEKYKEIFFDQSKNGYAGYIDGGASQEEFYKFIKPILEKMDGTEELLVKLNREDLLRKQRTFDNGSIPHQIHLGELHAILRRQEDFYPFLKDNREKIEKILTFRIPYYVGPLARGNSRFAWMTRKSEETITPWNFEEVVDKGASAQSFIERMTNFDKNLPNEKVLPKHSLLYEYFTVYNELTKVKYVTEGMRKPAFLSGEQKKAIVDLLFKTNRKVTVKQLKEDYFKKIECFDSVEISGVEDRFNASLGTYHDLLKIIKDKDFLDNEENEDILEDIVLTLTLFEDREMIEERLKTYAHLFDDKVMKQLKRRRYTGWGRLSRKLINGIRDKQSGKTILDFLKSDGFANRNFMQLIHDDSLTFKEDIQKAQVSGQGDSLHEHIANLAGSPAIKKGILQTVKVVDELVKVMGRHKPENIVIEMARENQTTQKGQKNSRERMKRIEEGIKELGSQILKEHPVENTQLQNEKLYLYYLQNGRDMYVDQELDINRLSDYDVDHIVPQSFLKDDSIDNKVLTRSDKARGKSDNVPSEEVVKKMKNYWRQLLNAKLITQRKFDNLTKAERGGLSELDKAGFIKRQLVETRQITKHVAQILDSRMNTKYDENDKLIREVKVITLKSKLVSDFRKDFQFYKVREINNYHHAHDAYLNAVVGTALIKKYPKLESEFVYGDYKVYDVRKMIAKSEQEIGKATAKYFFYSNIMNFFKTEITLANGEIRKRPLIETNGETGEIVWDKGRDFATVRKVLSMPQVNIVKKTEVQTGGFSKESILPKRNSDKLIARKKDWDPKKYGGFDSPTVAYSVLVVAKVEKGKSKKLKSVKELLGITIMERSSFEKNPIDFLEAKGYKEVKKDLIIKLPKYSLFELENGRKRMLASAGELQKGNELALPSKYVNFLYLASHYEKLKGSPEDNEQKQLFVEQHKHYLDEIIEQISEFSKRVILADANLDKVLSAYNKHRDKPIREQAENIIHLFTLTNLGAPAAFKYFDTTIDRKRYTSTKEVLDATLIHQSITGLYETRIDLSQLGGDGGPAPGSSGGGGGTLNIEDEHRLHETSKEPDVSLGSTWLSDFPQAWAETGGMGLAVRQAPLIIPLKATSTPVSIKQYPMSQEARLGIKPHIQRLLDQGILVPCQSPWNTPLLPVKKPGTNDYRPVQDLREVNKRVEDIHPTVPNPYNLLSGLPPSHQWYTVLDLKDAFFCLRLHPTSQPLFAFEWRDPEMGISGQLTWTRLPQGFKNSPTLFNEALHRDLADFRIQHPDLILLQYVDDLLLAATSELDCQQGTRALLQTLGNLGYRASAKKAQICQKQVKYLGYLLKEGQRWLTEARKETVMGQPTPKTPRQLREFLGKAGFCRLFIPGFAEMAAPLYPLTKPGTLFNWGPDQQKAYQEIKQALLTAPALGLPDLTKPFELFVDEKQGYAKGVLTQKLGPWRRPVAYLSKKLDPVAAGWPPCLRMVAAIAVLTKDAGKLTMGQPLVILAPHAVEALVKQPPDRWLSNARMTHYQALLLDTDRVQFGPVVALNPATLLPLPEEGLQHNCLDILAEAHGTRPDLTDQPLPDADHTWYTDGSSLLQEGQRKAGAAVTTETEVIWAKALPAGTSAQRAELIALTQALKMAEGKKLNVYTDSRYAFATAHIHGEIYRRRGWLTSEGKEIKNKDEILALLKALFLPKRLSIIHCPGHQKGHSAEARGNRMADQAARKAAITETPDTSTLLAGKRTADGSEFEKRTADGSEFESPKKKAKVE

SEQ ID NO: 2848 - protein, 2094 aa, synthetic construct
MPAAKRVKLDGGDKKYSIGLDIGTNSVGWAVITDEYKVPSKKFKVLGNTDRHSIKKNLIGALLFDSGETAEATRLKRTARRRYTRRKNRICYLQEIFSNEMAKVDDSFFHRLEESFLVEEDKKHERHPIFGNIVDEVAYHEKYPTIYHLRKKLVDSTDKADLRLIYLALAHMIKFRGHFLIEGDLNPDNSDVDKLFIQLVQTYNQLFEENPINASGVDAKAILSARLSKSRRLENLIAQLPGEKKNGLFGNLIALSLGLTPNFKSNFDLAEDAKLQLSKDTYDDDLDNLLAQIGDQYADLFLAAKNLSDAILLSDILRVNTEITKAPLSASMIKRYDEHHQDLTLLKALVRQQLPEKYKEIFFDQSKNGYAGYIDGGASQEEFYKFIKPILEKMDGTEELLVKLNREDLLRKQRTFDNGSIPHQIHLGELHAILRRQEDFYPFLKDNREKIEKILTFRIPYYVGPLARGNSRFAWMTRKSEETITPWNFEEVVDKGASAQSFIERMTNFDKNLPNEKVLPKHSLLYEYFTVYNELTKVKYVTEGMRKPAFLSGEQKKAIVDLLFKTNRKVTVKQLKEDYFKKIECFDSVEISGVEDRFNASLGTYHDLLKIIKDKDFLDNEENEDILEDIVLTLTLFEDREMIEERLKTYAHLFDDKVMKQLKRRRYTGWGRLSRKLINGIRDKQSGKTILDFLKSDGFANRNFMQLIHDDSLTFKEDIQKAQVSGQGDSLHEHIANLAGSPAIKKGILQTVKVVDELVKVMGRHKPENIVIEMARENQTTQKGQKNSRERMKRIEEGIKELGSQILKEHPVENTQLQNEKLYLYYLQNGRDMYVDQELDINRLSDYDVDHIVPQSFLKDDSIDNKVLTRSDKARGKSDNVPSEEVVKKMKNYWRQLLNAKLITQRKFDNLTKAERGGLSELDKAGFIKRQLVETRQITKHVAQILDSRMNTKYDENDKLIREVKVITLKSKLVSDFRKDFQFYKVREINNYHHAHDAYLNAVVGTALIKKYPKLESEFVYGDYKVYDVRKMIAKSEQEIGKATAKYFFYSNIMNFFKTEITLANGEIRKRPLIETNGETGEIVWDKGRDFATVRKVLSMPQVNIVKKTEVQTGGFSKESILPKRNSDKLIARKKDWDPKKYGGFDSPTVAYSVLVVAKVEKGKSKKLKSVKELLGITIMERSSFEKNPIDFLEAKGYKEVKKDLIIKLPKYSLFELENGRKRMLASAGELQKGNELALPSKYVNFLYLASHYEKLKGSPEDNEQKQLFVEQHKHYLDEIIEQISEFSKRVILADANLDKVLSAYNKHRDKPIREQAENIIHLFTLTNLGAPAAFKYFDTTIDRKRYTSTKEVLDATLIHQSITGLYETRIDLSQLGGDGGGGGGSSPAPGGTLNIEDEHRLHETSKEPDVSLGSTWLSDFPQAWAETGGMGLAVRQAPLIIPLKATSTPVSIKQYPMSQEARLGIKPHIQRLLDQGILVPCQSPWNTPLLPVKKPGTNDYRPVQDLREVNKRVEDIHPTVPNPYNLLSGLPPSHQWYTVLDLKDAFFCLRLHPTSQPLFAFEWRDPEMGISGQLTWTRLPQGFKNSPTLFNEALHRDLADFRIQHPDLILLQYVDDLLLAATSELDCQQGTRALLQTLGNLGYRASAKKAQICQKQVKYLGYLLKEGQRWLTEARKETVMGQPTPKTPRQLREFLGKAGFCRLFIPGFAEMAAPLYPLTKPGTLFNWGPDQQKAYQEIKQALLTAPALGLPDLTKPFELFVDEKQGYAKGVLTQKLGPWRRPVAYLSKKLDPVAAGWPPCLRMVAAIAVLTKDAGKLTMGQPLVILAPHAVEALVKQPPDRWLSNARMTHYQALLLDTDRVQFGPVVALNPATLLPLPEEGLQHNCLDILAEAHGTRPDLTDQPLPDADHTWYTDGSSLLQEGQRKAGAAVTTETEVIWAKALPAGTSAQRAELIALTQALKMAEGKKLNVYTDSRYAFATAHIHGEIYRRRGWLTSEGKEIKNKDEILALLKALFLPKRLSIIHCPGHQKGHSAEARGNRMADQAARKAAITETPDTSTLLAGKRTADGSEFEKRTADGSEFESPKKKAKVE

SEQ ID NO: 2849 - protein, 2093 aa, synthetic construct
MPAAKRVKLDGGDKKYSIGLDIGTNSVGWAVITDEYKVPSKKFKVLGNTDRHSIKKNLIGALLFDSGETAEATRLKRTARRRYTRRKNRICYLQEIFSNEMAKVDDSFFHRLEESFLVEEDKKHERHPIFGNIVDEVAYHEKYPTIYHLRKKLVDSTDKADLRLIYLALAHMIKFRGHFLIEGDLNPDNSDVDKLFIQLVQTYNQLFEENPINASGVDAKAILSARLSKSRRLENLIAQLPGEKKNGLFGNLIALSLGLTPNFKSNFDLAEDAKLQLSKDTYDDDLDNLLAQIGDQYADLFLAAKNLSDAILLSDILRVNTEITKAPLSASMIKRYDEHHQDLTLLKALVRQQLPEKYKEIFFDQSKNGYAGYIDGGASQEEFYKFIKPILEKMDGTEELLVKLNREDLLRKQRTFDNGSIPHQIHLGELHAILRRQEDFYPFLKDNREKIEKILTFRIPYYVGPLARGNSRFAWMTRKSEETITPWNFEEVVDKGASAQSFIERMTNFDKNLPNEKVLPKHSLLYEYFTVYNELTKVKYVTEGMRKPAFLSGEQKKAIVDLLFKTNRKVTVKQLKEDYFKKIECFDSVEISGVEDRFNASLGTYHDLLKIIKDKDFLDNEENEDILEDIVLTLTLFEDREMIEERLKTYAHLFDDKVMKQLKRRRYTGWGRLSRKLINGIRDKQSGKTILDFLKSDGFANRNFMQLIHDDSLTFKEDIQKAQVSGQGDSLHEHIANLAGSPAIKKGILQTVKVVDELVKVMGRHKPENIVIEMARENQTTQKGQKNSRERMKRIEEGIKELGSQILKEHPVENTQLQNEKLYLYYLQNGRDMYVDQELDINRLSDYDVDHIVPQSFLKDDSIDNKVLTRSDKARGKSDNVPSEEVVKKMKNYWRQLLNAKLITQRKFDNLTKAERGGLSELDKAGFIKRQLVETRQITKHVAQILDSRMNTKYDENDKLIREVKVITLKSKLVSDFRKDFQFYKVREINNYHHAHDAYLNAVVGTALIKKYPKLESEFVYGDYKVYDVRKMIAKSEQEIGKATAKYFFYSNIMNFFKTEITLANGEIRKRPLIETNGETGEIVWDKGRDFATVRKVLSMPQVNIVKKTEVQTGGFSKESILPKRNSDKLIARKKDWDPKKYGGFDSPTVAYSVLVVAKVEKGKSKKLKSVKELLGITIMERSSFEKNPIDFLEAKGYKEVKKDLIIKLPKYSLFELENGRKRMLASAGELQKGNELALPSKYVNFLYLASHYEKLKGSPEDNEQKQLFVEQHKHYLDEIIEQISEFSKRVILADANLDKVLSAYNKHRDKPIREQAENIIHLFTLTNLGAPAAFKYFDTTIDRKRYTSTKEVLDATLIHQSITGLYETRIDLSQLGGDGGGGSEAAAKGGTLNIEDEHRLHETSKEPDVSLGSTWLSDFPQAWAETGGMGLAVRQAPLIIPLKATSTPVSIKQYPMSQEARLGIKPHIQRLLDQGILVPCQSPWNTPLLPVKKPGTNDYRPVQDLREVNKRVEDIHPTVPNPYNLLSGLPPSHQWYTVLDLKDAFFCLRLHPTSQPLFAFEWRDPEMGISGQLTWTRLPQGFKNSPTLFNEALHRDLADFRIQHPDLILLQYVDDLLLAATSELDCQQGTRALLQTLGNLGYRASAKKAQICQKQVKYLGYLLKEGQRWLTEARKETVMGQPTPKTPRQLREFLGKAGFCRLFIPGFAEMAAPLYPLTKPGTLFNWGPDQQKAYQEIKQALLTAPALGLPDLTKPFELFVDEKQGYAKGVLTQKLGPWRRPVAYLSKKLDPVAAGWPPCLRMVAAIAVLTKDAGKLTMGQPLVILAPHAVEALVKQPPDRWLSNARMTHYQALLLDTDRVQFGPVVALNPATLLPLPEEGLQHNCLDILAEAHGTRPDLTDQPLPDADHTWYTDGSSLLQEGQRKAGAAVTTETEVIWAKALPAGTSAQRAELIALTQALKMAEGKKLNVYTDSRYAFATAHIHGEIYRRRGWLTSEGKEIKNKDEILALLKALFLPKRLSIIHCPGHQKGHSAEARGNRMADQAARKAAITETPDTSTLLAGKRTADGSEFEKRTADGSEFESPKKKAKVE

SEQ ID NO: 2850 - protein, 2093 aa, synthetic construct
MPAAKRVKLDGGDKKYSIGLDIGTNSVGWAVITDEYKVPSKKFKVLGNTDRHSIKKNLIGALLFDSGETAEATRLKRTARRRYTRRKNRICYLQEIFSNEMAKVDDSFFHRLEESFLVEEDKKHERHPIFGNIVDEVAYHEKYPTIYHLRKKLVDSTDKADLRLIYLALAHMIKFRGHFLIEGDLNPDNSDVDKLFIQLVQTYNQLFEENPINASGVDAKAILSARLSKSRRLENLIAQLPGEKKNGLFGNLIALSLGLTPNFKSNFDLAEDAKLQLSKDTYDDDLDNLLAQIGDQYADLFLAAKNLSDAILLSDILRVNTEITKAPLSASMIKRYDEHHQDLTLLKALVRQQLPEKYKEIFFDQSKNGYAGYIDGGASQEEFYKFIKPILEKMDGTEELLVKLNREDLLRKQRTFDNGSIPHQIHLGELHAILRRQEDFYPFLKDNREKIEKILTFRIPYYVGPLARGNSRFAWMTRKSEETITPWNFEEVVDKGASAQSFIERMTNFDKNLPNEKVLPKHSLLYEYFTVYNELTKVKYVTEGMRKPAFLSGEQKKAIVDLLFKTNRKVTVKQLKEDYFKKIECFDSVEISGVEDRFNASLGTYHDLLKIIKDKDFLDNEENEDILEDIVLTLTLFEDREMIEERLKTYAHLFDDKVMKQLKRRRYTGWGRLSRKLINGIRDKQSGKTILDFLKSDGFANRNFMQLIHDDSLTFKEDIQKAQVSGQGDSLHEHIANLAGSPAIKKGILQTVKVVDELVKVMGRHKPENIVIEMARENQTTQKGQKNSRERMKRIEEGIKELGSQILKEHPVENTQLQNEKLYLYYLQNGRDMYVDQELDINRLSDYDVDHIVPQSFLKDDSIDNKVLTRSDKARGKSDNVPSEEVVKKMKNYWRQLLNAKLITQRKFDNLTKAERGGLSELDKAGFIKRQLVETRQITKHVAQILDSRMNTKYDENDKLIREVKVITLKSKLVSDFRKDFQFYKVREINNYHHAHDAYLNAVVGTALIKKYPKLESEFVYGDYKVYDVRKMIAKSEQEIGKATAKYFFYSNIMNFFKTEITLANGEIRKRPLIETNGETGEIVWDKGRDFATVRKVLSMPQVNIVKKTEVQTGGFSKESILPKRNSDKLIARKKDWDPKKYGGFDSPTVAYSVLVVAKVEKGKSKKLKSVKELLGITIMERSSFEKNPIDFLEAKGYKEVKKDLIIKLPKYSLFELENGRKRMLASAGELQKGNELALPSKYVNFLYLASHYEKLKGSPEDNEQKQLFVEQHKHYLDEIIEQISEFSKRVILADANLDKVLSAYNKHRDKPIREQAENIIHLFTLTNLGAPAAFKYFDTTIDRKRYTSTKEVLDATLIHQSITGLYETRIDLSQLGGDGGEAAAKPAPGGTLNIEDEHRLHETSKEPDVSLGSTWLSDFPQAWAETGGMGLAVRQAPLIIPLKATSTPVSIKQYPMSQEARLGIKPHIQRLLDQGILVPCQSPWNTPLLPVKKPGTNDYRPVQDLREVNKRVEDIHPTVPNPYNLLSGLPPSHQWYTVLDLKDAFFCLRLHPTSQPLFAFEWRDPEMGISGQLTWTRLPQGFKNSPTLFNEALHRDLADFRIQHPDLILLQYVDDLLLAATSELDCQQGTRALLQTLGNLGYRASAKKAQICQKQVKYLGYLLKEGQRWLTEARKETVMGQPTPKTPRQLREFLGKAGFCRLFIPGFAEMAAPLYPLTKPGTLFNWGPDQQKAYQEIKQALLTAPALGLPDLTKPFELFVDEKQGYAKGVLTQKLGPWRRPVAYLSKKLDPVAAGWPPCLRMVAAIAVLTKDAGKLTMGQPLVILAPHAVEALVKQPPDRWLSNARMTHYQALLLDTDRVQFGPVVALNPATLLPLPEEGLQHNCLDILAEAHGTRPDLTDQPLPDADHTWYTDGSSLLQEGQRKAGAAVTTETEVIWAKALPAGTSAQRAELIALTQALKMAEGKKLNVYTDSRYAFATAHIHGEIYRRRGWLTSEGKEIKNKDEILALLKALFLPKRLSIIHCPGHQKGHSAEARGNRMADQAARKAAITETPDTSTLLAGKRTADGSEFEKRTADGSEFESPKKKAKVE

SEQ ID NO: 2851 - protein, 2096 aa, synthetic construct
MPAAKRVKLDGGDKKYSIGLDIGTNSVGWAVITDEYKVPSKKFKVLGNTDRHSIKKNLIGALLFDSGETAEATRLKRTARRRYTRRKNRICYLQEIFSNEMAKVDDSFFHRLEESFLVEEDKKHERHPIFGNIVDEVAYHEKYPTIYHLRKKLVDSTDKADLRLIYLALAHMIKFRGHFLIEGDLNPDNSDVDKLFIQLVQTYNQLFEENPINASGVDAKAILSARLSKSRRLENLIAQLPGEKKNGLFGNLIALSLGLTPNFKSNFDLAEDAKLQLSKDTYDDDLDNLLAQIGDQYADLFLAAKNLSDAILLSDILRVNTEITKAPLSASMIKRYDEHHQDLTLLKALVRQQLPEKYKEIFFDQSKNGYAGYIDGGASQEEFYKFIKPILEKMDGTEELLVKLNREDLLRKQRTFDNGSIPHQIHLGELHAILRRQEDFYPFLKDNREKIEKILTFRIPYYVGPLARGNSRFAWMTRKSEETITPWNFEEVVDKGASAQSFIERMTNFDKNLPNEKVLPKHSLLYEYFTVYNELTKVKYVTEGMRKPAFLSGEQKKAIVDLLFKTNRKVTVKQLKEDYFKKIECFDSVEISGVEDRFNASLGTYHDLLKIIKDKDFLDNEENEDILEDIVLTLTLFEDREMIEERLKTYAHLFDDKVMKQLKRRRYTGWGRLSRKLINGIRDKQSGKTILDFLKSDGFANRNFMQLIHDDSLTFKEDIQKAQVSGQGDSLHEHIANLAGSPAIKKGILQTVKVVDELVKVMGRHKPENIVIEMARENQTTQKGQKNSRERMKRIEEGIKELGSQILKEHPVENTQLQNEKLYLYYLQNGRDMYVDQELDINRLSDYDVDHIVPQSFLKDDSIDNKVLTRSDKARGKSDNVPSEEVVKKMKNYWRQLLNAKLITQRKFDNLTKAERGGLSELDKAGFIKRQLVETRQITKHVAQILDSRMNTKYDENDKLIREVKVITLKSKLVSDFRKDFQFYKVREINNYHHAHDAYLNAVVGTALIKKYPKLESEFVYGDYKVYDVRKMIAKSEQEIGKATAKYFFYSNIMNFFKTEITLANGEIRKRPLIETNGETGEIVWDKGRDFATVRKVLSMPQVNIVKKTEVQTGGFSKESILPKRNSDKLIARKKDWDPKKYGGFDSPTVAYSVLVVAKVEKGKSKKLKSVKELLGITIMERSSFEKNPIDFLEAKGYKEVKKDLIIKLPKYSLFELENGRKRMLASAGELQKGNELALPSKYVNFLYLASHYEKLKGSPEDNEQKQLFVEQHKHYLDEIIEQISEFSKRVILADANLDKVLSAYNKHRDKPIREQAENIIHLFTLTNLGAPAAFKYFDTTIDRKRYTSTKEVLDATLIHQSITGLYETRIDLSQLGGDGGPAPAPAPAPAPGGTLNIEDEHRLHETSKEPDVSLGSTWLSDFPQAWAETGGMGLAVRQAPLIIPLKATSTPVSIKQYPMSQEARLGIKPHIQRLLDQGILVPCQSPWNTPLLPVKKPGTNDYRPVQDLREVNKRVEDIHPTVPNPYNLLSGLPPSHQWYTVLDLKDAFFCLRLHPTSQPLFAFEWRDPEMGISGQLTWTRLPQGFKNSPTLFNEALHRDLADFRIQHPDLILLQYVDDLLLAATSELDCQQGTRALLQTLGNLGYRASAKKAQICQKQVKYLGYLLKEGQRWLTEARKETVMGQPTPKTPRQLREFLGKAGFCRLFIPGFAEMAAPLYPLTKPGTLFNWGPDQQKAYQEIKQALLTAPALGLPDLTKPFELFVDEKQGYAKGVLTQKLGPWRRPVAYLSKKLDPVAAGWPPCLRMVAAIAVLTKDAGKLTMGQPLVILAPHAVEALVKQPPDRWLSNARMTHYQALLLDTDRVQFGPVVALNPATLLPLPEEGLQHNCLDILAEAHGTRPDLTDQPLPDADHTWYTDGSSLLQEGQRKAGAAVTTETEVIWAKALPAGTSAQRAELIALTQALKMAEGKKLNVYTDSRYAFATAHIHGEIYRRRGWLTSEGKEIKNKDEILALLKALFLPKRLSIIHCPGHQKGHSAEARGNRMADQAARKAAITETPDTSTLLAGKRTADGSEFEKRTADGSEFESPKKKAKVE

SEQ ID NO: 2852 - protein, 2094 aa, synthetic construct
MPAAKRVKLDGGDKKYSIGLDIGTNSVGWAVITDEYKVPSKKFKVLGNTDRHSIKKNLIGALLFDSGETAEATRLKRTARRRYTRRKNRICYLQEIFSNEMAKVDDSFFHRLEESFLVEEDKKHERHPIFGNIVDEVAYHEKYPTIYHLRKKLVDSTDKADLRLIYLALAHMIKFRGHFLIEGDLNPDNSDVDKLFIQLVQTYNQLFEENPINASGVDAKAILSARLSKSRRLENLIAQLPGEKKNGLFGNLIALSLGLTPNFKSNFDLAEDAKLQLSKDTYDDDLDNLLAQIGDQYADLFLAAKNLSDAILLSDILRVNTEITKAPLSASMIKRYDEHHQDLTLLKALVRQQLPEKYKEIFFDQSKNGYAGYIDGGASQEEFYKFIKPILEKMDGTEELLVKLNREDLLRKQRTFDNGSIPHQIHLGELHAILRRQEDFYPFLKDNREKIEKILTFRIPYYVGPLARGNSRFAWMTRKSEETITPWNFEEVVDKGASAQSFIERMTNFDKNLPNEKVLPKHSLLYEYFTVYNELTKVKYVTEGMRKPAFLSGEQKKAIVDLLFKTNRKVTVKQLKEDYFKKIECFDSVEISGVEDRFNASLGTYHDLLKIIKDKDFLDNEENEDILEDIVLTLTLFEDREMIEERLKTYAHLFDDKVMKQLKRRRYTGWGRLSRKLINGIRDKQSGKTILDFLKSDGFANRNFMQLIHDDSLTFKEDIQKAQVSGQGDSLHEHIANLAGSPAIKKGILQTVKVVDELVKVMGRHKPENIVIEMARENQTTQKGQKNSRERMKRIEEGIKELGSQILKEHPVENTQLQNEKLYLYYLQNGRDMYVDQELDINRLSDYDVDHIVPQSFLKDDSIDNKVLTRSDKARGKSDNVPSEEVVKKMKNYWRQLLNAKLITQRKFDNLTKAERGGLSELDKAGFIKRQLVETRQITKHVAQILDSRMNTKYDENDKLIREVKVITLKSKLVSDFRKDFQFYKVREINNYHHAHDAYLNAVVGTALIKKYPKLESEFVYGDYKVYDVRKMIAKSEQEIGKATAKYFFYSNIMNFFKTEITLANGEIRKRPLIETNGETGEIVWDKGRDFATVRKVLSMPQVNIVKKTEVQTGGFSKESILPKRNSDKLIARKKDWDPKKYGGFDSPTVAYSVLVVAKVEKGKSKKLKSVKELLGITIMERSSFEKNPIDFLEAKGYKEVKKDLIIKLPKYSLFELENGRKRMLASAGELQKGNELALPSKYVNFLYLASHYEKLKGSPEDNEQKQLFVEQHKHYLDEIIEQISEFSKRVILADANLDKVLSAYNKHRDKPIREQAENIIHLFTLTNLGAPAAFKYFDTTIDRKRYTSTKEVLDATLIHQSITGLYETRIDLSQLGGDGGGGSPAPGSSGGTLNIEDEHRLHETSKEPDVSLGSTWLSDFPQAWAETGGMGLAVRQAPLIIPLKATSTPVSIKQYPMSQEARLGIKPHIQRLLDQGILVPCQSPWNTPLLPVKKPGTNDYRPVQDLREVNKRVEDIHPTVPNPYNLLSGLPPSHQWYTVLDLKDAFFCLRLHPTSQPLFAFEWRDPEMGISGQLTWTRLPQGFKNSPTLFNEALHRDLADFRIQHPDLILLQYVDDLLLAATSELDCQQGTRALLQTLGNLGYRASAKKAQICQKQVKYLGYLLKEGQRWLTEARKETVMGQPTPKTPRQLREFLGKAGFCRLFIPGFAEMAAPLYPLTKPGTLFNWGPDQQKAYQEIKQALLTAPALGLPDLTKPFELFVDEKQGYAKGVLTQKLGPWRRPVAYLSKKLDPVAAGWPPCLRMVAAIAVLTKDAGKLTMGQPLVILAPHAVEALVKQPPDRWLSNARMTHYQALLLDTDRVQFGPVVALNPATLLPLPEEGLQHNCLDILAEAHGTRPDLTDQPLPDADHTWYTDGSSLLQEGQRKAGAAVTTETEVIWAKALPAGTSAQRAELIALTQALKMAEGKKLNVYTDSRYAFATAHIHGEIYRRRGWLTSEGKEIKNKDEILALLKALFLPKRLSIIHCPGHQKGHSAEARGNRMADQAARKAAITETPDTSTLLAGKRTADGSEFEKRTADGSEFESPKKKAKVE

SEQ ID NO: 2853 - protein, 2091 aa, synthetic construct
MPAAKRVKLDGGDKKYSIGLDIGTNSVGWAVITDEYKVPSKKFKVLGNTDRHSIKKNLIGALLFDSGETAEATRLKRTARRRYTRRKNRICYLQEIFSNEMAKVDDSFFHRLEESFLVEEDKKHERHPIFGNIVDEVAYHEKYPTIYHLRKKLVDSTDKADLRLIYLALAHMIKFRGHFLIEGDLNPDNSDVDKLFIQLVQTYNQLFEENPINASGVDAKAILSARLSKSRRLENLIAQLPGEKKNGLFGNLIALSLGLTPNFKSNFDLAEDAKLQLSKDTYDDDLDNLLAQIGDQYADLFLAAKNLSDAILLSDILRVNTEITKAPLSASMIKRYDEHHQDLTLLKALVRQQLPEKYKEIFFDQSKNGYAGYIDGGASQEEFYKFIKPILEKMDGTEELLVKLNREDLLRKQRTFDNGSIPHQIHLGELHAILRRQEDFYPFLKDNREKIEKILTFRIPYYVGPLARGNSRFAWMTRKSEETITPWNFEEVVDKGASAQSFIERMTNFDKNLPNEKVLPKHSLLYEYFTVYNELTKVKYVTEGMRKPAFLSGEQKKAIVDLLFKTNRKVTVKQLKEDYFKKIECFDSVEISGVEDRFNASLGTYHDLLKIIKDKDFLDNEENEDILEDIVLTLTLFEDREMIEERLKTYAHLFDDKVMKQLKRRRYTGWGRLSRKLINGIRDKQSGKTILDFLKSDGFANRNFMQLIHDDSLTFKEDIQKAQVSGQGDSLHEHIANLAGSPAIKKGILQTVKVVDELVKVMGRHKPENIVIEMARENQTTQKGQKNSRERMKRIEEGIKELGSQILKEHPVENTQLQNEKLYLYYLQNGRDMYVDQELDINRLSDYDVDHIVPQSFLKDDSIDNKVLTRSDKARGKSDNVPSEEVVKKMKNYWRQLLNAKLITQRKFDNLTKAERGGLSELDKAGFIKRQLVETRQITKHVAQILDSRMNTKYDENDKLIREVKVITLKSKLVSDFRKDFQFYKVREINNYHHAHDAYLNAVVGTALIKKYPKLESEFVYGDYKVYDVRKMIAKSEQEIGKATAKYFFYSNIMNFFKTEITLANGEIRKRPLIETNGETGEIVWDKGRDFATVRKVLSMPQVNIVKKTEVQTGGFSKESILPKRNSDKLIARKKDWDPKKYGGFDSPTVAYSVLVVAKVEKGKSKKLKSVKELLGITIMERSSFEKNPIDFLEAKGYKEVKKDLIIKLPKYSLFELENGRKRMLASAGELQKGNELALPSKYVNFLYLASHYEKLKGSPEDNEQKQLFVEQHKHYLDEIIEQISEFSKRVILADANLDKVLSAYNKHRDKPIREQAENIIHLFTLTNLGAPAAFKYFDTTIDRKRYTSTKEVLDATLIHQSITGLYETRIDLSQLGGDGGGGSGGSGGTLNIEDEHRLHETSKEPDVSLGSTWLSDFPQAWAETGGMGLAVRQAPLIIPLKATSTPVSIKQYPMSQEARLGIKPHIQRLLDQGILVPCQSPWNTPLLPVKKPGTNDYRPVQDLREVNKRVEDIHPTVPNPYNLLSGLPPSHQWYTVLDLKDAFFCLRLHPTSQPLFAFEWRDPEMGISGQLTWTRLPQGFKNSPTLFNEALHRDLADFRIQHPDLILLQYVDDLLLAATSELDCQQGTRALLQTLGNLGYRASAKKAQICQKQVKYLGYLLKEGQRWLTEARKETVMGQPTPKTPRQLREFLGKAGFCRLFIPGFAEMAAPLYPLTKPGTLFNWGPDQQKAYQEIKQALLTAPALGLPDLTKPFELFVDEKQGYAKGVLTQKLGPWRRPVAYLSKKLDPVAAGWPPCLRMVAAIAVLTKDAGKLTMGQPLVILAPHAVEALVKQPPDRWLSNARMTHYQALLLDTDRVQFGPVVALNPATLLPLPEEGLQHNCLDILAEAHGTRPDLTDQPLPDADHTWYTDGSSLLQEGQRKAGAAVTTETEVIWAKALPAGTSAQRAELIALTQALKMAEGKKLNVYTDSRYAFATAHIHGEIYRRRGWLTSEGKEIKNKDEILALLKALFLPKRLSIIHCPGHQKGHSAEARGNRMADQAARKAAITETPDTSTLLAGKRTADGSEFEKRTADGSEFESPKKKAKVE

SEQ ID NO: 2854 - protein, 2094 aa, synthetic construct
MPAAKRVKLDGGDKKYSIGLDIGTNSVGWAVITDEYKVPSKKFKVLGNTDRHSIKKNLIGALLFDSGETAEATRLKRTARRRYTRRKNRICYLQEIFSNEMAKVDDSFFHRLEESFLVEEDKKHERHPIFGNIVDEVAYHEKYPTIYHLRKKLVDSTDKADLRLIYLALAHMIKFRGHFLIEGDLNPDNSDVDKLFIQLVQTYNQLFEENPINASGVDAKAILSARLSKSRRLENLIAQLPGEKKNGLFGNLIALSLGLTPNFKSNFDLAEDAKLQLSKDTYDDDLDNLLAQIGDQYADLFLAAKNLSDAILLSDILRVNTEITKAPLSASMIKRYDEHHQDLTLLKALVRQQLPEKYKEIFFDQSKNGYAGYIDGGASQEEFYKFIKPILEKMDGTEELLVKLNREDLLRKQRTFDNGSIPHQIHLGELHAILRRQEDFYPFLKDNREKIEKILTFRIPYYVGPLARGNSRFAWMTRKSEETITPWNFEEVVDKGASAQSFIERMTNFDKNLPNEKVLPKHSLLYEYFTVYNELTKVKYVTEGMRKPAFLSGEQKKAIVDLLFKTNRKVTVKQLKEDYFKKIECFDSVEISGVEDRFNASLGTYHDLLKIIKDKDFLDNEENEDILEDIVLTLTLFEDREMIEERLKTYAHLFDDKVMKQLKRRRYTGWGRLSRKLINGIRDKQSGKTILDFLKSDGFANRNFMQLIHDDSLTFKEDIQKAQVSGQGDSLHEHIANLAGSPAIKKGILQTVKVVDELVKVMGRHKPENIVIEMARENQTTQKGQKNSRERMKRIEEGIKELGSQILKEHPVENTQLQNEKLYLYYLQNGRDMYVDQELDINRLSDYDVDHIVPQSFLKDDSIDNKVLTRSDKARGKSDNVPSEEVVKKMKNYWRQLLNAKLITQRKFDNLTKAERGGLSELDKAGFIKRQLVETRQITKHVAQILDSRMNTKYDENDKLIREVKVITLKSKLVSDFRKDFQFYKVREINNYHHAHDAYLNAVVGTALIKKYPKLESEFVYGDYKVYDVRKMIAKSEQEIGKATAKYFFYSNIMNFFKTEITLANGEIRKRPLIETNGETGEIVWDKGRDFATVRKVLSMPQVNIVKKTEVQTGGFSKESILPKRNSDKLIARKKDWDPKKYGGFDSPTVAYSVLVVAKVEKGKSKKLKSVKELLGITIMERSSFEKNPIDFLEAKGYKEVKKDLIIKLPKYSLFELENGRKRMLASAGELQKGNELALPSKYVNFLYLASHYEKLKGSPEDNEQKQLFVEQHKHYLDEIIEQISEFSKRVILADANLDKVLSAYNKHRDKPIREQAENIIHLFTLTNLGAPAAFKYFDTTIDRKRYTSTKEVLDATLIHQSITGLYETRIDLSQLGGDGGGGGGSSGGSGGTLNIEDEHRLHETSKEPDVSLGSTWLSDFPQAWAETGGMGLAVRQAPLIIPLKATSTPVSIKQYPMSQEARLGIKPHIQRLLDQGILVPCQSPWNTPLLPVKKPGTNDYRPVQDLREVNKRVEDIHPTVPNPYNLLSGLPPSHQWYTVLDLKDAFFCLRLHPTSQPLFAFEWRDPEMGISGQLTWTRLPQGFKNSPTLFNEALHRDLADFRIQHPDLILLQYVDDLLLAATSELDCQQGTRALLQTLGNLGYRASAKKAQICQKQVKYLGYLLKEGQRWLTEARKETVMGQPTPKTPRQLREFLGKAGFCRLFIPGFAEMAAPLYPLTKPGTLFNWGPDQQKAYQEIKQALLTAPALGLPDLTKPFELFVDEKQGYAKGVLTQKLGPWRRPVAYLSKKLDPVAAGWPPCLRMVAAIAVLTKDAGKLTMGQPLVILAPHAVEALVKQPPDRWLSNARMTHYQALLLDTDRVQFGPVVALNPATLLPLPEEGLQHNCLDILAEAHGTRPDLTDQPLPDADHTWYTDGSSLLQEGQRKAGAAVTTETEVIWAKALPAGTSAQRAELIALTQALKMAEGKKLNVYTDSRYAFATAHIHGEIYRRRGWLTSEGKEIKNKDEILALLKALFLPKRLSIIHCPGHQKGHSAEARGNRMADQAARKAAITETPDTSTLLAGKRTADGSEFEKRTADGSEFESPKKKAKVE

SEQ ID NO: 2855 - protein, 2091 aa, synthetic construct
MPAAKRVKLDGGDKKYSIGLDIGTNSVGWAVITDEYKVPSKKFKVLGNTDRHSIKKNLIGALLFDSGETAEATRLKRTARRRYTRRKNRICYLQEIFSNEMAKVDDSFFHRLEESFLVEEDKKHERHPIFGNIVDEVAYHEKYPTIYHLRKKLVDSTDKADLRLIYLALAHMIKFRGHFLIEGDLNPDNSDVDKLFIQLVQTYNQLFEENPINASGVDAKAILSARLSKSRRLENLIAQLPGEKKNGLFGNLIALSLGLTPNFKSNFDLAEDAKLQLSKDTYDDDLDNLLAQIGDQYADLFLAAKNLSDAILLSDILRVNTEITKAPLSASMIKRYDEHHQDLTLLKALVRQQLPEKYKEIFFDQSKNGYAGYIDGGASQEEFYKFIKPILEKMDGTEELLVKLNREDLLRKQRTFDNGSIPHQIHLGELHAILRRQEDFYPFLKDNREKIEKILTFRIPYYVGPLARGNSRFAWMTRKSEETITPWNFEEVVDKGASAQSFIERMTNFDKNLPNEKVLPKHSLLYEYFTVYNELTKVKYVTEGMRKPAFLSGEQKKAIVDLLFKTNRKVTVKQLKEDYFKKIECFDSVEISGVEDRFNASLGTYHDLLKIIKDKDFLDNEENEDILEDIVLTLTLFEDREMIEERLKTYAHLFDDKVMKQLKRRRYTGWGRLSRKLINGIRDKQSGKTILDFLKSDGFANRNFMQLIHDDSLTFKEDIQKAQVSGQGDSLHEHIANLAGSPAIKKGILQTVKVVDELVKVMGRHKPENIVIEMARENQTTQKGQKNSRERMKRIEEGIKELGSQILKEHPVENTQLQNEKLYLYYLQNGRDMYVDQELDINRLSDYDVDHIVPQSFLKDDSIDNKVLTRSDKARGKSDNVPSEEVVKKMKNYWRQLLNAKLITQRKFDNLTKAERGGLSELDKAGFIKRQLVETRQITKHVAQILDSRMNTKYDENDKLIREVKVITLKSKLVSDFRKDFQFYKVREINNYHHAHDAYLNAVVGTALIKKYPKLESEFVYGDYKVYDVRKMIAKSEQEIGKATAKYFFYSNIMNFFKTEITLANGEIRKRPLIETNGETGEIVWDKGRDFATVRKVLSMPQVNIVKKTEVQTGGFSKESILPKRNSDKLIARKKDWDPKKYGGFDSPTVAYSVLVVAKVEKGKSKKLKSVKELLGITIMERSSFEKNPIDFLEAKGYKEVKKDLIIKLPKYSLFELENGRKRMLASAGELQKGNELALPSKYVNFLYLASHYEKLKGSPEDNEQKQLFVEQHKHYLDEIIEQISEFSKRVILADANLDKVLSAYNKHRDKPIREQAENIIHLFTLTNLGAPAAFKYFDTTIDRKRYTSTKEVLDATLIHQSITGLYETRIDLSQLGGDGGGSSGGSGGTLNIEDEHRLHETSKEPDVSLGSTWLSDFPQAWAETGGMGLAVRQAPLIIPLKATSTPVSIKQYPMSQEARLGIKPHIQRLLDQGILVPCQSPWNTPLLPVKKPGTNDYRPVQDLREVNKRVEDIHPTVPNPYNLLSGLPPSHQWYTVLDLKDAFFCLRLHPTSQPLFAFEWRDPEMGISGQLTWTRLPQGFKNSPTLFNEALHRDLADFRIQHPDLILLQYVDDLLLAATSELDCQQGTRALLQTLGNLGYRASAKKAQICQKQVKYLGYLLKEGQRWLTEARKETVMGQPTPKTPRQLREFLGKAGFCRLFIPGFAEMAAPLYPLTKPGTLFNWGPDQQKAYQEIKQALLTAPALGLPDLTKPFELFVDEKQGYAKGVLTQKLGPWRRPVAYLSKKLDPVAAGWPPCLRMVAAIAVLTKDAGKLTMGQPLVILAPHAVEALVKQPPDRWLSNARMTHYQALLLDTDRVQFGPVVALNPATLLPLPEEGLQHNCLDILAEAHGTRPDLTDQPLPDADHTWYTDGSSLLQEGQRKAGAAVTTETEVIWAKALPAGTSAQRAELIALTQALKMAEGKKLNVYTDSRYAFATAHIHGEIYRRRGWLTSEGKEIKNKDEILALLKALFLPKRLSIIHCPGHQKGHSAEARGNRMADQAARKAAITETPDTSTLLAGKRTADGSEFEKRTADGSEFESPKKKAKVE

SEQ ID NO: 2856 - protein, 2093 aa, synthetic construct
MPAAKRVKLDGGDKKYSIGLDIGTNSVGWAVITDEYKVPSKKFKVLGNTDRHSIKKNLIGALLFDSGETAEATRLKRTARRRYTRRKNRICYLQEIFSNEMAKVDDSFFHRLEESFLVEEDKKHERHPIFGNIVDEVAYHEKYPTIYHLRKKLVDSTDKADLRLIYLALAHMIKFRGHFLIEGDLNPDNSDVDKLFIQLVQTYNQLFEENPINASGVDAKAILSARLSKSRRLENLIAQLPGEKKNGLFGNLIALSLGLTPNFKSNFDLAEDAKLQLSKDTYDDDLDNLLAQIGDQYADLFLAAKNLSDAILLSDILRVNTEITKAPLSASMIKRYDEHHQDLTLLKALVRQQLPEKYKEIFFDQSKNGYAGYIDGGASQEEFYKFIKPILEKMDGTEELLVKLNREDLLRKQRTFDNGSIPHQIHLGELHAILRRQEDFYPFLKDNREKIEKILTFRIPYYVGPLARGNSRFAWMTRKSEETITPWNFEEVVDKGASAQSFIERMTNFDKNLPNEKVLPKHSLLYEYFTVYNELTKVKYVTEGMRKPAFLSGEQKKAIVDLLFKTNRKVTVKQLKEDYFKKIECFDSVEISGVEDRFNASLGTYHDLLKIIKDKDFLDNEENEDILEDIVLTLTLFEDREMIEERLKTYAHLFDDKVMKQLKRRRYTGWGRLSRKLINGIRDKQSGKTILDFLKSDGFANRNFMQLIHDDSLTFKEDIQKAQVSGQGDSLHEHIANLAGSPAIKKGILQTVKVVDELVKVMGRHKPENIVIEMARENQTTQKGQKNSRERMKRIEEGIKELGSQILKEHPVENTQLQNEKLYLYYLQNGRDMYVDQELDINRLSDYDVDHIVPQSFLKDDSIDNKVLTRSDKARGKSDNVPSEEVVKKMKNYWRQLLNAKLITQRKFDNLTKAERGGLSELDKAGFIKRQLVETRQITKHVAQILDSRMNTKYDENDKLIREVKVITLKSKLVSDFRKDFQFYKVREINNYHHAHDAYLNAVVGTALIKKYPKLESEFVYGDYKVYDVRKMIAKSEQEIGKATAKYFFYSNIMNFFKTEITLANGEIRKRPLIETNGETGEIVWDKGRDFATVRKVLSMPQVNIVKKTEVQTGGFSKESILPKRNSDKLIARKKDWDPKKYGGFDSPTVAYSVLVVAKVEKGKSKKLKSVKELLGITIMERSSFEKNPIDFLEAKGYKEVKKDLIIKLPKYSLFELENGRKRMLASAGELQKGNELALPSKYVNFLYLASHYEKLKGSPEDNEQKQLFVEQHKHYLDEIIEQISEFSKRVILADANLDKVLSAYNKHRDKPIREQAENIIHLFTLTNLGAPAAFKYFDTTIDRKRYTSTKEVLDATLIHQSITGLYETRIDLSQLGGDGGGGGEAAAKGGTLNIEDEHRLHETSKEPDVSLGSTWLSDFPQAWAETGGMGLAVRQAPLIIPLKATSTPVSIKQYPMSQEARLGIKPHIQRLLDQGILVPCQSPWNTPLLPVKKPGTNDYRPVQDLREVNKRVEDIHPTVPNPYNLLSGLPPSHQWYTVLDLKDAFFCLRLHPTSQPLFAFEWRDPEMGISGQLTWTRLPQGFKNSPTLFNEALHRDLADFRIQHPDLILLQYVDDLLLAATSELDCQQGTRALLQTLGNLGYRASAKKAQICQKQVKYLGYLLKEGQRWLTEARKETVMGQPTPKTPRQLREFLGKAGFCRLFIPGFAEMAAPLYPLTKPGTLFNWGPDQQKAYQEIKQALLTAPALGLPDLTKPFELFVDEKQGYAKGVLTQKLGPWRRPVAYLSKKLDPVAAGWPPCLRMVAAIAVLTKDAGKLTMGQPLVILAPHAVEALVKQPPDRWLSNARMTHYQALLLDTDRVQFGPVVALNPATLLPLPEEGLQHNCLDILAEAHGTRPDLTDQPLPDADHTWYTDGSSLLQEGQRKAGAAVTTETEVIWAKALPAGTSAQRAELIALTQALKMAEGKKLNVYTDSRYAFATAHIHGEIYRRRGWLTSEGKEIKNKDEILALLKALFLPKRLSIIHCPGHQKGHSAEARGNRMADQAARKAAITETPDTSTLLAGKRTADGSEFEKRTADGSEFESPKKKAKVE

SEQ ID NO: 2857 - protein, 2096 aa, synthetic construct
MPAAKRVKLDGGDKKYSIGLDIGTNSVGWAVITDEYKVPSKKFKVLGNTDRHSIKKNLIGALLFDSGETAEATRLKRTARRRYTRRKNRICYLQEIFSNEMAKVDDSFFHRLEESFLVEEDKKHERHPIFGNIVDEVAYHEKYPTIYHLRKKLVDSTDKADLRLIYLALAHMIKFRGHFLIEGDLNPDNSDVDKLFIQLVQTYNQLFEENPINASGVDAKAILSARLSKSRRLENLIAQLPGEKKNGLFGNLIALSLGLTPNFKSNFDLAEDAKLQLSKDTYDDDLDNLLAQIGDQYADLFLAAKNLSDAILLSDILRVNTEITKAPLSASMIKRYDEHHQDLTLLKALVRQQLPEKYKEIFFDQSKNGYAGYIDGGASQEEFYKFIKPILEKMDGTEELLVKLNREDLLRKQRTFDNGSIPHQIHLGELHAILRRQEDFYPFLKDNREKIEKILTFRIPYYVGPLARGNSRFAWMTRKSEETITPWNFEEVVDKGASAQSFIERMTNFDKNLPNEKVLPKHSLLYEYFTVYNELTKVKYVTEGMRKPAFLSGEQKKAIVDLLFKTNRKVTVKQLKEDYFKKIECFDSVEISGVEDRFNASLGTYHDLLKIIKDKDFLDNEENEDILEDIVLTLTLFEDREMIEERLKTYAHLFDDKVMKQLKRRRYTGWGRLSRKLINGIRDKQSGKTILDFLKSDGFANRNFMQLIHDDSLTFKEDIQKAQVSGQGDSLHEHIANLAGSPAIKKGILQTVKVVDELVKVMGRHKPENIVIEMARENQTTQKGQKNSRERMKRIEEGIKELGSQILKEHPVENTQLQNEKLYLYYLQNGRDMYVDQELDINRLSDYDVDHIVPQSFLKDDSIDNKVLTRSDKARGKSDNVPSEEVVKKMKNYWRQLLNAKLITQRKFDNLTKAERGGLSELDKAGFIKRQLVETRQITKHVAQILDSRMNTKYDENDKLIREVKVITLKSKLVSDFRKDFQFYKVREINNYHHAHDAYLNAVVGTALIKKYPKLESEFVYGDYKVYDVRKMIAKSEQEIGKATAKYFFYSNIMNFFKTEITLANGEIRKRPLIETNGETGEIVWDKGRDFATVRKVLSMPQVNIVKKTEVQTGGFSKESILPKRNSDKLIARKKDWDPKKYGGFDSPTVAYSVLVVAKVEKGKSKKLKSVKELLGITIMERSSFEKNPIDFLEAKGYKEVKKDLIIKLPKYSLFELENGRKRMLASAGELQKGNELALPSKYVNFLYLASHYEKLKGSPEDNEQKQLFVEQHKHYLDEIIEQISEFSKRVILADANLDKVLSAYNKHRDKPIREQAENIIHLFTLTNLGAPAAFKYFDTTIDRKRYTSTKEVLDATLIHQSITGLYETRIDLSQLGGDGGGGSEAAAKPAPGGTLNIEDEHRLHETSKEPDVSLGSTWLSDFPQAWAETGGMGLAVRQAPLIIPLKATSTPVSIKQYPMSQEARLGIKPHIQRLLDQGILVPCQSPWNTPLLPVKKPGTNDYRPVQDLREVNKRVEDIHPTVPNPYNLLSGLPPSHQWYTVLDLKDAFFCLRLHPTSQPLFAFEWRDPEMGISGQLTWTRLPQGFKNSPTLFNEALHRDLADFRIQHPDLILLQYVDDLLLAATSELDCQQGTRALLQTLGNLGYRASAKKAQICQKQVKYLGYLLKEGQRWLTEARKETVMGQPTPKTPRQLREFLGKAGFCRLFIPGFAEMAAPLYPLTKPGTLFNWGPDQQKAYQEIKQALLTAPALGLPDLTKPFELFVDEKQGYAKGVLTQKLGPWRRPVAYLSKKLDPVAAGWPPCLRMVAAIAVLTKDAGKLTMGQPLVILAPHAVEALVKQPPDRWLSNARMTHYQALLLDTDRVQFGPVVALNPATLLPLPEEGLQHNCLDILAEAHGTRPDLTDQPLPDADHTWYTDGSSLLQEGQRKAGAAVTTETEVIWAKALPAGTSAQRAELIALTQALKMAEGKKLNVYTDSRYAFATAHIHGEIYRRRGWLTSEGKEIKNKDEILALLKALFLPKRLSIIHCPGHQKGHSAEARGNRMADQAARKAAITETPDTSTLLAGKRTADGSEFEKRTADGSEFESPKKKAKVE

SEQ ID NO: 2858 - protein, 2101 aa, synthetic construct
MPAAKRVKLDGGDKKYSIGLDIGTNSVGWAVITDEYKVPSKKFKVLGNTDRHSIKKNLIGALLFDSGETAEATRLKRTARRRYTRRKNRICYLQEIFSNEMAKVDDSFFHRLEESFLVEEDKKHERHPIFGNIVDEVAYHEKYPTIYHLRKKLVDSTDKADLRLIYLALAHMIKFRGHFLIEGDLNPDNSDVDKLFIQLVQTYNQLFEENPINASGVDAKAILSARLSKSRRLENLIAQLPGEKKNGLFGNLIALSLGLTPNFKSNFDLAEDAKLQLSKDTYDDDLDNLLAQIGDQYADLFLAAKNLSDAILLSDILRVNTEITKAPLSASMIKRYDEHHQDLTLLKALVRQQLPEKYKEIFFDQSKNGYAGYIDGGASQEEFYKFIKPILEKMDGTEELLVKLNREDLLRKQRTFDNGSIPHQIHLGELHAILRRQEDFYPFLKDNREKIEKILTFRIPYYVGPLARGNSRFAWMTRKSEETITPWNFEEVVDKGASAQSFIERMTNFDKNLPNEKVLPKHSLLYEYFTVYNELTKVKYVTEGMRKPAFLSGEQKKAIVDLLFKTNRKVTVKQLKEDYFKKIECFDSVEISGVEDRFNASLGTYHDLLKIIKDKDFLDNEENEDILEDIVLTLTLFEDREMIEERLKTYAHLFDDKVMKQLKRRRYTGWGRLSRKLINGIRDKQSGKTILDFLKSDGFANRNFMQLIHDDSLTFKEDIQKAQVSGQGDSLHEHIANLAGSPAIKKGILQTVKVVDELVKVMGRHKPENIVIEMARENQTTQKGQKNSRERMKRIEEGIKELGSQILKEHPVENTQLQNEKLYLYYLQNGRDMYVDQELDINRLSDYDVDHIVPQSFLKDDSIDNKVLTRSDKARGKSDNVPSEEVVKKMKNYWRQLLNAKLITQRKFDNLTKAERGGLSELDKAGFIKRQLVETRQITKHVAQILDSRMNTKYDENDKLIREVKVITLKSKLVSDFRKDFQFYKVREINNYHHAHDAYLNAVVGTALIKKYPKLESEFVYGDYKVYDVRKMIAKSEQEIGKATAKYFFYSNIMNFFKTEITLANGEIRKRPLIETNGETGEIVWDKGRDFATVRKVLSMPQVNIVKKTEVQTGGFSKESILPKRNSDKLIARKKDWDPKKYGGFDSPTVAYSVLVVAKVEKGKSKKLKSVKELLGITIMERSSFEKNPIDFLEAKGYKEVKKDLIIKLPKYSLFELENGRKRMLASAGELQKGNELALPSKYVNFLYLASHYEKLKGSPEDNEQKQLFVEQHKHYLDEIIEQISEFSKRVILADANLDKVLSAYNKHRDKPIREQAENIIHLFTLTNLGAPAAFKYFDTTIDRKRYTSTKEVLDATLIHQSITGLYETRIDLSQLGGDGGSGSETPGTSESATPESGGTLNIEDEHRLHETSKEPDVSLGSTWLSDFPQAWAETGGMGLAVRQAPLIIPLKATSTPVSIKQYPMSQEARLGIKPHIQRLLDQGILVPCQSPWNTPLLPVKKPGTNDYRPVQDLREVNKRVEDIHPTVPNPYNLLSGLPPSHQWYTVLDLKDAFFCLRLHPTSQPLFAFEWRDPEMGISGQLTWTRLPQGFKNSPTLFNEALHRDLADFRIQHPDLILLQYVDDLLLAATSELDCQQGTRALLQTLGNLGYRASAKKAQICQKQVKYLGYLLKEGQRWLTEARKETVMGQPTPKTPRQLREFLGKAGFCRLFIPGFAEMAAPLYPLTKPGTLFNWGPDQQKAYQEIKQALLTAPALGLPDLTKPFELFVDEKQGYAKGVLTQKLGPWRRPVAYLSKKLDPVAAGWPPCLRMVAAIAVLTKDAGKLTMGQPLVILAPHAVEALVKQPPDRWLSNARMTHYQALLLDTDRVQFGPVVALNPATLLPLPEEGLQHNCLDILAEAHGTRPDLTDQPLPDADHTWYTDGSSLLQEGQRKAGAAVTTETEVIWAKALPAGTSAQRAELIALTQALKMAEGKKLNVYTDSRYAFATAHIHGEIYRRRGWLTSEGKEIKNKDEILALLKALFLPKRLSIIHCPGHQKGHSAEARGNRMADQAARKAAITETPDTSTLLAGKRTADGSEFEKRTADGSEFESPKKKAKVE

SEQ ID NO: 2859 - protein, 2094 aa, synthetic construct
MPAAKRVKLDGGDKKYSIGLDIGTNSVGWAVITDEYKVPSKKFKVLGNTDRHSIKKNLIGALLFDSGETAEATRLKRTARRRYTRRKNRICYLQEIFSNEMAKVDDSFFHRLEESFLVEEDKKHERHPIFGNIVDEVAYHEKYPTIYHLRKKLVDSTDKADLRLIYLALAHMIKFRGHFLIEGDLNPDNSDVDKLFIQLVQTYNQLFEENPINASGVDAKAILSARLSKSRRLENLIAQLPGEKKNGLFGNLIALSLGLTPNFKSNFDLAEDAKLQLSKDTYDDDLDNLLAQIGDQYADLFLAAKNLSDAILLSDILRVNTEITKAPLSASMIKRYDEHHQDLTLLKALVRQQLPEKYKEIFFDQSKNGYAGYIDGGASQEEFYKFIKPILEKMDGTEELLVKLNREDLLRKQRTFDNGSIPHQIHLGELHAILRRQEDFYPFLKDNREKIEKILTFRIPYYVGPLARGNSRFAWMTRKSEETITPWNFEEVVDKGASAQSFIERMTNFDKNLPNEKVLPKHSLLYEYFTVYNELTKVKYVTEGMRKPAFLSGEQKKAIVDLLFKTNRKVTVKQLKEDYFKKIECFDSVEISGVEDRFNASLGTYHDLLKIIKDKDFLDNEENEDILEDIVLTLTLFEDREMIEERLKTYAHLFDDKVMKQLKRRRYTGWGRLSRKLINGIRDKQSGKTILDFLKSDGFANRNFMQLIHDDSLTFKEDIQKAQVSGQGDSLHEHIANLAGSPAIKKGILQTVKVVDELVKVMGRHKPENIVIEMARENQTTQKGQKNSRERMKRIEEGIKELGSQILKEHPVENTQLQNEKLYLYYLQNGRDMYVDQELDINRLSDYDVDHIVPQSFLKDDSIDNKVLTRSDKARGKSDNVPSEEVVKKMKNYWRQLLNAKLITQRKFDNLTKAERGGLSELDKAGFIKRQLVETRQITKHVAQILDSRMNTKYDENDKLIREVKVITLKSKLVSDFRKDFQFYKVREINNYHHAHDAYLNAVVGTALIKKYPKLESEFVYGDYKVYDVRKMIAKSEQEIGKATAKYFFYSNIMNFFKTEITLANGEIRKRPLIETNGETGEIVWDKGRDFATVRKVLSMPQVNIVKKTEVQTGGFSKESILPKRNSDKLIARKKDWDPKKYGGFDSPTVAYSVLVVAKVEKGKSKKLKSVKELLGITIMERSSFEKNPIDFLEAKGYKEVKKDLIIKLPKYSLFELENGRKRMLASAGELQKGNELALPSKYVNFLYLASHYEKLKGSPEDNEQKQLFVEQHKHYLDEIIEQISEFSKRVILADANLDKVLSAYNKHRDKPIREQAENIIHLFTLTNLGAPAAFKYFDTTIDRKRYTSTKEVLDATLIHQSITGLYETRIDLSQLGGDGGGSSGGSGGGGGTLNIEDEHRLHETSKEPDVSLGSTWLSDFPQAWAETGGMGLAVRQAPLIIPLKATSTPVSIKQYPMSQEARLGIKPHIQRLLDQGILVPCQSPWNTPLLPVKKPGTNDYRPVQDLREVNKRVEDIHPTVPNPYNLLSGLPPSHQWYTVLDLKDAFFCLRLHPTSQPLFAFEWRDPEMGISGQLTWTRLPQGFKNSPTLFNEALHRDLADFRIQHPDLILLQYVDDLLLAATSELDCQQGTRALLQTLGNLGYRASAKKAQICQKQVKYLGYLLKEGQRWLTEARKETVMGQPTPKTPRQLREFLGKAGFCRLFIPGFAEMAAPLYPLTKPGTLFNWGPDQQKAYQEIKQALLTAPALGLPDLTKPFELFVDEKQGYAKGVLTQKLGPWRRPVAYLSKKLDPVAAGWPPCLRMVAAIAVLTKDAGKLTMGQPLVILAPHAVEALVKQPPDRWLSNARMTHYQALLLDTDRVQFGPVVALNPATLLPLPEEGLQHNCLDILAEAHGTRPDLTDQPLPDADHTWYTDGSSLLQEGQRKAGAAVTTETEVIWAKALPAGTSAQRAELIALTQALKMAEGKKLNVYTDSRYAFATAHIHGEIYRRRGWLTSEGKEIKNKDEILALLKALFLPKRLSIIHCPGHQKGHSAEARGNRMADQAARKAAITETPDTSTLLAGKRTADGSEFEKRTADGSEFESPKKKAKVE

SEQ ID NO: 2860 - protein, 2096 aa, synthetic construct
MPAAKRVKLDGGDKKYSIGLDIGTNSVGWAVITDEYKVPSKKFKVLGNTDRHSIKKNLIGALLFDSGETAEATRLKRTARRRYTRRKNRICYLQEIFSNEMAKVDDSFFHRLEESFLVEEDKKHERHPIFGNIVDEVAYHEKYPTIYHLRKKLVDSTDKADLRLIYLALAHMIKFRGHFLIEGDLNPDNSDVDKLFIQLVQTYNQLFEENPINASGVDAKAILSARLSKSRRLENLIAQLPGEKKNGLFGNLIALSLGLTPNFKSNFDLAEDAKLQLSKDTYDDDLDNLLAQIGDQYADLFLAAKNLSDAILLSDILRVNTEITKAPLSASMIKRYDEHHQDLTLLKALVRQQLPEKYKEIFFDQSKNGYAGYIDGGASQEEFYKFIKPILEKMDGTEELLVKLNREDLLRKQRTFDNGSIPHQIHLGELHAILRRQEDFYPFLKDNREKIEKILTFRIPYYVGPLARGNSRFAWMTRKSEETITPWNFEEVVDKGASAQSFIERMTNFDKNLPNEKVLPKHSLLYEYFTVYNELTKVKYVTEGMRKPAFLSGEQKKAIVDLLFKTNRKVTVKQLKEDYFKKIECFDSVEISGVEDRFNASLGTYHDLLKIIKDKDFLDNEENEDILEDIVLTLTLFEDREMIEERLKTYAHLFDDKVMKQLKRRRYTGWGRLSRKLINGIRDKQSGKTILDFLKSDGFANRNFMQLIHDDSLTFKEDIQKAQVSGQGDSLHEHIANLAGSPAIKKGILQTVKVVDELVKVMGRHKPENIVIEMARENQTTQKGQKNSRERMKRIEEGIKELGSQILKEHPVENTQLQNEKLYLYYLQNGRDMYVDQELDINRLSDYDVDHIVPQSFLKDDSIDNKVLTRSDKARGKSDNVPSEEVVKKMKNYWRQLLNAKLITQRKFDNLTKAERGGLSELDKAGFIKRQLVETRQITKHVAQILDSRMNTKYDENDKLIREVKVITLKSKLVSDFRKDFQFYKVREINNYHHAHDAYLNAVVGTALIKKYPKLESEFVYGDYKVYDVRKMIAKSEQEIGKATAKYFFYSNIMNFFKTEITLANGEIRKRPLIETNGETGEIVWDKGRDFATVRKVLSMPQVNIVKKTEVQTGGFSKESILPKRNSDKLIARKKDWDPKKYGGFDSPTVAYSVLVVAKVEKGKSKKLKSVKELLGITIMERSSFEKNPIDFLEAKGYKEVKKDLIIKLPKYSLFELENGRKRMLASAGELQKGNELALPSKYVNFLYLASHYEKLKGSPEDNEQKQLFVEQHKHYLDEIIEQISEFSKRVILADANLDKVLSAYNKHRDKPIREQAENIIHLFTLTNLGAPAAFKYFDTTIDRKRYTSTKEVLDATLIHQSITGLYETRIDLSQLGGDGGGSSGGSEAAAKGGTLNIEDEHRLHETSKEPDVSLGSTWLSDFPQAWAETGGMGLAVRQAPLIIPLKATSTPVSIKQYPMSQEARLGIKPHIQRLLDQGILVPCQSPWNTPLLPVKKPGTNDYRPVQDLREVNKRVEDIHPTVPNPYNLLSGLPPSHQWYTVLDLKDAFFCLRLHPTSQPLFAFEWRDPEMGISGQLTWTRLPQGFKNSPTLFNEALHRDLADFRIQHPDLILLQYVDDLLLAATSELDCQQGTRALLQTLGNLGYRASAKKAQICQKQVKYLGYLLKEGQRWLTEARKETVMGQPTPKTPRQLREFLGKAGFCRLFIPGFAEMAAPLYPLTKPGTLFNWGPDQQKAYQEIKQALLTAPALGLPDLTKPFELFVDEKQGYAKGVLTQKLGPWRRPVAYLSKKLDPVAAGWPPCLRMVAAIAVLTKDAGKLTMGQPLVILAPHAVEALVKQPPDRWLSNARMTHYQALLLDTDRVQFGPVVALNPATLLPLPEEGLQHNCLDILAEAHGTRPDLTDQPLPDADHTWYTDGSSLLQEGQRKAGAAVTTETEVIWAKALPAGTSAQRAELIALTQALKMAEGKKLNVYTDSRYAFATAHIHGEIYRRRGWLTSEGKEIKNKDEILALLKALFLPKRLSIIHCPGHQKGHSAEARGNRMADQAARKAAITETPDTSTLLAGKRTADGSEFEKRTADGSEFESPKKKAKVE

SEQ ID NO: 2861 - protein, 2091 aa, synthetic construct
MPAAKRVKLDGGDKKYSIGLDIGTNSVGWAVITDEYKVPSKKFKVLGNTDRHSIKKNLIGALLFDSGETAEATRLKRTARRRYTRRKNRICYLQEIFSNEMAKVDDSFFHRLEESFLVEEDKKHERHPIFGNIVDEVAYHEKYPTIYHLRKKLVDSTDKADLRLIYLALAHMIKFRGHFLIEGDLNPDNSDVDKLFIQLVQTYNQLFEENPINASGVDAKAILSARLSKSRRLENLIAQLPGEKKNGLFGNLIALSLGLTPNFKSNFDLAEDAKLQLSKDTYDDDLDNLLAQIGDQYADLFLAAKNLSDAILLSDILRVNTEITKAPLSASMIKRYDEHHQDLTLLKALVRQQLPEKYKEIFFDQSKNGYAGYIDGGASQEEFYKFIKPILEKMDGTEELLVKLNREDLLRKQRTFDNGSIPHQIHLGELHAILRRQEDFYPFLKDNREKIEKILTFRIPYYVGPLARGNSRFAWMTRKSEETITPWNFEEVVDKGASAQSFIERMTNFDKNLPNEKVLPKHSLLYEYFTVYNELTKVKYVTEGMRKPAFLSGEQKKAIVDLLFKTNRKVTVKQLKEDYFKKIECFDSVEISGVEDRFNASLGTYHDLLKIIKDKDFLDNEENEDILEDIVLTLTLFEDREMIEERLKTYAHLFDDKVMKQLKRRRYTGWGRLSRKLINGIRDKQSGKTILDFLKSDGFANRNFMQLIHDDSLTFKEDIQKAQVSGQGDSLHEHIANLAGSPAIKKGILQTVKVVDELVKVMGRHKPENIVIEMARENQTTQKGQKNSRERMKRIEEGIKELGSQILKEHPVENTQLQNEKLYLYYLQNGRDMYVDQELDINRLSDYDVDHIVPQSFLKDDSIDNKVLTRSDKARGKSDNVPSEEVVKKMKNYWRQLLNAKLITQRKFDNLTKAERGGLSELDKAGFIKRQLVETRQITKHVAQILDSRMNTKYDENDKLIREVKVITLKSKLVSDFRKDFQFYKVREINNYHHAHDAYLNAVVGTALIKKYPKLESEFVYGDYKVYDVRKMIAKSEQEIGKATAKYFFYSNIMNFFKTEITLANGEIRKRPLIETNGETGEIVWDKGRDFATVRKVLSMPQVNIVKKTEVQTGGFSKESILPKRNSDKLIARKKDWDPKKYGGFDSPTVAYSVLVVAKVEKGKSKKLKSVKELLGITIMERSSFEKNPIDFLEAKGYKEVKKDLIIKLPKYSLFELENGRKRMLASAGELQKGNELALPSKYVNFLYLASHYEKLKGSPEDNEQKQLFVEQHKHYLDEIIEQISEFSKRVILADANLDKVLSAYNKHRDKPIREQAENIIHLFTLTNLGAPAAFKYFDTTIDRKRYTSTKEVLDATLIHQSITGLYETRIDLSQLGGDGGGGSGGGGGTLNIEDEHRLHETSKEPDVSLGSTWLSDFPQAWAETGGMGLAVRQAPLIIPLKATSTPVSIKQYPMSQEARLGIKPHIQRLLDQGILVPCQSPWNTPLLPVKKPGTNDYRPVQDLREVNKRVEDIHPTVPNPYNLLSGLPPSHQWYTVLDLKDAFFCLRLHPTSQPLFAFEWRDPEMGISGQLTWTRLPQGFKNSPTLFNEALHRDLADFRIQHPDLILLQYVDDLLLAATSELDCQQGTRALLQTLGNLGYRASAKKAQICQKQVKYLGYLLKEGQRWLTEARKETVMGQPTPKTPRQLREFLGKAGFCRLFIPGFAEMAAPLYPLTKPGTLFNWGPDQQKAYQEIKQALLTAPALGLPDLTKPFELFVDEKQGYAKGVLTQKLGPWRRPVAYLSKKLDPVAAGWPPCLRMVAAIAVLTKDAGKLTMGQPLVILAPHAVEALVKQPPDRWLSNARMTHYQALLLDTDRVQFGPVVALNPATLLPLPEEGLQHNCLDILAEAHGTRPDLTDQPLPDADHTWYTDGSSLLQEGQRKAGAAVTTETEVIWAKALPAGTSAQRAELIALTQALKMAEGKKLNVYTDSRYAFATAHIHGEIYRRRGWLTSEGKEIKNKDEILALLKALFLPKRLSIIHCPGHQKGHSAEARGNRMADQAARKAAITETPDTSTLLAGKRTADGSEFEKRTADGSEFESPKKKAKVE

SEQ ID NO: 2862 - protein, 2116 aa, synthetic construct; identical to SEQ ID NO: 2637

SEQ ID NO: 2863 - protein, 2116 aa, synthetic construct
MPAAKRVKLDGGDKKYSIGLDIGTNSVGWAVITDEYKVPSKKFKVLGNTDRHSIKKNLIGALLFDSGETAEATRLKRTARRRYTRRKNRICYLQEIFSNEMAKVDDSFFHRLEESFLVEEDKKHERHPIFGNIVDEVAYHEKYPTIYHLRKKLVDSTDKADLRLIYLALAHMIKFRGHFLIEGDLNPDNSDVDKLFIQLVQTYNQLFEENPINASGVDAKAILSARLSKSRRLENLIAQLPGEKKNGLFGNLIALSLGLTPNFKSNFDLAEDAKLQLSKDTYDDDLDNLLAQIGDQYADLFLAAKNLSDAILLSDILRVNTEITKAPLSASMIKRYDEHHQDLTLLKALVRQQLPEKYKEIFFDQSKNGYAGYIDGGASQEEFYKFIKPILEKMDGTEELLVKLNREDLLRKQRTFDNGSIPHQIHLGELHAILRRQEDFYPFLKDNREKIEKILTFRIPYYVGPLARGNSRFAWMTRKSEETITPWNFEEVVDKGASAQSFIERMTNFDKNLPNEKVLPKHSLLYEYFTVYNELTKVKYVTEGMRKPAFLSGEQKKAIVDLLFKTNRKVTVKQLKEDYFKKIECFDSVEISGVEDRFNASLGTYHDLLKIIKDKDFLDNEENEDILEDIVLTLTLFEDREMIEERLKTYAHLFDDKVMKQLKRRRYTGWGRLSRKLINGIRDKQSGKTILDFLKSDGFANRNFMQLIHDDSLTFKEDIQKAQVSGQGDSLHEHIANLAGSPAIKKGILQTVKVVDELVKVMGRHKPENIVIEMARENQTTQKGQKNSRERMKRIEEGIKELGSQILKEHPVENTQLQNEKLYLYYLQNGRDMYVDQELDINRLSDYDVDHIVPQSFLKDDSIDNKVLTRSDKARGKSDNVPSEEVVKKMKNYWRQLLNAKLITQRKFDNLTKAERGGLSELDKAGFIKRQLVETRQITKHVAQILDSRMNTKYDENDKLIREVKVITLKSKLVSDFRKDFQFYKVREINNYHHAHDAYLNAVVGTALIKKYPKLESEFVYGDYKVYDVRKMIAKSEQEIGKATAKYFFYSNIMNFFKTEITLANGEIRKRPLIETNGETGEIVWDKGRDFATVRKVLSMPQVNIVKKTEVQTGGFSKESILPKRNSDKLIARKKDWDPKKYGGFDSPTVAYSVLVVAKVEKGKSKKLKSVKELLGITIMERSSFEKNPIDFLEAKGYKEVKKDLIIKLPKYSLFELENGRKRMLASAGELQKGNELALPSKYVNFLYLASHYEKLKGSPEDNEQKQLFVEQHKHYLDEIIEQISEFSKRVILADANLDKVLSAYNKHRDKPIREQAENIIHLFTLTNLGAPAAFKYFDTTIDRKRYTSTKEVLDATLIHQSITGLYETRIDLSQLGGDGGEAAAKGGGGGSGGTLNIEDEYRLHETSKEPDVSLGSTWLSDFPQAWAETGGMGLAVRQAPLIIPLKATSTPVSIKQYPMSQEARLGIKPHIQRLLDQGILVPCQSPWNTPLLPVKKPGTNDYRPVQDLREVNKRVEDIHPTVPNPYNLLSGLPPSHQWYTVLDLKDAFFCLRLHPTSQPLFAFEWRDPEMGISGQLTWTRLPQGFKNSPTLFNEALHRDLADFRIQHPDLILLQYVDDLLLAATSELDCQQGTRALLQTLGNLGYRASAKKAQICQKQVKYLGYLLKEGQRWLTEARKETVMGQPTPKTPRQLREFLGKAGFCRLFIPGFAEMAAPLYPLTKPGTLFNWGPDQQKAYQEIKQALLTAPALGLPDLTKPFELFVDEKQGYAKGVLTQKLGPWRRPVAYLSKKLDPVAAGWPPCLRMVAAIAVLTKDAGKLTMGQPLVILAPHAVEALVKQPPDRWLSNARMTHYQALLLDTDRVQFGPVVALNPATLLPLPEEGLQHNCLDILAEAHGTRPDLTDQPLPDADHTWYTDGSSLLQEGQRKAGAAVTTETEVIWAKALPAGTSAQRAELIALTQALKMAEGKKLNVYTDSRYAFATAHIHGEIYRRRGWLTSEGKEIKNKDEILALLKALFLPKRLSIIHCPGHQKGHSAEARGNRMADQAARKAAITETPDTSTLLIENSSPSGGSKRTADGSEFEAGKRTADGSEFEKRTADGSEFESPKKKAKVE

SEQ ID NO: 2864 - protein, 2108 aa, synthetic construct; identical to SEQ ID NO: 2655

SEQ ID NO: 2865 - protein, 2108 aa, synthetic construct; identical to SEQ ID NO: 2624

SEQ ID NO: 2866 - protein, 2116 aa, synthetic construct; identical to SEQ ID NO: 2692

SEQ ID NO: 2867 - protein, 2117 aa, synthetic construct; identical to SEQ ID NO: 2665

SEQ ID NO: 2868 - protein, 2118 aa, synthetic construct
MPAAKRVKLDGGDKKYSIGLDIGTNSVGWAVITDEYKVPSKKFKVLGNTDRHSIKKNLIGALLFDSGETAEATRLKRTARRRYTRRKNRICYLQEIFSNEMAKVDDSFFHRLEESFLVEEDKKHERHPIFGNIVDEVAYHEKYPTIYHLRKKLVDSTDKADLRLIYLALAHMIKFRGHFLIEGDLNPDNSDVDKLFIQLVQTYNQLFEENPINASGVDAKAILSARLSKSRRLENLIAQLPGEKKNGLFGNLIALSLGLTPNFKSNFDLAEDAKLQLSKDTYDDDLDNLLAQIGDQYADLFLAAKNLSDAILLSDILRVNTEITKAPLSASMIKRYDEHHQDLTLLKALVRQQLPEKYKEIFFDQSKNGYAGYIDGGASQEEFYKFIKPILEKMDGTEELLVKLNREDLLRKQRTFDNGSIPHQIHLGELHAILRRQEDFYPFLKDNREKIEKILTFRIPYYVGPLARGNSRFAWMTRKSEETITPWNFEEVVDKGASAQSFIERMTNFDKNLPNEKVLPKHSLLYEYFTVYNELTKVKYVTEGMRKPAFLSGEQKKAIVDLLFKTNRKVTVKQLKEDYFKKIECFDSVEISGVEDRFNASLGTYHDLLKIIKDKDFLDNEENEDILEDIVLTLTLFEDREMIEERLKTYAHLFDDKVMKQLKRRRYTGWGRLSRKLINGIRDKQSGKTILDFLKSDGFANRNFMQLIHDDSLTFKEDIQKAQVSGQGDSLHEHIANLAGSPAIKKGILQTVKVVDELVKVMGRHKPENIVIEMARENQTTQKGQKNSRERMKRIEEGIKELGSQILKEHPVENTQLQNEKLYLYYLQNGRDMYVDQELDINRLSDYDVDHIVPQSFLKDDSIDNKVLTRSDKARGKSDNVPSEEVVKKMKNYWRQLLNAKLITQRKFDNLTKAERGGLSELDKAGFIKRQLVETRQITKHVAQILDSRMNTKYDENDKLIREVKVITLKSKLVSDFRKDFQFYKVREINNYHHAHDAYLNAVVGTALIKKYPKLESEFVYGDYKVYDVRKMIAKSEQEIGKATAKYFFYSNIMNFFKTEITLANGEIRKRPLIETNGETGEIVWDKGRDFATVRKVLSMPQVNIVKKTEVQTGGFSKESILPKRNSDKLIARKKDWDPKKYGGFDSPTVAYSVLVVAKVEKGKSKKLKSVKELLGITIMERSSFEKNPIDFLEAKGYKEVKKDLIIKLPKYSLFELENGRKRMLASAGELQKGNELALPSKYVNFLYLASHYEKLKGSPEDNEQKQLFVEQHKHYLDEIIEQISEFSKRVILADANLDKVLSAYNKHRDKPIREQAENIIHLFTLTNLGAPAAFKYFDTTIDRKRYTSTKEVLDATLIHQSITGLYETRIDLSQLGGDGGPAPAPAPAPAPAPGGTLNIEDEYRLHETSKEPDVSLGSTWLSDFPQAWAETGGMGLAVRQAPLIIPLKATSTPVSIKQYPMSQEARLGIKPHIQRLLDQGILVPCQSPWNTPLLPVKKPGTNDYRPVQDLREVNKRVEDIHPTVPNPYNLLSGLPPSHQWYTVLDLKDAFFCLRLHPTSQPLFAFEWRDPEMGISGQLTWTRLPQGFKNSPTLFNEALHRDLADFRIQHPDLILLQYVDDLLLAATSELDCQQGTRALLQTLGNLGYRASAKKAQICQKQVKYLGYLLKEGQRWLTEARKETVMGQPTPKTPRQLREFLGKAGFCRLFIPGFAEMAAPLYPLTKPGTLFNWGPDQQKAYQEIKQALLTAPALGLPDLTKPFELFVDEKQGYAKGVLTQKLGPWRRPVAYLSKKLDPVAAGWPPCLRMVAAIAVLTKDAGKLTMGQPLVILAPHAVEALVKQPPDRWLSNARMTHYQALLLDTDRVQFGPVVALNPATLLPLPEEGLQHNCLDILAEAHGTRPDLTDQPLPDADHTWYTDGSSLLQEGQRKAGAAVTTETEVIWAKALPAGTSAQRAELIALTQALKMAEGKKLNVYTDSRYAFATAHIHGEIYRRRGWLTSEGKEIKNKDEILALLKALFLPKRLSIIHCPGHQKGHSAEARGNRMADQAARKAAITETPDTSTLLIENSSPSGGSKRTADGSEFEAGKRTADGSEFEKRTADGSEFESPKKKAKVE

SEQ ID NO: 2869 - protein, 2114 aa, synthetic construct
MPAAKRVKLDGGDKKYSIGLDIGTNSVGWAVITDEYKVPSKKFKVLGNTDRHSIKKNLIGALLFDSGETAEATRLKRTARRRYTRRKNRICYLQEIFSNEMAKVDDSFFHRLEESFLVEEDKKHERHPIFGNIVDEVAYHEKYPTIYHLRKKLVDSTDKADLRLIYLALAHMIKFRGHFLIEGDLNPDNSDVDKLFIQLVQTYNQLFEENPINASGVDAKAILSARLSKSRRLENLIAQLPGEKKNGLFGNLIALSLGLTPNFKSNFDLAEDAKLQLSKDTYDDDLDNLLAQIGDQYADLFLAAKNLSDAILLSDILRVNTEITKAPLSASMIKRYDEHHQDLTLLKALVRQQLPEKYKEIFFDQSKNGYAGYIDGGASQEEFYKFIKPILEKMDGTEELLVKLNREDLLRKQRTFDNGSIPHQIHLGELHAILRRQEDFYPFLKDNREKIEKILTFRIPYYVGPLARGNSRFAWMTRKSEETITPWNFEEVVDKGASAQSFIERMTNFDKNLPNEKVLPKHSLLYEYFTVYNELTKVKYVTEGMRKPAFLSGEQKKAIVDLLFKTNRKVTVKQLKEDYFKKIECFDSVEISGVEDRFNASLGTYHDLLKIIKDKDFLDNEENEDILEDIVLTLTLFEDREMIEERLKTYAHLFDDKVMKQLKRRRYTGWGRLSRKLINGIRDKQSGKTILDFLKSDGFANRNFMQLIHDDSLTFKEDIQKAQVSGQGDSLHEHIANLAGSPAIKKGILQTVKVVDELVKVMGRHKPENIVIEMARENQTTQKGQKNSRERMKRIEEGIKELGSQILKEHPVENTQLQNEKLYLYYLQNGRDMYVDQELDINRLSDYDVDHIVPQSFLKDDSIDNKVLTRSDKARGKSDNVPSEEVVKKMKNYWRQLLNAKLITQRKFDNLTKAERGGLSELDKAGFIKRQLVETRQITKHVAQILDSRMNTKYDENDKLIREVKVITLKSKLVSDFRKDFQFYKVREINNYHHAHDAYLNAVVGTALIKKYPKLESEFVYGDYKVYDVRKMIAKSEQEIGKATAKYFFYSNIMNFFKTEITLANGEIRKRPLIETNGETGEIVWDKGRDFATVRKVLSMPQVNIVKKTEVQTGGFSKESILPKRNSDKLIARKKDWDPKKYGGFDSPTVAYSVLVVAKVEKGKSKKLKSVKELLGITIMERSSFEKNPIDFLEAKGYKEVKKDLIIKLPKYSLFELENGRKRMLASAGELQKGNELALPSKYVNFLYLASHYEKLKGSPEDNEQKQLFVEQHKHYLDEIIEQISEFSKRVILADANLDKVLSAYNKHRDKPIREQAENIIHLFTLTNLGAPAAFKYFDTTIDRKRYTSTKEVLDATLIHQSITGLYETRIDLSQLGGDGGPAPGGGGSSGGTLNIEDEYRLHETSKEPDVSLGSTWLSDFPQAWAETGGMGLAVRQAPLIIPLKATSTPVSIKQYPMSQEARLGIKPHIQRLLDQGILVPCQSPWNTPLLPVKKPGTNDYRPVQDLREVNKRVEDIHPTVPNPYNLLSGLPPSHQWYTVLDLKDAFFCLRLHPTSQPLFAFEWRDPEMGISGQLTWTRLPQGFKNSPTLFNEALHRDLADFRIQHPDLILLQYVDDLLLAATSELDCQQGTRALLQTLGNLGYRASAKKAQICQKQVKYLGYLLKEGQRWLTEARKETVMGQPTPKTPRQLREFLGKAGFCRLFIPGFAEMAAPLYPLTKPGTLFNWGPDQQKAYQEIKQALLTAPALGLPDLTKPFELFVDEKQGYAKGVLTQKLGPWRRPVAYLSKKLDPVAAGWPPCLRMVAAIAVLTKDAGKLTMGQPLVILAPHAVEALVKQPPDRWLSNARMTHYQALLLDTDRVQFGPVVALNPATLLPLPEEGLQHNCLDILAEAHGTRPDLTDQPLPDADHTWYTDGSSLLQEGQRKAGAAVTTETEVIWAKALPAGTSAQRAELIALTQALKMAEGKKLNVYTDSRYAFATAHIHGEIYRRRGWLTSEGKEIKNKDEILALLKALFLPKRLSIIHCPGHQKGHSAEARGNRMADQAARKAAITETPDTSTLLIENSSPSGGSKRTADGSEFEAGKRTADGSEFEKRTADGSEFESPKKKAKVE

SEQ ID NO: 2870 - protein, 2116 aa, synthetic construct; identical to SEQ ID NO: 2677

SEQ ID NO: 2871 - protein, 2111 aa, synthetic construct; identical to SEQ ID NO: 2676

SEQ ID NO: 2872 - protein, 2116 aa, synthetic construct
MPAAKRVKLDGGDKKYSIGLDIGTNSVGWAVITDEYKVPSKKFKVLGNTDRHSIKKNLIGALLFDSGETAEATRLKRTARRRYTRRKNRICYLQEIFSNEMAKVDDSFFHRLEESFLVEEDKKHERHPIFGNIVDEVAYHEKYPTIYHLRKKLVDSTDKADLRLIYLALAHMIKFRGHFLIEGDLNPDNSDVDKLFIQLVQTYNQLFEENPINASGVDAKAILSARLSKSRRLENLIAQLPGEKKNGLFGNLIALSLGLTPNFKSNFDLAEDAKLQLSKDTYDDDLDNLLAQIGDQYADLFLAAKNLSDAILLSDILRVNTEITKAPLSASMIKRYDEHHQDLTLLKALVRQQLPEKYKEIFFDQSKNGYAGYIDGGASQEEFYKFIKPILEKMDGTEELLVKLNREDLLRKQRTFDNGSIPHQIHLGELHAILRRQEDFYPFLKDNREKIEKILTFRIPYYVGPLARGNSRFAWMTRKSEETITPWNFEEVVDKGASAQSFIERMTNFDKNLPNEKVLPKHSLLYEYFTVYNELTKVKYVTEGMRKPAFLSGEQKKAIVDLLFKTNRKVTVKQLKEDYFKKIECFDSVEISGVEDRFNASLGTYHDLLKIIKDKDFLDNEENEDILEDIVLTLTLFEDREMIEERLKTYAHLFDDKVMKQLKRRRYTGWGRLSRKLINGIRDKQSGKTILDFLKSDGFANRNFMQLIHDDSLTFKEDIQKAQVSGQGDSLHEHIANLAGSPAIKKGILQTVKVVDELVKVMGRHKPENIVIEMARENQTTQKGQKNSRERMKRIEEGIKELGSQILKEHPVENTQLQNEKLYLYYLQNGRDMYVDQELDINRLSDYDVDHIVPQSFLKDDSIDNKVLTRSDKARGKSDNVPSEEVVKKMKNYWRQLLNAKLITQRKFDNLTKAERGGLSELDKAGFIKRQLVETRQITKHVAQILDSRMNTKYDENDKLIREVKVITLKSKLVSDFRKDFQFYKVREINNYHHAHDAYLNAVVGTALIKKYPKLESEFVYGDYKVYDVRKMIAKSEQEIGKATAKYFFYSNIMNFFKTEITLANGEIRKRPLIETNGETGEIVWDKGRDFATVRKVLSMPQVNIVKKTEVQTGGFSKESILPKRNSDKLIARKKDWDPKKYGGFDSPTVAYSVLVVAKVEKGKSKKLKSVKELLGITIMERSSFEKNPIDFLEAKGYKEVKKDLIIKLPKYSLFELENGRKRMLASAGELQKGNELALPSKYVNFLYLASHYEKLKGSPEDNEQKQLFVEQHKHYLDEIIEQISEFSKRVILADANLDKVLSAYNKHRDKPIREQAENIIHLFTLTNLGAPAAFKYFDTTIDRKRYTSTKEVLDATLIHQSITGLYETRIDLSQLGGDGGPAPGGGEAAAKGGTLNIEDEYRLHETSKEPDVSLGSTWLSDFPQAWAETGGMGLAVRQAPLIIPLKATSTPVSIKQYPMSQEARLGIKPHIQRLLDQGILVPCQSPWNTPLLPVKKPGTNDYRPVQDLREVNKRVEDIHPTVPNPYNLLSGLPPSHQWYTVLDLKDAFFCLRLHPTSQPLFAFEWRDPEMGISGQLTWTRLPQGFKNSPTLFNEALHRDLADFRIQHPDLILLQYVDDLLLAATSELDCQQGTRALLQTLGNLGYRASAKKAQICQKQVKYLGYLLKEGQRWLTEARKETVMGQPTPKTPRQLREFLGKAGFCRLFIPGFAEMAAPLYPLTKPGTLFNWGPDQQKAYQEIKQALLTAPALGLPDLTKPFELFVDEKQGYAKGVLTQKLGPWRRPVAYLSKKLDPVAAGWPPCLRMVAAIAVLTKDAGKLTMGQPLVILAPHAVEALVKQPPDRWLSNARMTHYQALLLDTDRVQFGPVVALNPATLLPLPEEGLQHNCLDILAEAHGTRPDLTDQPLPDADHTWYTDGSSLLQEGQRKAGAAVTTETEVIWAKALPAGTSAQRAELIALTQALKMAEGKKLNVYTDSRYAFATAHIHGEIYRRRGWLTSEGKEIKNKDEILALLKALFLPKRLSIIHCPGHQKGHSAEARGNRMADQAARKAAITETPDTSTLLIENSSPSGGSKRTADGSEFEAGKRTADGSEFEKRTADGSEFESPKKKAKVE

SEQ ID NO: 2873 - protein, 2116 aa, synthetic construct; identical to SEQ ID NO: 2651

SEQ ID NO: 2874 - protein, 2116 aa, synthetic construct; identical to SEQ ID NO: 2638

SEQ ID NO: 2875 - protein, 2114 aa, synthetic construct; identical to SEQ ID NO: 2685

SEQ ID NO: 2876 - protein, 2114 aa, synthetic construct; identical to SEQ ID NO: 2698

SEQ ID NO: 2877 - protein, 2120 aa, synthetic construct; identical to SEQ ID NO: 2627

SEQ ID NO: 2878 - protein, 2114 aa, synthetic construct; identical to SEQ ID NO: 2649

SEQ ID NO: 2879 - protein, 2116 aa, synthetic construct
MPAAKRVKLDGGDKKYSIGLDIGTNSVGWAVITDEYKVPSKKFKVLGNTDRHSIKKNLIGALLFDSGETAEATRLKRTARRRYTRRKNRICYLQEIFSNEMAKVDDSFFHRLEESFLVEEDKKHERHPIFGNIVDEVAYHEKYPTIYHLRKKLVDSTDKADLRLIYLALAHMIKFRGHFLIEGDLNPDNSDVDKLFIQLVQTYNQLFEENPINASGVDAKAILSARLSKSRRLENLIAQLPGEKKNGLFGNLIALSLGLTPNFKSNFDLAEDAKLQLSKDTYDDDLDNLLAQIGDQYADLFLAAKNLSDAILLSDILRVNTEITKAPLSASMIKRYDEHHQDLTLLKALVRQQLPEKYKEIFFDQSKNGYAGYIDGGASQEEFYKFIKPILEKMDGTEELLVKLNREDLLRKQRTFDNGSIPHQIHLGELHAILRRQEDFYPFLKDNREKIEKILTFRIPYYVGPLARGNSRFAWMTRKSEETITPWNFEEVVDKGASAQSFIERMTNFDKNLPNEKVLPKHSLLYEYFTVYNELTKVKYVTEGMRKPAFLSGEQKKAIVDLLFKTNRKVTVKQLKEDYFKKIECFDSVEISGVEDRFNASLGTYHDLLKIIKDKDFLDNEENEDILEDIVLTLTLFEDREMIEERLKTYAHLFDDKVMKQLKRRRYTGWGRLSRKLINGIRDKQSGKTILDFLKSDGFANRNFMQLIHDDSLTFKEDIQKAQVSGQGDSLHEHIANLAGSPAIKKGILQTVKVVDELVKVMGRHKPENIVIEMARENQTTQKGQKNSRERMKRIEEGIKELGSQILKEHPVENTQLQNEKLYLYYLQNGRDMYVDQELDINRLSDYDVDHIVPQSFLKDDSIDNKVLTRSDKARGKSDNVPSEEVVKKMKNYWRQLLNAKLITQRKFDNLTKAERGGLSELDKAGFIKRQLVETRQITKHVAQILDSRMNTKYDENDKLIREVKVITLKSKLVSDFRKDFQFYKVREINNYHHAHDAYLNAVVGTALIKKYPKLESEFVYGDYKVYDVRKMIAKSEQEIGKATAKYFFYSNIMNFFKTEITLANGEIRKRPLIETNGETGEIVWDKGRDFATVRKVLSMPQVNIVKKTEVQTGGFSKESILPKRNSDKLIARKKDWDPKKYGGFDSPTVAYSVLVVAKVEKGKSKKLKSVKELLGITIMERSSFEKNPIDFLEAKGYKEVKKDLIIKLPKYSLFELENGRKRMLASAGELQKGNELALPSKYVNFLYLASHYEKLKGSPEDNEQKQLFVEQHKHYLDEIIEQISEFSKRVILADANLDKVLSAYNKHRDKPIREQAENIIHLFTLTNLGAPAAFKYFDTTIDRKRYTSTKEVLDATLIHQSITGLYETRIDLSQLGGDGGGGGEAAAKPAPGGTLNIEDEYRLHETSKEPDVSLGSTWLSDFPQAWAETGGMGLAVRQAPLIIPLKATSTPVSIKQYPMSQEARLGIKPHIQRLLDQGILVPCQSPWNTPLLPVKKPGTNDYRPVQDLREVNKRVEDIHPTVPNPYNLLSGLPPSHQWYTVLDLKDAFFCLRLHPTSQPLFAFEWRDPEMGISGQLTWTRLPQGFKNSPTLFNEALHRDLADFRIQHPDLILLQYVDDLLLAATSELDCQQGTRALLQTLGNLGYRASAKKAQICQKQVKYLGYLLKEGQRWLTEARKETVMGQPTPKTPRQLREFLGKAGFCRLFIPGFAEMAAPLYPLTKPGTLFNWGPDQQKAYQEIKQALLTAPALGLPDLTKPFELFVDEKQGYAKGVLTQKLGPWRRPVAYLSKKLDPVAAGWPPCLRMVAAIAVLTKDAGKLTMGQPLVILAPHAVEALVKQPPDRWLSNARMTHYQALLLDTDRVQFGPVVALNPATLLPLPEEGLQHNCLDILAEAHGTRPDLTDQPLPDADHTWYTDGSSLLQEGQRKAGAAVTTETEVIWAKALPAGTSAQRAELIALTQALKMAEGKKLNVYTDSRYAFATAHIHGEIYRRRGWLTSEGKEIKNKDEILALLKALFLPKRLSIIHCPGHQKGHSAEARGNRMADQAARKAAITETPDTSTLLIENSSPSGGSKRTADGSEFEAGKRTADGSEFEKRTADGSEFESPKKKAKVE

SEQ ID NO: 2880 - protein, 2130 aa, synthetic construct; identical to SEQ ID NO: 2678

SEQ ID NO: 2881 - protein, 2110 aa, synthetic construct; identical to SEQ ID NO: 2620

SEQ ID NO: 2882 - protein, 2117 aa, synthetic construct; identical to SEQ ID NO: 2687

SEQ ID NO: 2883 - protein, 2113 aa, synthetic construct
MPAAKRVKLDGGDKKYSIGLDIGTNSVGWAVITDEYKVPSKKFKVLGNTDRHSIKKNLIGALLFDSGETAEATRLKRTARRRYTRRKNRICYLQEIFSNEMAKVDDSFFHRLEESFLVEEDKKHERHPIFGNIVDEVAYHEKYPTIYHLRKKLVDSTDKADLRLIYLALAHMIKFRGHFLIEGDLNPDNSDVDKLFIQLVQTYNQLFEENPINASGVDAKAILSARLSKSRRLENLIAQLPGEKKNGLFGNLIALSLGLTPNFKSNFDLAEDAKLQLSKDTYDDDLDNLLAQIGDQYADLFLAAKNLSDAILLSDILRVNTEITKAPLSASMIKRYDEHHQDLTLLKALVRQQLPEKYKEIFFDQSKNGYAGYIDGGASQEEFYKFIKPILEKMDGTEELLVKLNREDLLRKQRTFDNGSIPHQIHLGELHAILRRQEDFYPFLKDNREKIEKILTFRIPYYVGPLARGNSRFAWMTRKSEETITPWNFEEVVDKGASAQSFIERMTNFDKNLPNEKVLPKHSLLYEYFTVYNELTKVKYVTEGMRKPAFLSGEQKKAIVDLLFKTNRKVTVKQLKEDYFKKIECFDSVEISGVEDRFNASLGTYHDLLKIIKDKDFLDNEENEDILEDIVLTLTLFEDREMIEERLKTYAHLFDDKVMKQLKRRRYTGWGRLSRKLINGIRDKQSGKTILDFLKSDGFANRNFMQLIHDDSLTFKEDIQKAQVSGQGDSLHEHIANLAGSPAIKKGILQTVKVVDELVKVMGRHKPENIVIEMARENQTTQKGQKNSRERMKRIEEGIKELGSQILKEHPVENTQLQNEKLYLYYLQNGRDMYVDQELDINRLSDYDVDHIVPQSFLKDDSIDNKVLTRSDKARGKSDNVPSEEVVKKMKNYWRQLLNAKLITQRKFDNLTKAERGGLSELDKAGFIKRQLVETRQITKHVAQILDSRMNTKYDENDKLIREVKVITLKSKLVSDFRKDFQFYKVREINNYHHAHDAYLNAVVGTALIKKYPKLESEFVYGDYKVYDVRKMIAKSEQEIGKATAKYFFYSNIMNFFKTEITLANGEIRKRPLIETNGETGEIVWDKGRDFATVRKVLSMPQVNIVKKTEVQTGGFSKESILPKRNSDKLIARKKDWDPKKYGGFDSPTVAYSVLVVAKVEKGKSKKLKSVKELLGITIMERSSFEKNPIDFLEAKGYKEVKKDLIIKLPKYSLFELENGRKRMLASAGELQKGNELALPSKYVNFLYLASHYEKLKGSPEDNEQKQLFVEQHKHYLDEIIEQISEFSKRVILADANLDKVLSAYNKHRDKPIREQAENIIHLFTLTNLGAPAAFKYFDTTIDRKRYTSTKEVLDATLIHQSITGLYETRIDLSQLGGDGGPAPEAAAKGGTLNIEDEYRLHETSKEPDVSLGSTWLSDFPQAWAETGGMGLAVRQAPLIIPLKATSTPVSIKQYPMSQEARLGIKPHIQRLLDQGILVPCQSPWNTPLLPVKKPGTNDYRPVQDLREVNKRVEDIHPTVPNPYNLLSGLPPSHQWYTVLDLKDAFFCLRLHPTSQPLFAFEWRDPEMGISGQLTWTRLPQGFKNSPTLFNEALHRDLADFRIQHPDLILLQYVDDLLLAATSELDCQQGTRALLQTLGNLGYRASAKKAQICQKQVKYLGYLLKEGQRWLTEARKETVMGQPTPKTPRQLREFLGKAGFCRLFIPGFAEMAAPLYPLTKPGTLFNWGPDQQKAYQEIKQALLTAPALGLPDLTKPFELFVDEKQGYAKGVLTQKLGPWRRPVAYLSKKLDPVAAGWPPCLRMVAAIAVLTKDAGKLTMGQPLVILAPHAVEALVKQPPDRWLSNARMTHYQALLLDTDRVQFGPVVALNPATLLPLPEEGLQHNCLDILAEAHGTRPDLTDQPLPDADHTWYTDGSSLLQEGQRKAGAAVTTETEVIWAKALPAGTSAQRAELIALTQALKMAEGKKLNVYTDSRYAFATAHIHGEIYRRRGWLTSEGKEIKNKDEILALLKALFLPKRLSIIHCPGHQKGHSAEARGNRMADQAARKAAITETPDTSTLLIENSSPSGGSKRTADGSEFEAGKRTADGSEFEKRTADGSEFESPKKKAKVE

SEQ ID NO: 2884 - protein, 2116 aa, synthetic construct; identical to SEQ ID NO: 2674

SEQ ID NO: 2885 - protein, 2116 aa, synthetic construct; identical to SEQ ID NO: 2688

SEQ ID NO: 2886 - protein, 2111 aa, synthetic construct; identical to SEQ ID NO: 2653

SEQ ID NO: 2887 - protein, 2115 aa, synthetic construct; identical to SEQ ID NO: 2647

SEQ ID NO: 2888 - protein, 2125 aa, synthetic construct; identical to SEQ ID NO: 2610

SEQ ID NO: 2889 - protein, 2116 aa, synthetic construct; identical to SEQ ID NO: 2683

SEQ ID NO: 2890 - protein, 2114 aa, synthetic construct; identical to SEQ ID NO: 2633

SEQ ID NO: 2891 - protein, 2116 aa, synthetic construct; identical to SEQ ID NO: 2641

SEQ ID NO: 2892 - protein, 2138 aa, synthetic construct
MPAAKRVKLDGGDKKYSIGLDIGTNSVGWAVITDEYKVPSKKFKVLGNTDRHSIKKNLIGALLFDSGETAEATRLKRTARRRYTRRKNRICYLQEIFSNEMAKVDDSFFHRLEESFLVEEDKKHERHPIFGNIVDEVAYHEKYPTIYHLRKKLVDSTDKADLRLIYLALAHMIKFRGHFLIEGDLNPDNSDVDKLFIQLVQTYNQLFEENPINASGVDAKAILSARLSKSRRLENLIAQLPGEKKNGLFGNLIALSLGLTPNFKSNFDLAEDAKLQLSKDTYDDDLDNLLAQIGDQYADLFLAAKNLSDAILLSDILRVNTEITKAPLSASMIKRYDEHHQDLTLLKALVRQQLPEKYKEIFFDQSKNGYAGYIDGGASQEEFYKFIKPILEKMDGTEELLVKLNREDLLRKQRTFDNGSIPHQIHLGELHAILRRQEDFYPFLKDNREKIEKILTFRIPYYVGPLARGNSRFAWMTRKSEETITPWNFEEVVDKGASAQSFIERMTNFDKNLPNEKVLPKHSLLYEYFTVYNELTKVKYVTEGMRKPAFLSGEQKKAIVDLLFKTNRKVTVKQLKEDYFKKIECFDSVEISGVEDRFNASLGTYHDLLKIIKDKDFLDNEENEDILEDIVLTLTLFEDREMIEERLKTYAHLFDDKVMKQLKRRRYTGWGRLSRKLINGIRDKQSGKTILDFLKSDGFANRNFMQLIHDDSLTFKEDIQKAQVSGQGDSLHEHIANLAGSPAIKKGILQTVKVVDELVKVMGRHKPENIVIEMARENQTTQKGQKNSRERMKRIEEGIKELGSQILKEHPVENTQLQNEKLYLYYLQNGRDMYVDQELDINRLSDYDVDHIVPQSFLKDDSIDNKVLTRSDKARGKSDNVPSEEVVKKMKNYWRQLLNAKLITQRKFDNLTKAERGGLSELDKAGFIKRQLVETRQITKHVAQILDSRMNTKYDENDKLIREVKVITLKSKLVSDFRKDFQFYKVREINNYHHAHDAYLNAVVGTALIKKYPKLESEFVYGDYKVYDVRKMIAKSEQEIGKATAKYFFYSNIMNFFKTEITLANGEIRKRPLIETNGETGEIVWDKGRDFATVRKVLSMPQVNIVKKTEVQTGGFSKESILPKRNSDKLIARKKDWDPKKYGGFDSPTVAYSVLVVAKVEKGKSKKLKSVKELLGITIMERSSFEKNPIDFLEAKGYKEVKKDLIIKLPKYSLFELENGRKRMLASAGELQKGNELALPSKYVNFLYLASHYEKLKGSPEDNEQKQLFVEQHKHYLDEIIEQISEFSKRVILADANLDKVLSAYNKHRDKPIREQAENIIHLFTLTNLGAPAAFKYFDTTIDRKRYTSTKEVLDATLIHQSITGLYETRIDLSQLGGDGGSGGSSGGSSGSETPGTSESATPESSGGSSGGSSGGTLNIEDEYRLHETSKEPDVSLGSTWLSDFPQAWAETGGMGLAVRQAPLIIPLKATSTPVSIKQYPMSQEARLGIKPHIQRLLDQGILVPCQSPWNTPLLPVKKPGTNDYRPVQDLREVNKRVEDIHPTVPNPYNLLSGLPPSHQWYTVLDLKDAFFCLRLHPTSQPLFAFEWRDPEMGISGQLTWTRLPQGFKNSPTLFNEALHRDLADFRIQHPDLILLQYVDDLLLAATSELDCQQGTRALLQTLGNLGYRASAKKAQICQKQVKYLGYLLKEGQRWLTEARKETVMGQPTPKTPRQLREFLGKAGFCRLFIPGFAEMAAPLYPLTKPGTLFNWGPDQQKAYQEIKQALLTAPALGLPDLTKPFELFVDEKQGYAKGVLTQKLGPWRRPVAYLSKKLDPVAAGWPPCLRMVAAIAVLTKDAGKLTMGQPLVILAPHAVEALVKQPPDRWLSNARMTHYQALLLDTDRVQFGPVVALNPATLLPLPEEGLQHNCLDILAEAHGTRPDLTDQPLPDADHTWYTDGSSLLQEGQRKAGAAVTTETEVIWAKALPAGTSAQRAELIALTQALKMAEGKKLNVYTDSRYAFATAHIHGEIYRRRGWLTSEGKEIKNKDEILALLKALFLPKRLSIIHCPGHQKGHSAEARGNRMADQAARKAAITETPDTSTLLIENSSPSGGSKRTADGSEFEAGKRTADGSEFEKRTADGSEFESPKKKAKVE

SEQ ID NO: 2893 - protein, 2116 aa, synthetic construct; identical to SEQ ID NO: 2701

SEQ ID NO: 2894 - protein, 2114 aa, synthetic construct; identical to SEQ ID NO: 2684

SEQ ID NO: 2895 - protein, 2114 aa, synthetic construct; identical to SEQ ID NO: 2622

SEQ ID NO: 2896 - protein, 2116 aa, synthetic construct; identical to SEQ ID NO: 2645

SEQ ID NO: 2897 - protein, 2116 aa, synthetic construct; identical to SEQ ID NO: 2658

SEQ ID NO: 2898 - protein, 2114 aa, synthetic construct; identical to SEQ ID NO: 2670

SEQ ID NO: 2899 - protein, 2110 aa, synthetic construct
MPAAKRVKLDGGDKKYSIGLDIGTNSVGWAVITDEYKVPSKKFKVLGNTDRHSIKKNLIGALLFDSGETAEATRLKRTARRRYTRRKNRICYLQEIFSNEMAKVDDSFFHRLEESFLVEEDKKHERHPIFGNIVDEVAYHEKYPTIYHLRKKLVDSTDKADLRLIYLALAHMIKFRGHFLIEGDLNPDNSDVDKLFIQLVQTYNQLFEENPINASGVDAKAILSARLSKSRRLENLIAQLPGEKKNGLFGNLIALSLGLTPNFKSNFDLAEDAKLQLSKDTYDDDLDNLLAQIGDQYADLFLAAKNLSDAILLSDILRVNTEITKAPLSASMIKRYDEHHQDLTLLKALVRQQLPEKYKEIFFDQSKNGYAGYIDGGASQEEFYKFIKPILEKMDGTEELLVKLNREDLLRKQRTFDNGSIPHQIHLGELHAILRRQEDFYPFLKDNREKIEKILTFRIPYYVGPLARGNSRFAWMTRKSEETITPWNFEEVVDKGASAQSFIERMTNFDKNLPNEKVLPKHSLLYEYFTVYNELTKVKYVTEGMRKPAFLSGEQKKAIVDLLFKTNRKVTVKQLKEDYFKKIECFDSVEISGVEDRFNASLGTYHDLLKIIKDKDFLDNEENEDILEDIVLTLTLFEDREMIEERLKTYAHLFDDKVMKQLKRRRYTGWGRLSRKLINGIRDKQSGKTILDFLKSDGFANRNFMQLIHDDSLTFKEDIQKAQVSGQGDSLHEHIANLAGSPAIKKGILQTVKVVDELVKVMGRHKPENIVIEMARENQTTQKGQKNSRERMKRIEEGIKELGSQILKEHPVENTQLQNEKLYLYYLQNGRDMYVDQELDINRLSDYDVDHIVPQSFLKDDSIDNKVLTRSDKARGKSDNVPSEEVVKKMKNYWRQLLNAKLITQRKFDNLTKAERGGLSELDKAGFIKRQLVETRQITKHVAQILDSRMNTKYDENDKLIREVKVITLKSKLVSDFRKDFQFYKVREINNYHHAHDAYLNAVVGTALIKKYPKLESEFVYGDYKVYDVRKMIAKSEQEIGKATAKYFFYSNIMNFFKTEITLANGEIRKRPLIETNGETGEIVWDKGRDFATVRKVLSMPQVNIVKKTEVQTGGFSKESILPKRNSDKLIARKKDWDPKKYGGFDSPTVAYSVLVVAKVEKGKSKKLKSVKELLGITIMERSSFEKNPIDFLEAKGYKEVKKDLIIKLPKYSLFELENGRKRMLASAGELQKGNELALPSKYVNFLYLASHYEKLKGSPEDNEQKQLFVEQHKHYLDEIIEQISEFSKRVILADANLDKVLSAYNKHRDKPIREQAENIIHLFTLTNLGAPAAFKYFDTTIDRKRYTSTKEVLDATLIHQSITGLYETRIDLSQLGGDGGGGGGGGGTLNIEDEYRLHETSKEPDVSLGSTWLSDFPQAWAETGGMGLAVRQAPLIIPLKATSTPVSIKQYPMSQEARLGIKPHIQRLLDQGILVPCQSPWNTPLLPVKKPGTNDYRPVQDLREVNKRVEDIHPTVPNPYNLLSGLPPSHQWYTVLDLKDAFFCLRLHPTSQPLFAFEWRDPEMGISGQLTWTRLPQGFKNSPTLFNEALHRDLADFRIQHPDLILLQYVDDLLLAATSELDCQQGTRALLQTLGNLGYRASAKKAQICQKQVKYLGYLLKEGQRWLTEARKETVMGQPTPKTPRQLREFLGKAGFCRLFIPGFAEMAAPLYPLTKPGTLFNWGPDQQKAYQEIKQALLTAPALGLPDLTKPFELFVDEKQGYAKGVLTQKLGPWRRPVAYLSKKLDPVAAGWPPCLRMVAAIAVLTKDAGKLTMGQPLVILAPHAVEALVKQPPDRWLSNARMTHYQALLLDTDRVQFGPVVALNPATLLPLPEEGLQHNCLDILAEAHGTRPDLTDQPLPDADHTWYTDGSSLLQEGQRKAGAAVTTETEVIWAKALPAGTSAQRAELIALTQALKMAEGKKLNVYTDSRYAFATAHIHGEIYRRRGWLTSEGKEIKNKDEILALLKALFLPKRLSIIHCPGHQKGHSAEARGNRMADQAARKAAITETPDTSTLLIENSSPSGGSKRTADGSEFEAGKRTADGSEFEKRTADGSEFESPKKKAKVE

SEQ ID NO: 2900 - protein, 2120 aa, synthetic construct; identical to SEQ ID NO: 2662

SEQ ID NO: 2901 - protein, 2116 aa, synthetic construct; identical to SEQ ID NO: 2629

SEQ ID NO: 2902 - protein, 2117 aa, synthetic construct; identical to SEQ ID NO: 2696

SEQ ID NO: 2903 - protein, 2114 aa, synthetic construct; identical to SEQ ID NO: 2634

SEQ ID NO: 2904 - protein, 2114 aa, synthetic construct; identical to SEQ ID NO: 2618

SEQ ID NO: 2905 - protein, 2111 aa, synthetic construct
MPAAKRVKLDGGDKKYSIGLDIGTNSVGWAVITDEYKVPSKKFKVLGNTDRHSIKKNLIGALLFDSGETAEATRLKRTARRRYTRRKNRICYLQEIFSNEMAKVDDSFFHRLEESFLVEEDKKHERHPIFGNIVDEVAYHEKYPTIYHLRKKLVDSTDKADLRLIYLALAHMIKFRGHFLIEGDLNPDNSDVDKLFIQLVQTYNQLFEENPINASGVDAKAILSARLSKSRRLENLIAQLPGEKKNGLFGNLIALSLGLTPNFKSNFDLAEDAKLQLSKDTYDDDLDNLLAQIGDQYADLFLAAKNLSDAILLSDILRVNTEITKAPLSASMIKRYDEHHQDLTLLKALVRQQLPEKYKEIFFDQSKNGYAGYIDGGASQEEFYKFIKPILEKMDGTEELLVKLNREDLLRKQRTFDNGSIPHQIHLGELHAILRRQEDFYPFLKDNREKIEKILTFRIPYYVGPLARGNSRFAWMTRKSEETITPWNFEEVVDKGASAQSFIERMTNFDKNLPNEKVLPKHSLLYEYFTVYNELTKVKYVTEGMRKPAFLSGEQKKAIVDLLFKTNRKVTVKQLKEDYFKKIECFDSVEISGVEDRFNASLGTYHDLLKIIKDKDFLDNEENEDILEDIVLTLTLFEDREMIEERLKTYAHLFDDKVMKQLKRRRYTGWGRLSRKLINGIRDKQSGKTILDFLKSDGFANRNFMQLIHDDSLTFKEDIQKAQVSGQGDSLHEHIANLAGSPAIKKGILQTVKVVDELVKVMGRHKPENIVIEMARENQTTQKGQKNSRERMKRIEEGIKELGSQILKEHPVENTQLQNEKLYLYYLQNGRDMYVDQELDINRLSDYDVDHIVPQSFLKDDSIDNKVLTRSDKARGKSDNVPSEEVVKKMKNYWRQLLNAKLITQRKFDNLTKAERGGLSELDKAGFIKRQLVETRQITKHVAQILDSRMNTKYDENDKLIREVKVITLKSKLVSDFRKDFQFYKVREINNYHHAHDAYLNAVVGTALIKKYPKLESEFVYGDYKVYDVRKMIAKSEQEIGKATAKYFFYSNIMNFFKTEITLANGEIRKRPLIETNGETGEIVWDKGRDFATVRKVLSMPQVNIVKKTEVQTGGFSKESILPKRNSDKLIARKKDWDPKKYGGFDSPTVAYSVLVVAKVEKGKSKKLKSVKELLGITIMERSSFEKNPIDFLEAKGYKEVKKDLIIKLPKYSLFELENGRKRMLASAGELQKGNELALPSKYVNFLYLASHYEKLKGSPEDNEQKQLFVEQHKHYLDEIIEQISEFSKRVILADANLDKVLSAYNKHRDKPIREQAENIIHLFTLTNLGAPAAFKYFDTTIDRKRYTSTKEVLDATLIHQSITGLYETRIDLSQLGGDGGGSSGSSGGTLNIEDEYRLHETSKEPDVSLGSTWLSDFPQAWAETGGMGLAVRQAPLIIPLKATSTPVSIKQYPMSQEARLGIKPHIQRLLDQGILVPCQSPWNTPLLPVKKPGTNDYRPVQDLREVNKRVEDIHPTVPNPYNLLSGLPPSHQWYTVLDLKDAFFCLRLHPTSQPLFAFEWRDPEMGISGQLTWTRLPQGFKNSPTLFNEALHRDLADFRIQHPDLILLQYVDDLLLAATSELDCQQGTRALLQTLGNLGYRASAKKAQICQKQVKYLGYLLKEGQRWLTEARKETVMGQPTPKTPRQLREFLGKAGFCRLFIPGFAEMAAPLYPLTKPGTLFNWGPDQQKAYQEIKQALLTAPALGLPDLTKPFELFVDEKQGYAKGVLTQKLGPWRRPVAYLSKKLDPVAAGWPPCLRMVAAIAVLTKDAGKLTMGQPLVILAPHAVEALVKQPPDRWLSNARMTHYQALLLDTDRVQFGPVVALNPATLLPLPEEGLQHNCLDILAEAHGTRPDLTDQPLPDADHTWYTDGSSLLQEGQRKAGAAVTTETEVIWAKALPAGTSAQRAELIALTQALKMAEGKKLNVYTDSRYAFATAHIHGEIYRRRGWLTSEGKEIKNKDEILALLKALFLPKRLSIIHCPGHQKGHSAEARGNRMADQAARKAAITETPDTSTLLIENSSPSGGSKRTADGSEFEAGKRTADGSEFEKRTADGSEFESPKKKAKVE

SEQ ID NO: 2906 - protein, 2111 aa, synthetic construct; identical to SEQ ID NO: 2643

SEQ ID NO: 2907 - protein, 2121 aa, synthetic construct; identical to SEQ ID NO: 2663

SEQ ID NO: 2908 - protein, 2113 aa, synthetic construct; identical to SEQ ID NO: 2626

SEQ ID NO: 2909 - protein, 2115 aa, synthetic construct; identical to SEQ ID NO: 2639

SEQ ID NO: 2910 - protein, 2111 aa, synthetic construct; identical to SEQ ID NO: 2671

SEQ ID NO: 2911 - protein, 2111 aa, synthetic construct; identical to SEQ ID NO: 2672

SEQ ID NO: 2912 - protein, 2116 aa, synthetic construct; identical to SEQ ID NO: 2703

SEQ ID NO: 2913 - protein, 2116 aa, synthetic construct; identical to SEQ ID NO: 2660

SEQ ID NO: 2914 - protein, 2111 aa, synthetic construct
MPAAKRVKLDGGDKKYSIGLDIGTNSVGWAVITDEYKVPSKKFKVLGNTDRHSIKKNLIGALLFDSGETAEATRLKRTARRRYTRRKNRICYLQEIFSNEMAKVDDSFFHRLEESFLVEEDKKHERHPIFGNIVDEVAYHEKYPTIYHLRKKLVDSTDKADLRLIYLALAHMIKFRGHFLIEGDLNPDNSDVDKLFIQLVQTYNQLFEENPINASGVDAKAILSARLSKSRRLENLIAQLPGEKKNGLFGNLIALSLGLTPNFKSNFDLAEDAKLQLSKDTYDDDLDNLLAQIGDQYADLFLAAKNLSDAILLSDILRVNTEITKAPLSASMIKRYDEHHQDLTLLKALVRQQLPEKYKEIFFDQSKNGYAGYIDGGASQEEFYKFIKPILEKMDGTEELLVKLNREDLLRKQRTFDNGSIPHQIHLGELHAILRRQEDFYPFLKDNREKIEKILTFRIPYYVGPLARGNSRFAWMTRKSEETITPWNFEEVVDKGASAQSFIERMTNFDKNLPNEKVLPKHSLLYEYFTVYNELTKVKYVTEGMRKPAFLSGEQKKAIVDLLFKTNRKVTVKQLKEDYFKKIECFDSVEISGVEDRFNASLGTYHDLLKIIKDKDFLDNEENEDILEDIVLTLTLFEDREMIEERLKTYAHLFDDKVMKQLKRRRYTGWGRLSRKLINGIRDKQSGKTILDFLKSDGFANRNFMQLIHDDSLTFKEDIQKAQVSGQGDSLHEHIANLAGSPAIKKGILQTVKVVDELVKVMGRHKPENIVIEMARENQTTQKGQKNSRERMKRIEEGIKELGSQILKEHPVENTQLQNEKLYLYYLQNGRDMYVDQELDINRLSDYDVDHIVPQSFLKDDSIDNKVLTRSDKARGKSDNVPSEEVVKKMKNYWRQLLNAKLITQRKFDNLTKAERGGLSELDKAGFIKRQLVETRQITKHVAQILDSRMNTKYDENDKLIREVKVITLKSKLVSDFRKDFQFYKVREINNYHHAHDAYLNAVVGTALIKKYPKLESEFVYGDYKVYDVRKMIAKSEQEIGKATAKYFFYSNIMNFFKTEITLANGEIRKRPLIETNGETGEIVWDKGRDFATVRKVLSMPQVNIVKKTEVQTGGFSKESILPKRNSDKLIARKKDWDPKKYGGFDSPTVAYSVLVVAKVEKGKSKKLKSVKELLGITIMERSSFEKNPIDFLEAKGYKEVKKDLIIKLPKYSLFELENGRKRMLASAGELQKGNELALPSKYVNFLYLASHYEKLKGSPEDNEQKQLFVEQHKHYLDEIIEQISEFSKRVILADANLDKVLSAYNKHRDKPIREQAENIIHLFTLTNLGAPAAFKYFDTTIDRKRYTSTKEVLDATLIHQSITGLYETRIDLSQLGGDGGGGSGSSGGTLNIEDEYRLHETSKEPDVSLGSTWLSDFPQAWAETGGMGLAVRQAPLIIPLKATSTPVSIKQYPMSQEARLGIKPHIQRLLDQGILVPCQSPWNTPLLPVKKPGTNDYRPVQDLREVNKRVEDIHPTVPNPYNLLSGLPPSHQWYTVLDLKDAFFCLRLHPTSQPLFAFEWRDPEMGISGQLTWTRLPQGFKNSPTLFNEALHRDLADFRIQHPDLILLQYVDDLLLAATSELDCQQGTRALLQTLGNLGYRASAKKAQICQKQVKYLGYLLKEGQRWLTEARKETVMGQPTPKTPRQLREFLGKAGFCRLFIPGFAEMAAPLYPLTKPGTLFNWGPDQQKAYQEIKQALLTAPALGLPDLTKPFELFVDEKQGYAKGVLTQKLGPWRRPVAYLSKKLDPVAAGWPPCLRMVAAIAVLTKDAGKLTMGQPLVILAPHAVEALVKQPPDRWLSNARMTHYQALLLDTDRVQFGPVVALNPATLLPLPEEGLQHNCLDILAEAHGTRPDLTDQPLPDADHTWYTDGSSLLQEGQRKAGAAVTTETEVIWAKALPAGTSAQRAELIALTQALKMAEGKKLNVYTDSRYAFATAHIHGEIYRRRGWLTSEGKEIKNKDEILALLKALFLPKRLSIIHCPGHQKGHSAEARGNRMADQAARKAAITETPDTSTLLIENSSPSGGSKRTADGSEFEAGKRTADGSEFEKRTADGSEFESPKKKAKVE

SEQ ID NO: 2915 - protein, 2116 aa, synthetic construct; identical to SEQ ID NO: 2668

SEQ ID NO: 2916 - protein, 2113 aa, synthetic construct
MPAAKRVKLDGGDKKYSIGLDIGTNSVGWAVITDEYKVPSKKFKVLGNTDRHSIKKNLIGALLFDSGETAEATRLKRTARRRYTRRKNRICYLQEIFSNEMAKVDDSFFHRLEESFLVEEDKKHERHPIFGNIVDEVAYHEKYPTIYHLRKKLVDSTDKADLRLIYLALAHMIKFRGHFLIEGDLNPDNSDVDKLFIQLVQTYNQLFEENPINASGVDAKAILSARLSKSRRLENLIAQLPGEKKNGLFGNLIALSLGLTPNFKSNFDLAEDAKLQLSKDTYDDDLDNLLAQIGDQYADLFLAAKNLSDAILLSDILRVNTEITKAPLSASMIKRYDEHHQDLTLLKALVRQQLPEKYKEIFFDQSKNGYAGYIDGGASQEEFYKFIKPILEKMDGTEELLVKLNREDLLRKQRTFDNGSIPHQIHLGELHAILRRQEDFYPFLKDNREKIEKILTFRIPYYVGPLARGNSRFAWMTRKSEETITPWNFEEVVDKGASAQSFIERMTNFDKNLPNEKVLPKHSLLYEYFTVYNELTKVKYVTEGMRKPAFLSGEQKKAIVDLLFKTNRKVTVKQLKEDYFKKIECFDSVEISGVEDRFNASLGTYHDLLKIIKDKDFLDNEENEDILEDIVLTLTLFEDREMIEERLKTYAHLFDDKVMKQLKRRRYTGWGRLSRKLINGIRDKQSGKTILDFLKSDGFANRNFMQLIHDDSLTFKEDIQKAQVSGQGDSLHEHIANLAGSPAIKKGILQTVKVVDELVKVMGRHKPENIVIEMARENQTTQKGQKNSRERMKRIEEGIKELGSQILKEHPVENTQLQNEKLYLYYLQNGRDMYVDQELDINRLSDYDVDHIVPQSFLKDDSIDNKVLTRSDKARGKSDNVPSEEVVKKMKNYWRQLLNAKLITQRKFDNLTKAERGGLSELDKAGFIKRQLVETRQITKHVAQILDSRMNTKYDENDKLIREVKVITLKSKLVSDFRKDFQFYKVREINNYHHAHDAYLNAVVGTALIKKYPKLESEFVYGDYKVYDVRKMIAKSEQEIGKATAKYFFYSNIMNFFKTEITLANGEIRKRPLIETNGETGEIVWDKGRDFATVRKVLSMPQVNIVKKTEVQTGGFSKESILPKRNSDKLIARKKDWDPKKYGGFDSPTVAYSVLVVAKVEKGKSKKLKSVKELLGITIMERSSFEKNPIDFLEAKGYKEVKKDLIIKLPKYSLFELENGRKRMLASAGELQKGNELALPSKYVNFLYLASHYEKLKGSPEDNEQKQLFVEQHKHYLDEIIEQISEFSKRVILADANLDKVLSAYNKHRDKPIREQAENIIHLFTLTNLGAPAAFKYFDTTIDRKRYTSTKEVLDATLIHQSITGLYETRIDLSQLGGDGGGSSEAAAKGGTLNIEDEYRLHETSKEPDVSLGSTWLSDFPQAWAETGGMGLAVRQAPLIIPLKATSTPVSIKQYPMSQEARLGIKPHIQRLLDQGILVPCQSPWNTPLLPVKKPGTNDYRPVQDLREVNKRVEDIHPTVPNPYNLLSGLPPSHQWYTVLDLKDAFFCLRLHPTSQPLFAFEWRDPEMGISGQLTWTRLPQGFKNSPTLFNEALHRDLADFRIQHPDLILLQYVDDLLLAATSELDCQQGTRALLQTLGNLGYRASAKKAQICQKQVKYLGYLLKEGQRWLTEARKETVMGQPTPKTPRQLREFLGKAGFCRLFIPGFAEMAAPLYPLTKPGTLFNWGPDQQKAYQEIKQALLTAPALGLPDLTKPFELFVDEKQGYAKGVLTQKLGPWRRPVAYLSKKLDPVAAGWPPCLRMVAAIAVLTKDAGKLTMGQPLVILAPHAVEALVKQPPDRWLSNARMTHYQALLLDTDRVQFGPVVALNPATLLPLPEEGLQHNCLDILAEAHGTRPDLTDQPLPDADHTWYTDGSSLLQEGQRKAGAAVTTETEVIWAKALPAGTSAQRAELIALTQALKMAEGKKLNVYTDSRYAFATAHIHGEIYRRRGWLTSEGKEIKNKDEILALLKALFLPKRLSIIHCPGHQKGHSAEARGNRMADQAARKAAITETPDTSTLLIENSSPSGGSKRTADGSEFEAGKRTADGSEFEKRTADGSEFESPKKKAKVE

SEQ ID NO: 2917 - protein, 2123 aa, synthetic construct
MPAAKRVKLDGGDKKYSIGLDIGTNSVGWAVITDEYKVPSKKFKVLGNTDRHSIKKNLIGALLFDSGETAEATRLKRTARRRYTRRKNRICYLQEIFSNEMAKVDDSFFHRLEESFLVEEDKKHERHPIFGNIVDEVAYHEKYPTIYHLRKKLVDSTDKADLRLIYLALAHMIKFRGHFLIEGDLNPDNSDVDKLFIQLVQTYNQLFEENPINASGVDAKAILSARLSKSRRLENLIAQLPGEKKNGLFGNLIALSLGLTPNFKSNFDLAEDAKLQLSKDTYDDDLDNLLAQIGDQYADLFLAAKNLSDAILLSDILRVNTEITKAPLSASMIKRYDEHHQDLTLLKALVRQQLPEKYKEIFFDQSKNGYAGYIDGGASQEEFYKFIKPILEKMDGTEELLVKLNREDLLRKQRTFDNGSIPHQIHLGELHAILRRQEDFYPFLKDNREKIEKILTFRIPYYVGPLARGNSRFAWMTRKSEETITPWNFEEVVDKGASAQSFIERMTNFDKNLPNEKVLPKHSLLYEYFTVYNELTKVKYVTEGMRKPAFLSGEQKKAIVDLLFKTNRKVTVKQLKEDYFKKIECFDSVEISGVEDRFNASLGTYHDLLKIIKDKDFLDNEENEDILEDIVLTLTLFEDREMIEERLKTYAHLFDDKVMKQLKRRRYTGWGRLSRKLINGIRDKQSGKTILDFLKSDGFANRNFMQLIHDDSLTFKEDIQKAQVSGQGDSLHEHIANLAGSPAIKKGILQTVKVVDELVKVMGRHKPENIVIEMARENQTTQKGQKNSRERMKRIEEGIKELGSQILKEHPVENTQLQNEKLYLYYLQNGRDMYVDQELDINRLSDYDVDHIVPQSFLKDDSIDNKVLTRSDKARGKSDNVPSEEVVKKMKNYWRQLLNAKLITQRKFDNLTKAERGGLSELDKAGFIKRQLVETRQITKHVAQILDSRMNTKYDENDKLIREVKVITLKSKLVSDFRKDFQFYKVREINNYHHAHDAYLNAVVGTALIKKYPKLESEFVYGDYKVYDVRKMIAKSEQEIGKATAKYFFYSNIMNFFKTEITLANGEIRKRPLIETNGETGEIVWDKGRDFATVRKVLSMPQVNIVKKTEVQTGGFSKESILPKRNSDKLIARKKDWDPKKYGGFDSPTVAYSVLVVAKVEKGKSKKLKSVKELLGITIMERSSFEKNPIDFLEAKGYKEVKKDLIIKLPKYSLFELENGRKRMLASAGELQKGNELALPSKYVNFLYLASHYEKLKGSPEDNEQKQLFVEQHKHYLDEIIEQISEFSKRVILADANLDKVLSAYNKHRDKPIREQAENIIHLFTLTNLGAPAAFKYFDTTIDRKRYTSTKEVLDATLIHQSITGLYETRIDLSQLGGDGGGGSGGSGGSGGSGGSGGSGGTLNIEDEYRLHETSKEPDVSLGSTWLSDFPQAWAETGGMGLAVRQAPLIIPLKATSTPVSIKQYPMSQEARLGIKPHIQRLLDQGILVPCQSPWNTPLLPVKKPGTNDYRPVQDLREVNKRVEDIHPTVPNPYNLLSGLPPSHQWYTVLDLKDAFFCLRLHPTSQPLFAFEWRDPEMGISGQLTWTRLPQGFKNSPTLFNEALHRDLADFRIQHPDLILLQYVDDLLLAATSELDCQQGTRALLQTLGNLGYRASAKKAQICQKQVKYLGYLLKEGQRWLTEARKETVMGQPTPKTPRQLREFLGKAGFCRLFIPGFAEMAAPLYPLTKPGTLFNWGPDQQKAYQEIKQALLTAPALGLPDLTKPFELFVDEKQGYAKGVLTQKLGPWRRPVAYLSKKLDPVAAGWPPCLRMVAAIAVLTKDAGKLTMGQPLVILAPHAVEALVKQPPDRWLSNARMTHYQALLLDTDRVQFGPVVALNPATLLPLPEEGLQHNCLDILAEAHGTRPDLTDQPLPDADHTWYTDGSSLLQEGQRKAGAAVTTETEVIWAKALPAGTSAQRAELIALTQALKMAEGKKLNVYTDSRYAFATAHIHGEIYRRRGWLTSEGKEIKNKDEILALLKALFLPKRLSIIHCPGHQKGHSAEARGNRMADQAARKAAITETPDTSTLLIENSSPSGGSKRTADGSEFEAGKRTADGSEFEKRTADGSEFESPKKKAKVE

SEQ ID NO: 2918 - protein, 2114 aa, synthetic construct
MPAAKRVKLDGGDKKYSIGLDIGTNSVGWAVITDEYKVPSKKFKVLGNTDRHSIKKNLIGALLFDSGETAEATRLKRTARRRYTRRKNRICYLQEIFSNEMAKVDDSFFHRLEESFLVEEDKKHERHPIFGNIVDEVAYHEKYPTIYHLRKKLVDSTDKADLRLIYLALAHMIKFRGHFLIEGDLNPDNSDVDKLFIQLVQTYNQLFEENPINASGVDAKAILSARLSKSRRLENLIAQLPGEKKNGLFGNLIALSLGLTPNFKSNFDLAEDAKLQLSKDTYDDDLDNLLAQIGDQYADLFLAAKNLSDAILLSDILRVNTEITKAPLSASMIKRYDEHHQDLTLLKALVRQQLPEKYKEIFFDQSKNGYAGYIDGGASQEEFYKFIKPILEKMDGTEELLVKLNREDLLRKQRTFDNGSIPHQIHLGELHAILRRQEDFYPFLKDNREKIEKILTFRIPYYVGPLARGNSRFAWMTRKSEETITPWNFEEVVDKGASAQSFIERMTNFDKNLPNEKVLPKHSLLYEYFTVYNELTKVKYVTEGMRKPAFLSGEQKKAIVDLLFKTNRKVTVKQLKEDYFKKIECFDSVEISGVEDRFNASLGTYHDLLKIIKDKDFLDNEENEDILEDIVLTLTLFEDREMIEERLKTYAHLFDDKVMKQLKRRRYTGWGRLSRKLINGIRDKQSGKTILDFLKSDGFANRNFMQLIHDDSLTFKEDIQKAQVSGQGDSLHEHIANLAGSPAIKKGILQTVKVVDELVKVMGRHKPENIVIEMARENQTTQKGQKNSRERMKRIEEGIKELGSQILKEHPVENTQLQNEKLYLYYLQNGRDMYVDQELDINRLSDYDVDHIVPQSFLKDDSIDNKVLTRSDKARGKSDNVPSEEVVKKMKNYWRQLLNAKLITQRKFDNLTKAERGGLSELDKAGFIKRQLVETRQITKHVAQILDSRMNTKYDENDKLIREVKVITLKSKLVSDFRKDFQFYKVREINNYHHAHDAYLNAVVGTALIKKYPKLESEFVYGDYKVYDVRKMIAKSEQEIGKATAKYFFYSNIMNFFKTEITLANGEIRKRPLIETNGETGEIVWDKGRDFATVRKVLSMPQVNIVKKTEVQTGGFSKESILPKRNSDKLIARKKDWDPKKYGGFDSPTVAYSVLVVAKVEKGKSKKLKSVKELLGITIMERSSFEKNPIDFLEAKGYKEVKKDLIIKLPKYSLFELENGRKRMLASAGELQKGNELALPSKYVNFLYLASHYEKLKGSPEDNEQKQLFVEQHKHYLDEIIEQISEFSKRVILADANLDKVLSAYNKHRDKPIREQAENIIHLFTLTNLGAPAAFKYFDTTIDRKRYTSTKEVLDATLIHQSITGLYETRIDLSQLGGDGGGGGGGSPAPGGTLNIEDEYRLHETSKEPDVSLGSTWLSDFPQAWAETGGMGLAVRQAPLIIPLKATSTPVSIKQYPMSQEARLGIKPHIQRLLDQGILVPCQSPWNTPLLPVKKPGTNDYRPVQDLREVNKRVEDIHPTVPNPYNLLSGLPPSHQWYTVLDLKDAFFCLRLHPTSQPLFAFEWRDPEMGISGQLTWTRLPQGFKNSPTLFNEALHRDLADFRIQHPDLILLQYVDDLLLAATSELDCQQGTRALLQTLGNLGYRASAKKAQICQKQVKYLGYLLKEGQRWLTEARKETVMGQPTPKTPRQLREFLGKAGFCRLFIPGFAEMAAPLYPLTKPGTLFNWGPDQQKAYQEIKQALLTAPALGLPDLTKPFELFVDEKQGYAKGVLTQKLGPWRRPVAYLSKKLDPVAAGWPPCLRMVAAIAVLTKDAGKLTMGQPLVILAPHAVEALVKQPPDRWLSNARMTHYQALLLDTDRVQFGPVVALNPATLLPLPEEGLQHNCLDILAEAHGTRPDLTDQPLPDADHTWYTDGSSLLQEGQRKAGAAVTTETEVIWAKALPAGTSAQRAELIALTQALKMAEGKKLNVYTDSRYAFATAHIHGEIYRRRGWLTSEGKEIKNKDEILALLKALFLPKRLSIIHCPGHQKGHSAEARGNRMADQAARKAAITETPDTSTLLIENSSPSGGSKRTADGSEFEAGKRTADGSEFEKRTADGSEFESPKKKAKVE

SEQ ID NO: 2919 - protein, 2116 aa, synthetic construct; identical to SEQ ID NO: 2690

SEQ ID NO: 2920 - protein, 2116 aa, synthetic construct; identical to SEQ ID NO: 2648

SEQ ID NO: 2921 - protein, 2114 aa, synthetic construct; identical to SEQ ID NO: 2616

SEQ ID NO: 2922 - protein, 2116 aa, synthetic construct; identical to SEQ ID NO: 2666

SEQ ID NO: 2923 - protein, 2111 aa, synthetic construct
MPAAKRVKLDGGDKKYSIGLDIGTNSVGWAVITDEYKVPSKKFKVLGNTDRHSIKKNLIGALLFDSGETAEATRLKRTARRRYTRRKNRICYLQEIFSNEMAKVDDSFFHRLEESFLVEEDKKHERHPIFGNIVDEVAYHEKYPTIYHLRKKLVDSTDKADLRLIYLALAHMIKFRGHFLIEGDLNPDNSDVDKLFIQLVQTYNQLFEENPINASGVDAKAILSARLSKSRRLENLIAQLPGEKKNGLFGNLIALSLGLTPNFKSNFDLAEDAKLQLSKDTYDDDLDNLLAQIGDQYADLFLAAKNLSDAILLSDILRVNTEITKAPLSASMIKRYDEHHQDLTLLKALVRQQLPEKYKEIFFDQSKNGYAGYIDGGASQEEFYKFIKPILEKMDGTEELLVKLNREDLLRKQRTFDNGSIPHQIHLGELHAILRRQEDFYPFLKDNREKIEKILTFRIPYYVGPLARGNSRFAWMTRKSEETITPWNFEEVVDKGASAQSFIERMTNFDKNLPNEKVLPKHSLLYEYFTVYNELTKVKYVTEGMRKPAFLSGEQKKAIVDLLFKTNRKVTVKQLKEDYFKKIECFDSVEISGVEDRFNASLGTYHDLLKIIKDKDFLDNEENEDILEDIVLTLTLFEDREMIEERLKTYAHLFDDKVMKQLKRRRYTGWGRLSRKLINGIRDKQSGKTILDFLKSDGFANRNFMQLIHDDSLTFKEDIQKAQVSGQGDSLHEHIANLAGSPAIKKGILQTVKVVDELVKVMGRHKPENIVIEMARENQTTQKGQKNSRERMKRIEEGIKELGSQILKEHPVENTQLQNEKLYLYYLQNGRDMYVDQELDINRLSDYDVDHIVPQSFLKDDSIDNKVLTRSDKARGKSDNVPSEEVVKKMKNYWRQLLNAKLITQRKFDNLTKAERGGLSELDKAGFIKRQLVETRQITKHVAQILDSRMNTKYDENDKLIREVKVITLKSKLVSDFRKDFQFYKVREINNYHHAHDAYLNAVVGTALIKKYPKLESEFVYGDYKVYDVRKMIAKSEQEIGKATAKYFFYSNIMNFFKTEITLANGEIRKRPLIETNGETGEIVWDKGRDFATVRKVLSMPQVNIVKKTEVQTGGFSKESILPKRNSDKLIARKKDWDPKKYGGFDSPTVAYSVLVVAKVEKGKSKKLKSVKELLGITIMERSSFEKNPIDFLEAKGYKEVKKDLIIKLPKYSLFELENGRKRMLASAGELQKGNELALPSKYVNFLYLASHYEKLKGSPEDNEQKQLFVEQHKHYLDEIIEQISEFSKRVILADANLDKVLSAYNKHRDKPIREQAENIIHLFTLTNLGAPAAFKYFDTTIDRKRYTSTKEVLDATLIHQSITGLYETRIDLSQLGGDGGPAPGGGGGTLNIEDEYRLHETSKEPDVSLGSTWLSDFPQAWAETGGMGLAVRQAPLIIPLKATSTPVSIKQYPMSQEARLGIKPHIQRLLDQGILVPCQSPWNTPLLPVKKPGTNDYRPVQDLREVNKRVEDIHPTVPNPYNLLSGLPPSHQWYTVLDLKDAFFCLRLHPTSQPLFAFEWRDPEMGISGQLTWTRLPQGFKNSPTLFNEALHRDLADFRIQHPDLILLQYVDDLLLAATSELDCQQGTRALLQTLGNLGYRASAKKAQICQKQVKYLGYLLKEGQRWLTEARKETVMGQPTPKTPRQLREFLGKAGFCRLFIPGFAEMAAPLYPLTKPGTLFNWGPDQQKAYQEIKQALLTAPALGLPDLTKPFELFVDEKQGYAKGVLTQKLGPWRRPVAYLSKKLDPVAAGWPPCLRMVAAIAVLTKDAGKLTMGQPLVILAPHAVEALVKQPPDRWLSNARMTHYQALLLDTDRVQFGPVVALNPATLLPLPEEGLQHNCLDILAEAHGTRPDLTDQPLPDADHTWYTDGSSLLQEGQRKAGAAVTTETEVIWAKALPAGTSAQRAELIALTQALKMAEGKKLNVYTDSRYAFATAHIHGEIYRRRGWLTSEGKEIKNKDEILALLKALFLPKRLSIIHCPGHQKGHSAEARGNRMADQAARKAAITETPDTSTLLIENSSPSGGSKRTADGSEFEAGKRTADGSEFEKRTADGSEFESPKKKAKVE

SEQ ID NO: 2924 - protein, 2116 aa, synthetic construct
MPAAKRVKLDGGDKKYSIGLDIGTNSVGWAVITDEYKVPSKKFKVLGNTDRHSIKKNLIGALLFDSGETAEATRLKRTARRRYTRRKNRICYLQEIFSNEMAKVDDSFFHRLEESFLVEEDKKHERHPIFGNIVDEVAYHEKYPTIYHLRKKLVDSTDKADLRLIYLALAHMIKFRGHFLIEGDLNPDNSDVDKLFIQLVQTYNQLFEENPINASGVDAKAILSARLSKSRRLENLIAQLPGEKKNGLFGNLIALSLGLTPNFKSNFDLAEDAKLQLSKDTYDDDLDNLLAQIGDQYADLFLAAKNLSDAILLSDILRVNTEITKAPLSASMIKRYDEHHQDLTLLKALVRQQLPEKYKEIFFDQSKNGYAGYIDGGASQEEFYKFIKPILEKMDGTEELLVKLNREDLLRKQRTFDNGSIPHQIHLGELHAILRRQEDFYPFLKDNREKIEKILTFRIPYYVGPLARGNSRFAWMTRKSEETITPWNFEEVVDKGASAQSFIERMTNFDKNLPNEKVLPKHSLLYEYFTVYNELTKVKYVTEGMRKPAFLSGEQKKAIVDLLFKTNRKVTVKQLKEDYFKKIECFDSVEISGVEDRFNASLGTYHDLLKIIKDKDFLDNEENEDILEDIVLTLTLFEDREMIEERLKTYAHLFDDKVMKQLKRRRYTGWGRLSRKLINGIRDKQSGKTILDFLKSDGFANRNFMQLIHDDSLTFKEDIQKAQVSGQGDSLHEHIANLAGSPAIKKGILQTVKVVDELVKVMGRHKPENIVIEMARENQTTQKGQKNSRERMKRIEEGIKELGSQILKEHPVENTQLQNEKLYLYYLQNGRDMYVDQELDINRLSDYDVDHIVPQSFLKDDSIDNKVLTRSDKARGKSDNVPSEEVVKKMKNYWRQLLNAKLITQRKFDNLTKAERGGLSELDKAGFIKRQLVETRQITKHVAQILDSRMNTKYDENDKLIREVKVITLKSKLVSDFRKDFQFYKVREINNYHHAHDAYLNAVVGTALIKKYPKLESEFVYGDYKVYDVRKMIAKSEQEIGKATAKYFFYSNIMNFFKTEITLANGEIRKRPLIETNGETGEIVWDKGRDFATVRKVLSMPQVNIVKKTEVQTGGFSKESILPKRNSDKLIARKKDWDPKKYGGFDSPTVAYSVLVVAKVEKGKSKKLKSVKELLGITIMERSSFEKNPIDFLEAKGYKEVKKDLIIKLPKYSLFELENGRKRMLASAGELQKGNELALPSKYVNFLYLASHYEKLKGSPEDNEQKQLFVEQHKHYLDEIIEQISEFSKRVILADANLDKVLSAYNKHRDKPIREQAENIIHLFTLTNLGAPAAFKYFDTTIDRKRYTSTKEVLDATLIHQSITGLYETRIDLSQLGGDGGPAPEAAAKGGSGGTLNIEDEYRLHETSKEPDVSLGSTWLSDFPQAWAETGGMGLAVRQAPLIIPLKATSTPVSIKQYPMSQEARLGIKPHIQRLLDQGILVPCQSPWNTPLLPVKKPGTNDYRPVQDLREVNKRVEDIHPTVPNPYNLLSGLPPSHQWYTVLDLKDAFFCLRLHPTSQPLFAFEWRDPEMGISGQLTWTRLPQGFKNSPTLFNEALHRDLADFRIQHPDLILLQYVDDLLLAATSELDCQQGTRALLQTLGNLGYRASAKKAQICQKQVKYLGYLLKEGQRWLTEARKETVMGQPTPKTPRQLREFLGKAGFCRLFIPGFAEMAAPLYPLTKPGTLFNWGPDQQKAYQEIKQALLTAPALGLPDLTKPFELFVDEKQGYAKGVLTQKLGPWRRPVAYLSKKLDPVAAGWPPCLRMVAAIAVLTKDAGKLTMGQPLVILAPHAVEALVKQPPDRWLSNARMTHYQALLLDTDRVQFGPVVALNPATLLPLPEEGLQHNCLDILAEAHGTRPDLTDQPLPDADHTWYTDGSSLLQEGQRKAGAAVTTETEVIWAKALPAGTSAQRAELIALTQALKMAEGKKLNVYTDSRYAFATAHIHGEIYRRRGWLTSEGKEIKNKDEILALLKALFLPKRLSIIHCPGHQKGHSAEARGNRMADQAARKAAITETPDTSTLLIENSSPSGGSKRTADGSEFEAGKRTADGSEFEKRTADGSEFESPKKKAKVE

SEQ ID NO: 2925 - protein, 2116 aa, synthetic construct; identical to SEQ ID NO: 2628

SEQ ID NO: 2926 - protein, 2116 aa, synthetic construct; identical to SEQ ID NO: 2640

SEQ ID NO: 2927 - protein, 2109 aa, synthetic construct
MPAAKRVKLDGGDKKYSIGLDIGTNSVGWAVITDEYKVPSKKFKVLGNTDRHSIKKNLIGALLFDSGETAEATRLKRTARRRYTRRKNRICYLQEIFSNEMAKVDDSFFHRLEESFLVEEDKKHERHPIFGNIVDEVAYHEKYPTIYHLRKKLVDSTDKADLRLIYLALAHMIKFRGHFLIEGDLNPDNSDVDKLFIQLVQTYNQLFEENPINASGVDAKAILSARLSKSRRLENLIAQLPGEKKNGLFGNLIALSLGLTPNFKSNFDLAEDAKLQLSKDTYDDDLDNLLAQIGDQYADLFLAAKNLSDAILLSDILRVNTEITKAPLSASMIKRYDEHHQDLTLLKALVRQQLPEKYKEIFFDQSKNGYAGYIDGGASQEEFYKFIKPILEKMDGTEELLVKLNREDLLRKQRTFDNGSIPHQIHLGELHAILRRQEDFYPFLKDNREKIEKILTFRIPYYVGPLARGNSRFAWMTRKSEETITPWNFEEVVDKGASAQSFIERMTNFDKNLPNEKVLPKHSLLYEYFTVYNELTKVKYVTEGMRKPAFLSGEQKKAIVDLLFKTNRKVTVKQLKEDYFKKIECFDSVEISGVEDRFNASLGTYHDLLKIIKDKDFLDNEENEDILEDIVLTLTLFEDREMIEERLKTYAHLFDDKVMKQLKRRRYTGWGRLSRKLINGIRDKQSGKTILDFLKSDGFANRNFMQLIHDDSLTFKEDIQKAQVSGQGDSLHEHIANLAGSPAIKKGILQTVKVVDELVKVMGRHKPENIVIEMARENQTTQKGQKNSRERMKRIEEGIKELGSQILKEHPVENTQLQNEKLYLYYLQNGRDMYVDQELDINRLSDYDVDHIVPQSFLKDDSIDNKVLTRSDKARGKSDNVPSEEVVKKMKNYWRQLLNAKLITQRKFDNLTKAERGGLSELDKAGFIKRQLVETRQITKHVAQILDSRMNTKYDENDKLIREVKVITLKSKLVSDFRKDFQFYKVREINNYHHAHDAYLNAVVGTALIKKYPKLESEFVYGDYKVYDVRKMIAKSEQEIGKATAKYFFYSNIMNFFKTEITLANGEIRKRPLIETNGETGEIVWDKGRDFATVRKVLSMPQVNIVKKTEVQTGGFSKESILPKRNSDKLIARKKDWDPKKYGGFDSPTVAYSVLVVAKVEKGKSKKLKSVKELLGITIMERSSFEKNPIDFLEAKGYKEVKKDLIIKLPKYSLFELENGRKRMLASAGELQKGNELALPSKYVNFLYLASHYEKLKGSPEDNEQKQLFVEQHKHYLDEIIEQISEFSKRVILADANLDKVLSAYNKHRDKPIREQAENIIHLFTLTNLGAPAAFKYFDTTIDRKRYTSTKEVLDATLIHQSITGLYETRIDLSQLGGDGGGGGGGGTLNIEDEYRLHETSKEPDVSLGSTWLSDFPQAWAETGGMGLAVRQAPLIIPLKATSTPVSIKQYPMSQEARLGIKPHIQRLLDQGILVPCQSPWNTPLLPVKKPGTNDYRPVQDLREVNKRVEDIHPTVPNPYNLLSGLPPSHQWYTVLDLKDAFFCLRLHPTSQPLFAFEWRDPEMGISGQLTWTRLPQGFKNSPTLFNEALHRDLADFRIQHPDLILLQYVDDLLLAATSELDCQQGTRALLQTLGNLGYRASAKKAQICQKQVKYLGYLLKEGQRWLTEARKETVMGQPTPKTPRQLREFLGKAGFCRLFIPGFAEMAAPLYPLTKPGTLFNWGPDQQKAYQEIKQALLTAPALGLPDLTKPFELFVDEKQGYAKGVLTQKLGPWRRPVAYLSKKLDPVAAGWPPCLRMVAAIAVLTKDAGKLTMGQPLVILAPHAVEALVKQPPDRWLSNARMTHYQALLLDTDRVQFGPVVALNPATLLPLPEEGLQHNCLDILAEAHGTRPDLTDQPLPDADHTWYTDGSSLLQEGQRKAGAAVTTETEVIWAKALPAGTSAQRAELIALTQALKMAEGKKLNVYTDSRYAFATAHIHGEIYRRRGWLTSEGKEIKNKDEILALLKALFLPKRLSIIHCPGHQKGHSAEARGNRMADQAARKAAITETPDTSTLLIENSSPSGGSKRTADGSEFEAGKRTADGSEFEKRTADGSEFESPKKKAKVE

SEQ ID NO: 2928 - protein, 2116 aa, synthetic construct
MPAAKRVKLDGGDKKYSIGLDIGTNSVGWAVITDEYKVPSKKFKVLGNTDRHSIKKNLIGALLFDSGETAEATRLKRTARRRYTRRKNRICYLQEIFSNEMAKVDDSFFHRLEESFLVEEDKKHERHPIFGNIVDEVAYHEKYPTIYHLRKKLVDSTDKADLRLIYLALAHMIKFRGHFLIEGDLNPDNSDVDKLFIQLVQTYNQLFEENPINASGVDAKAILSARLSKSRRLENLIAQLPGEKKNGLFGNLIALSLGLTPNFKSNFDLAEDAKLQLSKDTYDDDLDNLLAQIGDQYADLFLAAKNLSDAILLSDILRVNTEITKAPLSASMIKRYDEHHQDLTLLKALVRQQLPEKYKEIFFDQSKNGYAGYIDGGASQEEFYKFIKPILEKMDGTEELLVKLNREDLLRKQRTFDNGSIPHQIHLGELHAILRRQEDFYPFLKDNREKIEKILTFRIPYYVGPLARGNSRFAWMTRKSEETITPWNFEEVVDKGASAQSFIERMTNFDKNLPNEKVLPKHSLLYEYFTVYNELTKVKYVTEGMRKPAFLSGEQKKAIVDLLFKTNRKVTVKQLKEDYFKKIECFDSVEISGVEDRFNASLGTYHDLLKIIKDKDFLDNEENEDILEDIVLTLTLFEDREMIEERLKTYAHLFDDKVMKQLKRRRYTGWGRLSRKLINGIRDKQSGKTILDFLKSDGFANRNFMQLIHDDSLTFKEDIQKAQVSGQGDSLHEHIANLAGSPAIKKGILQTVKVVDELVKVMGRHKPENIVIEMARENQTTQKGQKNSRERMKRIEEGIKELGSQILKEHPVENTQLQNEKLYLYYLQNGRDMYVDQELDINRLSDYDVDHIVPQSFLKDDSIDNKVLTRSDKARGKSDNVPSEEVVKKMKNYWRQLLNAKLITQRKFDNLTKAERGGLSELDKAGFIKRQLVETRQITKHVAQILDSRMNTKYDENDKLIREVKVITLKSKLVSDFRKDFQFYKVREINNYHHAHDAYLNAVVGTALIKKYPKLESEFVYGDYKVYDVRKMIAKSEQEIGKATAKYFFYSNIMNFFKTEITLANGEIRKRPLIETNGETGEIVWDKGRDFATVRKVLSMPQVNIVKKTEVQTGGFSKESILPKRNSDKLIARKKDWDPKKYGGFDSPTVAYSVLVVAKVEKGKSKKLKSVKELLGITIMERSSFEKNPIDFLEAKGYKEVKKDLIIKLPKYSLFELENGRKRMLASAGELQKGNELALPSKYVNFLYLASHYEKLKGSPEDNEQKQLFVEQHKHYLDEIIEQISEFSKRVILADANLDKVLSAYNKHRDKPIREQAENIIHLFTLTNLGAPAAFKYFDTTIDRKRYTSTKEVLDATLIHQSITGLYETRIDLSQLGGDGGGGGGGSEAAAKGGTLNIEDEYRLHETSKEPDVSLGSTWLSDFPQAWAETGGMGLAVRQAPLIIPLKATSTPVSIKQYPMSQEARLGIKPHIQRLLDQGILVPCQSPWNTPLLPVKKPGTNDYRPVQDLREVNKRVEDIHPTVPNPYNLLSGLPPSHQWYTVLDLKDAFFCLRLHPTSQPLFAFEWRDPEMGISGQLTWTRLPQGFKNSPTLFNEALHRDLADFRIQHPDLILLQYVDDLLLAATSELDCQQGTRALLQTLGNLGYRASAKKAQICQKQVKYLGYLLKEGQRWLTEARKETVMGQPTPKTPRQLREFLGKAGFCRLFIPGFAEMAAPLYPLTKPGTLFNWGPDQQKAYQEIKQALLTAPALGLPDLTKPFELFVDEKQGYAKGVLTQKLGPWRRPVAYLSKKLDPVAAGWPPCLRMVAAIAVLTKDAGKLTMGQPLVILAPHAVEALVKQPPDRWLSNARMTHYQALLLDTDRVQFGPVVALNPATLLPLPEEGLQHNCLDILAEAHGTRPDLTDQPLPDADHTWYTDGSSLLQEGQRKAGAAVTTETEVIWAKALPAGTSAQRAELIALTQALKMAEGKKLNVYTDSRYAFATAHIHGEIYRRRGWLTSEGKEIKNKDEILALLKALFLPKRLSIIHCPGHQKGHSAEARGNRMADQAARKAAITETPDTSTLLIENSSPSGGSKRTADGSEFEAGKRTADGSEFEKRTADGSEFESPKKKAKVE

SEQ ID NO: 2929 - protein, 2113 aa, synthetic construct; identical to SEQ ID NO: 2700

SEQ ID NO: 2930 - protein, 2114 aa, synthetic construct; identical to SEQ ID NO: 2656

SEQ ID NO: 2931 - protein, 2116 aa, synthetic construct; identical to SEQ ID NO: 2652

SEQ ID NO: 2932 - protein, 2120 aa, synthetic construct; identical to SEQ ID NO: 2623

SEQ ID NO: 2933 - protein, 2113 aa, synthetic construct; identical to SEQ ID NO: 2657

SEQ ID NO: 2934 - protein, 2111 aa, synthetic construct; identical to SEQ ID NO: 2693

SEQ ID NO: 2935 - protein, 2108 aa, synthetic construct; identical to SEQ ID NO: 2646

SEQ ID NO: 2936 - protein, 2111 aa, synthetic construct
MPAAKRVKLDGGDKKYSIGLDIGTNSVGWAVITDEYKVPSKKFKVLGNTDRHSIKKNLIGALLFDSGETAEATRLKRTARRRYTRRKNRICYLQEIFSNEMAKVDDSFFHRLEESFLVEEDKKHERHPIFGNIVDEVAYHEKYPTIYHLRKKLVDSTDKADLRLIYLALAHMIKFRGHFLIEGDLNPDNSDVDKLFIQLVQTYNQLFEENPINASGVDAKAILSARLSKSRRLENLIAQLPGEKKNGLFGNLIALSLGLTPNFKSNFDLAEDAKLQLSKDTYDDDLDNLLAQIGDQYADLFLAAKNLSDAILLSDILRVNTEITKAPLSASMIKRYDEHHQDLTLLKALVRQQLPEKYKEIFFDQSKNGYAGYIDGGASQEEFYKFIKPILEKMDGTEELLVKLNREDLLRKQRTFDNGSIPHQIHLGELHAILRRQEDFYPFLKDNREKIEKILTFRIPYYVGPLARGNSRFAWMTRKSEETITPWNFEEVVDKGASAQSFIERMTNFDKNLPNEKVLPKHSLLYEYFTVYNELTKVKYVTEGMRKPAFLSGEQKKAIVDLLFKTNRKVTVKQLKEDYFKKIECFDSVEISGVEDRFNASLGTYHDLLKIIKDKDFLDNEENEDILEDIVLTLTLFEDREMIEERLKTYAHLFDDKVMKQLKRRRYTGWGRLSRKLINGIRDKQSGKTILDFLKSDGFANRNFMQLIHDDSLTFKEDIQKAQVSGQGDSLHEHIANLAGSPAIKKGILQTVKVVDELVKVMGRHKPENIVIEMARENQTTQKGQKNSRERMKRIEEGIKELGSQILKEHPVENTQLQNEKLYLYYLQNGRDMYVDQELDINRLSDYDVDHIVPQSFLKDDSIDNKVLTRSDKARGKSDNVPSEEVVKKMKNYWRQLLNAKLITQRKFDNLTKAERGGLSELDKAGFIKRQLVETRQITKHVAQILDSRMNTKYDENDKLIREVKVITLKSKLVSDFRKDFQFYKVREINNYHHAHDAYLNAVVGTALIKKYPKLESEFVYGDYKVYDVRKMIAKSEQEIGKATAKYFFYSNIMNFFKTEITLANGEIRKRPLIETNGETGEIVWDKGRDFATVRKVLSMPQVNIVKKTEVQTGGFSKESILPKRNSDKLIARKKDWDPKKYGGFDSPTVAYSVLVVAKVEKGKSKKLKSVKELLGITIMERSSFEKNPIDFLEAKGYKEVKKDLIIKLPKYSLFELENGRKRMLASAGELQKGNELALPSKYVNFLYLASHYEKLKGSPEDNEQKQLFVEQHKHYLDEIIEQISEFSKRVILADANLDKVLSAYNKHRDKPIREQAENIIHLFTLTNLGAPAAFKYFDTTIDRKRYTSTKEVLDATLIHQSITGLYETRIDLSQLGGDGGPAPGSSGGTLNIEDEYRLHETSKEPDVSLGSTWLSDFPQAWAETGGMGLAVRQAPLIIPLKATSTPVSIKQYPMSQEARLGIKPHIQRLLDQGILVPCQSPWNTPLLPVKKPGTNDYRPVQDLREVNKRVEDIHPTVPNPYNLLSGLPPSHQWYTVLDLKDAFFCLRLHPTSQPLFAFEWRDPEMGISGQLTWTRLPQGFKNSPTLFNEALHRDLADFRIQHPDLILLQYVDDLLLAATSELDCQQGTRALLQTLGNLGYRASAKKAQICQKQVKYLGYLLKEGQRWLTEARKETVMGQPTPKTPRQLREFLGKAGFCRLFIPGFAEMAAPLYPLTKPGTLFNWGPDQQKAYQEIKQALLTAPALGLPDLTKPFELFVDEKQGYAKGVLTQKLGPWRRPVAYLSKKLDPVAAGWPPCLRMVAAIAVLTKDAGKLTMGQPLVILAPHAVEALVKQPPDRWLSNARMTHYQALLLDTDRVQFGPVVALNPATLLPLPEEGLQHNCLDILAEAHGTRPDLTDQPLPDADHTWYTDGSSLLQEGQRKAGAAVTTETEVIWAKALPAGTSAQRAELIALTQALKMAEGKKLNVYTDSRYAFATAHIHGEIYRRRGWLTSEGKEIKNKDEILALLKALFLPKRLSIIHCPGHQKGHSAEARGNRMADQAARKAAITETPDTSTLLIENSSPSGGSKRTADGSEFEAGKRTADGSEFEKRTADGSEFESPKKKAKVE

SEQ ID NO: 2937 - protein, 2120 aa, synthetic construct; identical to SEQ ID NO: 2636

SEQ ID NO: 2938 - protein, 2116 aa, synthetic construct; identical to SEQ ID NO: 2661

SEQ ID NO: 2939 - protein, 2120 aa, synthetic construct; identical to SEQ ID NO: 2680

SEQ ID NO: 2940 - protein, 2116 aa, synthetic construct
MPAAKRVKLDGGDKKYSIGLDIGTNSVGWAVITDEYKVPSKKFKVLGNTDRHSIKKNLIGALLFDSGETAEATRLKRTARRRYTRRKNRICYLQEIFSNEMAKVDDSFFHRLEESFLVEEDKKHERHPIFGNIVDEVAYHEKYPTIYHLRKKLVDSTDKADLRLIYLALAHMIKFRGHFLIEGDLNPDNSDVDKLFIQLVQTYNQLFEENPINASGVDAKAILSARLSKSRRLENLIAQLPGEKKNGLFGNLIALSLGLTPNFKSNFDLAEDAKLQLSKDTYDDDLDNLLAQIGDQYADLFLAAKNLSDAILLSDILRVNTEITKAPLSASMIKRYDEHHQDLTLLKALVRQQLPEKYKEIFFDQSKNGYAGYIDGGASQEEFYKFIKPILEKMDGTEELLVKLNREDLLRKQRTFDNGSIPHQIHLGELHAILRRQEDFYPFLKDNREKIEKILTFRIPYYVGPLARGNSRFAWMTRKSEETITPWNFEEVVDKGASAQSFIERMTNFDKNLPNEKVLPKHSLLYEYFTVYNELTKVKYVTEGMRKPAFLSGEQKKAIVDLLFKTNRKVTVKQLKEDYFKKIECFDSVEISGVEDRFNASLGTYHDLLKIIKDKDFLDNEENEDILEDIVLTLTLFEDREMIEERLKTYAHLFDDKVMKQLKRRRYTGWGRLSRKLINGIRDKQSGKTILDFLKSDGFANRNFMQLIHDDSLTFKEDIQKAQVSGQGDSLHEHIANLAGSPAIKKGILQTVKVVDELVKVMGRHKPENIVIEMARENQTTQKGQKNSRERMKRIEEGIKELGSQILKEHPVENTQLQNEKLYLYYLQNGRDMYVDQELDINRLSDYDVDHIVPQSFLKDDSIDNKVLTRSDKARGKSDNVPSEEVVKKMKNYWRQLLNAKLITQRKFDNLTKAERGGLSELDKAGFIKRQLVETRQITKHVAQILDSRMNTKYDENDKLIREVKVITLKSKLVSDFRKDFQFYKVREINNYHHAHDAYLNAVVGTALIKKYPKLESEFVYGDYKVYDVRKMIAKSEQEIGKATAKYFFYSNIMNFFKTEITLANGEIRKRPLIETNGETGEIVWDKGRDFATVRKVLSMPQVNIVKKTEVQTGGFSKESILPKRNSDKLIARKKDWDPKKYGGFDSPTVAYSVLVVAKVEKGKSKKLKSVKELLGITIMERSSFEKNPIDFLEAKGYKEVKKDLIIKLPKYSLFELENGRKRMLASAGELQKGNELALPSKYVNFLYLASHYEKLKGSPEDNEQKQLFVEQHKHYLDEIIEQISEFSKRVILADANLDKVLSAYNKHRDKPIREQAENIIHLFTLTNLGAPAAFKYFDTTIDRKRYTSTKEVLDATLIHQSITGLYETRIDLSQLGGDGGGGGPAPEAAAKGGTLNIEDEYRLHETSKEPDVSLGSTWLSDFPQAWAETGGMGLAVRQAPLIIPLKATSTPVSIKQYPMSQEARLGIKPHIQRLLDQGILVPCQSPWNTPLLPVKKPGTNDYRPVQDLREVNKRVEDIHPTVPNPYNLLSGLPPSHQWYTVLDLKDAFFCLRLHPTSQPLFAFEWRDPEMGISGQLTWTRLPQGFKNSPTLFNEALHRDLADFRIQHPDLILLQYVDDLLLAATSELDCQQGTRALLQTLGNLGYRASAKKAQICQKQVKYLGYLLKEGQRWLTEARKETVMGQPTPKTPRQLREFLGKAGFCRLFIPGFAEMAAPLYPLTKPGTLFNWGPDQQKAYQEIKQALLTAPALGLPDLTKPFELFVDEKQGYAKGVLTQKLGPWRRPVAYLSKKLDPVAAGWPPCLRMVAAIAVLTKDAGKLTMGQPLVILAPHAVEALVKQPPDRWLSNARMTHYQALLLDTDRVQFGPVVALNPATLLPLPEEGLQHNCLDILAEAHGTRPDLTDQPLPDADHTWYTDGSSLLQEGQRKAGAAVTTETEVIWAKALPAGTSAQRAELIALTQALKMAEGKKLNVYTDSRYAFATAHIHGEIYRRRGWLTSEGKEIKNKDEILALLKALFLPKRLSIIHCPGHQKGHSAEARGNRMADQAARKAAITETPDTSTLLIENSSPSGGSKRTADGSEFEAGKRTADGSEFEKRTADGSEFESPKKKAKVE

SEQ ID NO: 2941 - protein, 2120 aa, synthetic construct; identical to SEQ ID NO: 2669

SEQ ID NO: 2942 - protein, 2116 aa, synthetic construct; identical to SEQ ID NO: 2695

SEQ ID NO: 2943 - protein, 2123 aa, synthetic construct; identical to SEQ ID NO: 2612

SEQ ID NO: 2944 - protein, 2110 aa, synthetic construct; identical to SEQ ID NO: 2691

SEQ ID NO: 2945 - protein, 2113 aa, synthetic construct; identical to SEQ ID NO: 2659

SEQ ID NO: 2946 - protein, 2114 aa, synthetic construct; identical to SEQ ID NO: 2694

SEQ ID NO: 2947 - protein, 2111 aa, synthetic construct; identical to SEQ ID NO: 2682

SEQ ID NO: 2948 - protein, 2114 aa, synthetic construct; identical to SEQ ID NO: 2675

SEQ ID NO: 2949 - protein, 2116 aa, synthetic construct; identical to SEQ ID NO: 2686

SEQ ID NO: 2950 - protein, 2114 aa, synthetic construct; identical to SEQ ID NO: 2632

SEQ ID NO: 2951 - protein, 2113 aa, synthetic construct; identical to SEQ ID NO: 2625

SEQ ID NO: 2952 - protein, 2114 aa, synthetic construct; identical to SEQ ID NO: 2699

SEQ ID NO: 2953 - protein, 2113 aa, synthetic construct
MPAAKRVKLDGGDKKYSIGLDIGTNSVGWAVITDEYKVPSKKFKVLGNTDRHSIKKNLIGALLFDSGETAEATRLKRTARRRYTRRKNRICYLQEIFSNEMAKVDDSFFHRLEESFLVEEDKKHERHPIFGNIVDEVAYHEKYPTIYHLRKKLVDSTDKADLRLIYLALAHMIKFRGHFLIEGDLNPDNSDVDKLFIQLVQTYNQLFEENPINASGVDAKAILSARLSKSRRLENLIAQLPGEKKNGLFGNLIALSLGLTPNFKSNFDLAEDAKLQLSKDTYDDDLDNLLAQIGDQYADLFLAAKNLSDAILLSDILRVNTEITKAPLSASMIKRYDEHHQDLTLLKALVRQQLPEKYKEIFFDQSKNGYAGYIDGGASQEEFYKFIKPILEKMDGTEELLVKLNREDLLRKQRTFDNGSIPHQIHLGELHAILRRQEDFYPFLKDNREKIEKILTFRIPYYVGPLARGNSRFAWMTRKSEETITPWNFEEVVDKGASAQSFIERMTNFDKNLPNEKVLPKHSLLYEYFTVYNELTKVKYVTEGMRKPAFLSGEQKKAIVDLLFKTNRKVTVKQLKEDYFKKIECFDSVEISGVEDRFNASLGTYHDLLKIIKDKDFLDNEENEDILEDIVLTLTLFEDREMIEERLKTYAHLFDDKVMKQLKRRRYTGWGRLSRKLINGIRDKQSGKTILDFLKSDGFANRNFMQLIHDDSLTFKEDIQKAQVSGQGDSLHEHIANLAGSPAIKKGILQTVKVVDELVKVMGRHKPENIVIEMARENQTTQKGQKNSRERMKRIEEGIKELGSQILKEHPVENTQLQNEKLYLYYLQNGRDMYVDQELDINRLSDYDVDHIVPQSFLKDDSIDNKVLTRSDKARGKSDNVPSEEVVKKMKNYWRQLLNAKLITQRKFDNLTKAERGGLSELDKAGFIKRQLVETRQITKHVAQILDSRMNTKYDENDKLIREVKVITLKSKLVSDFRKDFQFYKVREINNYHHAHDAYLNAVVGTALIKKYPKLESEFVYGDYKVYDVRKMIAKSEQEIGKATAKYFFYSNIMNFFKTEITLANGEIRKRPLIETNGETGEIVWDKGRDFATVRKVLSMPQVNIVKKTEVQTGGFSKESILPKRNSDKLIARKKDWDPKKYGGFDSPTVAYSVLVVAKVEKGKSKKLKSVKELLGITIMERSSFEKNPIDFLEAKGYKEVKKDLIIKLPKYSLFELENGRKRMLASAGELQKGNELALPSKYVNFLYLASHYEKLKGSPEDNEQKQLFVEQHKHYLDEIIEQISEFSKRVILADANLDKVLSAYNKHRDKPIREQAENIIHLFTLTNLGAPAAFKYFDTTIDRKRYTSTKEVLDATLIHQSITGLYETRIDLSQLGGDGGGGGEAAAKGGTLNIEDEYRLHETSKEPDVSLGSTWLSDFPQAWAETGGMGLAVRQAPLIIPLKATSTPVSIKQYPMSQEARLGIKPHIQRLLDQGILVPCQSPWNTPLLPVKKPGTNDYRPVQDLREVNKRVEDIHPTVPNPYNLLSGLPPSHQWYTVLDLKDAFFCLRLHPTSQPLFAFEWRDPEMGISGQLTWTRLPQGFKNSPTLFNEALHRDLADFRIQHPDLILLQYVDDLLLAATSELDCQQGTRALLQTLGNLGYRASAKKAQICQKQVKYLGYLLKEGQRWLTEARKETVMGQPTPKTPRQLREFLGKAGFCRLFIPGFAEMAAPLYPLTKPGTLFNWGPDQQKAYQEIKQALLTAPALGLPDLTKPFELFVDEKQGYAKGVLTQKLGPWRRPVAYLSKKLDPVAAGWPPCLRMVAAIAVLTKDAGKLTMGQPLVILAPHAVEALVKQPPDRWLSNARMTHYQALLLDTDRVQFGPVVALNPATLLPLPEEGLQHNCLDILAEAHGTRPDLTDQPLPDADHTWYTDGSSLLQEGQRKAGAAVTTETEVIWAKALPAGTSAQRAELIALTQALKMAEGKKLNVYTDSRYAFATAHIHGEIYRRRGWLTSEGKEIKNKDEILALLKALFLPKRLSIIHCPGHQKGHSAEARGNRMADQAARKAAITETPDTSTLLIENSSPSGGSKRTADGSEFEAGKRTADGSEFEKRTADGSEFESPKKKAKVE

SEQ ID NO: 2954 - protein, 2114 aa, synthetic construct
MPAAKRVKLDGGDKKYSIGLDIGTNSVGWAVITDEYKVPSKKFKVLGNTDRHSIKKNLIGALLFDSGETAEATRLKRTARRRYTRRKNRICYLQEIFSNEMAKVDDSFFHRLEESFLVEEDKKHERHPIFGNIVDEVAYHEKYPTIYHLRKKLVDSTDKADLRLIYLALAHMIKFRGHFLIEGDLNPDNSDVDKLFIQLVQTYNQLFEENPINASGVDAKAILSARLSKSRRLENLIAQLPGEKKNGLFGNLIALSLGLTPNFKSNFDLAEDAKLQLSKDTYDDDLDNLLAQIGDQYADLFLAAKNLSDAILLSDILRVNTEITKAPLSASMIKRYDEHHQDLTLLKALVRQQLPEKYKEIFFDQSKNGYAGYIDGGASQEEFYKFIKPILEKMDGTEELLVKLNREDLLRKQRTFDNGSIPHQIHLGELHAILRRQEDFYPFLKDNREKIEKILTFRIPYYVGPLARGNSRFAWMTRKSEETITPWNFEEVVDKGASAQSFIERMTNFDKNLPNEKVLPKHSLLYEYFTVYNELTKVKYVTEGMRKPAFLSGEQKKAIVDLLFKTNRKVTVKQLKEDYFKKIECFDSVEISGVEDRFNASLGTYHDLLKIIKDKDFLDNEENEDILEDIVLTLTLFEDREMIEERLKTYAHLFDDKVMKQLKRRRYTGWGRLSRKLINGIRDKQSGKTILDFLKSDGFANRNFMQLIHDDSLTFKEDIQKAQVSGQGDSLHEHIANLAGSPAIKKGILQTVKVVDELVKVMGRHKPENIVIEMARENQTTQKGQKNSRERMKRIEEGIKELGSQILKEHPVENTQLQNEKLYLYYLQNGRDMYVDQELDINRLSDYDVDHIVPQSFLKDDSIDNKVLTRSDKARGKSDNVPSEEVVKKMKNYWRQLLNAKLITQRKFDNLTKAERGGLSELDKAGFIKRQLVETRQITKHVAQILDSRMNTKYDENDKLIREVKVITLKSKLVSDFRKDFQFYKVREINNYHHAHDAYLNAVVGTALIKKYPKLESEFVYGDYKVYDVRKMIAKSEQEIGKATAKYFFYSNIMNFFKTEITLANGEIRKRPLIETNGETGEIVWDKGRDFATVRKVLSMPQVNIVKKTEVQTGGFSKESILPKRNSDKLIARKKDWDPKKYGGFDSPTVAYSVLVVAKVEKGKSKKLKSVKELLGITIMERSSFEKNPIDFLEAKGYKEVKKDLIIKLPKYSLFELENGRKRMLASAGELQKGNELALPSKYVNFLYLASHYEKLKGSPEDNEQKQLFVEQHKHYLDEIIEQISEFSKRVILADANLDKVLSAYNKHRDKPIREQAENIIHLFTLTNLGAPAAFKYFDTTIDRKRYTSTKEVLDATLIHQSITGLYETRIDLSQLGGDGGGSSGGGPAPGGTLNIEDEYRLHETSKEPDVSLGSTWLSDFPQAWAETGGMGLAVRQAPLIIPLKATSTPVSIKQYPMSQEARLGIKPHIQRLLDQGILVPCQSPWNTPLLPVKKPGTNDYRPVQDLREVNKRVEDIHPTVPNPYNLLSGLPPSHQWYTVLDLKDAFFCLRLHPTSQPLFAFEWRDPEMGISGQLTWTRLPQGFKNSPTLFNEALHRDLADFRIQHPDLILLQYVDDLLLAATSELDCQQGTRALLQTLGNLGYRASAKKAQICQKQVKYLGYLLKEGQRWLTEARKETVMGQPTPKTPRQLREFLGKAGFCRLFIPGFAEMAAPLYPLTKPGTLFNWGPDQQKAYQEIKQALLTAPALGLPDLTKPFELFVDEKQGYAKGVLTQKLGPWRRPVAYLSKKLDPVAAGWPPCLRMVAAIAVLTKDAGKLTMGQPLVILAPHAVEALVKQPPDRWLSNARMTHYQALLLDTDRVQFGPVVALNPATLLPLPEEGLQHNCLDILAEAHGTRPDLTDQPLPDADHTWYTDGSSLLQEGQRKAGAAVTTETEVIWAKALPAGTSAQRAELIALTQALKMAEGKKLNVYTDSRYAFATAHIHGEIYRRRGWLTSEGKEIKNKDEILALLKALFLPKRLSIIHCPGHQKGHSAEARGNRMADQAARKAAITETPDTSTLLIENSSPSGGSKRTADGSEFEAGKRTADGSEFEKRTADGSEFESPKKKAKVE

SEQ ID NO: 2955 - protein, 2114 aa, synthetic construct; identical to SEQ ID NO: 2689

SEQ ID NO: 2956 - protein, 1999 aa, synthetic construct
MPAAKRVKLDGGDKKYSIGLDIGTNSVGWAVITDEYKVPSKKFKVLGNTDRHSIKKNLIGALLFDSGETAEATRLKRTARRRYTRRKNRICYLQEIFSNEMAKVDDSFFHRLEESFLVEEDKKHERHPIFGNIVDEVAYHEKYPTIYHLRKKLVDSTDKADLRLIYLALAHMIKFRGHFLIEGDLNPDNSDVDKLFIQLVQTYNQLFEENPINASGVDAKAILSARLSKSRRLENLIAQLPGEKKNGLFGNLIALSLGLTPNFKSNFDLAEDAKLQLSKDTYDDDLDNLLAQIGDQYADLFLAAKNLSDAILLSDILRVNTEITKAPLSASMIKRYDEHHQDLTLLKALVRQQLPEKYKEIFFDQSKNGYAGYIDGGASQEEFYKFIKPILEKMDGTEELLVKLNREDLLRKQRTFDNGSIPHQIHLGELHAILRRQEDFYPFLKDNREKIEKILTFRIPYYVGPLARGNSRFAWMTRKSEETITPWNFEEVVDKGASAQSFIERMTNFDKNLPNEKVLPKHSLLYEYFTVYNELTKVKYVTEGMRKPAFLSGEQKKAIVDLLFKTNRKVTVKQLKEDYFKKIECFDSVEISGVEDRFNASLGTYHDLLKIIKDKDFLDNEENEDILEDIVLTLTLFEDREMIEERLKTYAHLFDDKVMKQLKRRRYTGWGRLSRKLINGIRDKQSGKTILDFLKSDGFANRNFMQLIHDDSLTFKEDIQKAQVSGQGDSLHEHIANLAGSPAIKKGILQTVKVVDELVKVMGRHKPENIVIEMARENQTTQKGQKNSRERMKRIEEGIKELGSQILKEHPVENTQLQNEKLYLYYLQNGRDMYVDQELDINRLSDYDVDHIVPQSFLKDDSIDNKVLTRSDKARGKSDNVPSEEVVKKMKNYWRQLLNAKLITQRKFDNLTKAERGGLSELDKAGFIKRQLVETRQITKHVAQILDSRMNTKYDENDKLIREVKVITLKSKLVSDFRKDFQFYKVREINNYHHAHDAYLNAVVGTALIKKYPKLESEFVYGDYKVYDVRKMIAKSEQEIGKATAKYFFYSNIMNFFKTEITLANGEIRKRPLIETNGETGEIVWDKGRDFATVRKVLSMPQVNIVKKTEVQTGGFSKESILPKRNSDKLIARKKDWDPKKYGGFDSPTVAYSVLVVAKVEKGKSKKLKSVKELLGITIMERSSFEKNPIDFLEAKGYKEVKKDLIIKLPKYSLFELENGRKRMLASAGELQKGNELALPSKYVNFLYLASHYEKLKGSPEDNEQKQLFVEQHKHYLDEIIEQISEFSKRVILADANLDKVLSAYNKHRDKPIREQAENIIHLFTLTNLGAPAAFKYFDTTIDRKRYTSTKEVLDATLIHQSITGLYETRIDLSQLGGDGGGGGGSSGGSGGGVLDAPPSHIGLEHLPPPPEVPQFPLNLERLQALQDLVHRSLEAGYISPWDGPGNNPVFPVRKPNGAWRFVHDLRVTNALTKPIPALSPGPPDLTAIPTHLPHIICLDLKDAFFQIPVEDRFRSYFAFTLPTPGGLQPHRRFAWRVLPQGFINSPALFQRALQEPLRQVSAAFSQSLLVSYMDDILYVSPTEEQRLQCYQTMAAHLRDLGFQVASEKTRQTPSPVPFLGQMVHERMVTYQSLPTLQISSPISLHQLQTVLGDLQWVSRGTPTTRRPLQLLYSSLKPIDDPRAIIHLSPEQQQGIAELRQALSHNARSRYNEQEPLLAYVHLTRAGSTLVLFQKGAQFPLAYFQTPLTDNQASPWGLLLLLGCQYLQAQALSSYAKTILKYYHNLPKTSLDNWIQSSEDPRVQELLQLWPQISSQGIQPPGPWKTLVTRAEVFLTPQFSPEPIPAALCLFSDGAARRGAYCLWKDHLLDFQAVPAPESAQKGELAGLLAGLAAAPPEPLNIWVDSKYLYSLLRTLVLGAWLQPDPVPSYALLYKSLLRHPAIFVGHVRSHSSASHPIASLNNYVDQLAGKRTADGSEFEKRTADGSEFESPKKKAKVE

SEQ ID NO: 2957 - protein, 2131 aa, synthetic construct
MPAAKRVKLDGGDKKYSIGLDIGTNSVGWAVITDEYKVPSKKFKVLGNTDRHSIKKNLIGALLFDSGETAEATRLKRTARRRYTRRKNRICYLQEIFSNEMAKVDDSFFHRLEESFLVEEDKKHERHPIFGNIVDEVAYHEKYPTIYHLRKKLVDSTDKADLRLIYLALAHMIKFRGHFLIEGDLNPDNSDVDKLFIQLVQTYNQLFEENPINASGVDAKAILSARLSKSRRLENLIAQLPGEKKNGLFGNLIALSLGLTPNFKSNFDLAEDAKLQLSKDTYDDDLDNLLAQIGDQYADLFLAAKNLSDAILLSDILRVNTEITKAPLSASMIKRYDEHHQDLTLLKALVRQQLPEKYKEIFFDQSKNGYAGYIDGGASQEEFYKFIKPILEKMDGTEELLVKLNREDLLRKQRTFDNGSIPHQIHLGELHAILRRQEDFYPFLKDNREKIEKILTFRIPYYVGPLARGNSRFAWMTRKSEETITPWNFEEVVDKGASAQSFIERMTNFDKNLPNEKVLPKHSLLYEYFTVYNELTKVKYVTEGMRKPAFLSGEQKKAIVDLLFKTNRKVTVKQLKEDYFKKIECFDSVEISGVEDRFNASLGTYHDLLKIIKDKDFLDNEENEDILEDIVLTLTLFEDREMIEERLKTYAHLFDDKVMKQLKRRRYTGWGRLSRKLINGIRDKQSGKTILDFLKSDGFANRNFMQLIHDDSLTFKEDIQKAQVSGQGDSLHEHIANLAGSPAIKKGILQTVKVVDELVKVMGRHKPENIVIEMARENQTTQKGQKNSRERMKRIEEGIKELGSQILKEHPVENTQLQNEKLYLYYLQNGRDMYVDQELDINRLSDYDVDHIVPQSFLKDDSIDNKVLTRSDKARGKSDNVPSEEVVKKMKNYWRQLLNAKLITQRKFDNLTKAERGGLSELDKAGFIKRQLVETRQITKHVAQILDSRMNTKYDENDKLIREVKVITLKSKLVSDFRKDFQFYKVREINNYHHAHDAYLNAVVGTALIKKYPKLESEFVYGDYKVYDVRKMIAKSEQEIGKATAKYFFYSNIMNFFKTEITLANGEIRKRPLIETNGETGEIVWDKGRDFATVRKVLSMPQVNIVKKTEVQTGGFSKESILPKRNSDKLIARKKDWDPKKYGGFDSPTVAYSVLVVAKVEKGKSKKLKSVKELLGITIMERSSFEKNPIDFLEAKGYKEVKKDLIIKLPKYSLFELENGRKRMLASAGELQKGNELALPSKYVNFLYLASHYEKLKGSPEDNEQKQLFVEQHKHYLDEIIEQISEFSKRVILADANLDKVLSAYNKHRDKPIREQAENIIHLFTLTNLGAPAAFKYFDTTIDRKRYTSTKEVLDATLIHQSITGLYETRIDLSQLGGDGGAEAAAKEAAAKEAAAKEAAAKALEAEAAAKEAAAKEAAAKEAAAKAGGTLNIEDEHRLHETSKEPDVSLGSTWLSDFPQAWAETGGMGLAVRQAPLIIPLKATSTPVSIKQYPMSQEARLGIKPHIQRLLDQGILVPCQSPWNTPLLPVKKPGTNDYRPVQDLREVNKRVEDIHPTVPNPYNLLSGLPPSHQWYTVLDLKDAFFCLRLHPTSQPLFAFEWRDPEMGISGQLTWTRLPQGFKNSPTLFDEALHRDLADFRIQHPDLILLQYVDDLLLAATSELDCQQGTRALLQTLGNLGYRASAKKAQICQKQVKYLGYLLKEGQRWLTEARKETVMGQPTPKTPRQLREFLGTAGFCRLWIPGFAEMAAPLYPLTKTGTLFNWGPDQQKAYQEIKQALLTAPALGLPDLTKPFELFVDEKQGYAKGVLTQKLGPWRRPVAYLSKKLDPVAAGWPPCLRMVAAIAVLTKDAGKLTMGQPLVILAPHAVEALVKQPPDRWLSNARMTHYQALLLDTDRVQFGPVVALNPATLLPLPEEGLQHNCLDILAEAHGTRPDLTDQPLPDADHTWYTDGSSLLQEGQRKAGAAVTTETEVIWAKALPAGTSAQRAELIALTQALKMAEGKKLNVYTDSRYAFATAHIHGEIYRRRGLLTSEGKEIKNKDEILALLKALFLPKRLSIIHCPGHQKGHSAEARGNRMADQAARKAAITETPDTSTLLAGKRTADGSEFEKRTADGSEFESPKKKAKVE

SEQ ID NO: 2958 - protein, 2101 aa, synthetic construct
MPAAKRVKLDGGDKKYSIGLDIGTNSVGWAVITDEYKVPSKKFKVLGNTDRHSIKKNLIGALLFDSGETAEATRLKRTARRRYTRRKNRICYLQEIFSNEMAKVDDSFFHRLEESFLVEEDKKHERHPIFGNIVDEVAYHEKYPTIYHLRKKLVDSTDKADLRLIYLALAHMIKFRGHFLIEGDLNPDNSDVDKLFIQLVQTYNQLFEENPINASGVDAKAILSARLSKSRRLENLIAQLPGEKKNGLFGNLIALSLGLTPNFKSNFDLAEDAKLQLSKDTYDDDLDNLLAQIGDQYADLFLAAKNLSDAILLSDILRVNTEITKAPLSASMIKRYDEHHQDLTLLKALVRQQLPEKYKEIFFDQSKNGYAGYIDGGASQEEFYKFIKPILEKMDGTEELLVKLNREDLLRKQRTFDNGSIPHQIHLGELHAILRRQEDFYPFLKDNREKIEKILTFRIPYYVGPLARGNSRFAWMTRKSEETITPWNFEEVVDKGASAQSFIERMTNFDKNLPNEKVLPKHSLLYEYFTVYNELTKVKYVTEGMRKPAFLSGEQKKAIVDLLFKTNRKVTVKQLKEDYFKKIECFDSVEISGVEDRFNASLGTYHDLLKIIKDKDFLDNEENEDILEDIVLTLTLFEDREMIEERLKTYAHLFDDKVMKQLKRRRYTGWGRLSRKLINGIRDKQSGKTILDFLKSDGFANRNFMQLIHDDSLTFKEDIQKAQVSGQGDSLHEHIANLAGSPAIKKGILQTVKVVDELVKVMGRHKPENIVIEMARENQTTQKGQKNSRERMKRIEEGIKELGSQILKEHPVENTQLQNEKLYLYYLQNGRDMYVDQELDINRLSDYDVDHIVPQSFLKDDSIDNKVLTRSDKARGKSDNVPSEEVVKKMKNYWRQLLNAKLITQRKFDNLTKAERGGLSELDKAGFIKRQLVETRQITKHVAQILDSRMNTKYDENDKLIREVKVITLKSKLVSDFRKDFQFYKVREINNYHHAHDAYLNAVVGTALIKKYPKLESEFVYGDYKVYDVRKMIAKSEQEIGKATAKYFFYSNIMNFFKTEITLANGEIRKRPLIETNGETGEIVWDKGRDFATVRKVLSMPQVNIVKKTEVQTGGFSKESILPKRNSDKLIARKKDWDPKKYGGFDSPTVAYSVLVVAKVEKGKSKKLKSVKELLGITIMERSSFEKNPIDFLEAKGYKEVKKDLIIKLPKYSLFELENGRKRMLASAGELQKGNELALPSKYVNFLYLASHYEKLKGSPEDNEQKQLFVEQHKHYLDEIIEQISEFSKRVILADANLDKVLSAYNKHRDKPIREQAENIIHLFTLTNLGAPAAFKYFDTTIDRKRYTSTKEVLDATLIHQSITGLYETRIDLSQLGGDGGSGSETPGTSESATPESGGTLNIEDEHRLHETSKEPDVSLGSTWLSDFPQAWAETGGMGLAVRQAPLIIPLKATSTPVSIKQYPMSQEARLGIKPHIQRLLDQGILVPCQSPWNTPLLPVKKPGTNDYRPVQDLREVNKRVEDIHPTVPNPYNLLSGLPPSHQWYTVLDLKDAFFCLRLHPTSQPLFAFEWRDPEMGISGQLTWTRLPQGFKNSPTLFDEALHRDLADFRIQHPDLILLQYVDDLLLAATSELDCQQGTRALLQTLGNLGYRASAKKAQICQKQVKYLGYLLKEGQRWLTEARKETVMGQPTPKTPRQLREFLGTAGFCRLWIPGFAEMAAPLYPLTKTGTLFNWGPDQQKAYQEIKQALLTAPALGLPDLTKPFELFVDEKQGYAKGVLTQKLGPWRRPVAYLSKKLDPVAAGWPPCLRMVAAIAVLTKDAGKLTMGQPLVILAPHAVEALVKQPPDRWLSNARMTHYQALLLDTDRVQFGPVVALNPATLLPLPEEGLQHNCLDILAEAHGTRPDLTDQPLPDADHTWYTDGSSLLQEGQRKAGAAVTTETEVIWAKALPAGTSAQRAELIALTQALKMAEGKKLNVYTDSRYAFATAHIHGEIYRRRGLLTSEGKEIKNKDEILALLKALFLPKRLSIIHCPGHQKGHSAEARGNRMADQAARKAAITETPDTSTLLAGKRTADGSEFEKRTADGSEFESPKKKAKVE

SEQ ID NO: 2959 - protein, 2096 aa, synthetic construct
MPAAKRVKLDGGDKKYSIGLDIGTNSVGWAVITDEYKVPSKKFKVLGNTDRHSIKKNLIGALLFDSGETAEATRLKRTARRRYTRRKNRICYLQEIFSNEMAKVDDSFFHRLEESFLVEEDKKHERHPIFGNIVDEVAYHEKYPTIYHLRKKLVDSTDKADLRLIYLALAHMIKFRGHFLIEGDLNPDNSDVDKLFIQLVQTYNQLFEENPINASGVDAKAILSARLSKSRRLENLIAQLPGEKKNGLFGNLIALSLGLTPNFKSNFDLAEDAKLQLSKDTYDDDLDNLLAQIGDQYADLFLAAKNLSDAILLSDILRVNTEITKAPLSASMIKRYDEHHQDLTLLKALVRQQLPEKYKEIFFDQSKNGYAGYIDGGASQEEFYKFIKPILEKMDGTEELLVKLNREDLLRKQRTFDNGSIPHQIHLGELHAILRRQEDFYPFLKDNREKIEKILTFRIPYYVGPLARGNSRFAWMTRKSEETITPWNFEEVVDKGASAQSFIERMTNFDKNLPNEKVLPKHSLLYEYFTVYNELTKVKYVTEGMRKPAFLSGEQKKAIVDLLFKTNRKVTVKQLKEDYFKKIECFDSVEISGVEDRFNASLGTYHDLLKIIKDKDFLDNEENEDILEDIVLTLTLFEDREMIEERLKTYAHLFDDKVMKQLKRRRYTGWGRLSRKLINGIRDKQSGKTILDFLKSDGFANRNFMQLIHDDSLTFKEDIQKAQVSGQGDSLHEHIANLAGSPAIKKGILQTVKVVDELVKVMGRHKPENIVIEMARENQTTQKGQKNSRERMKRIEEGIKELGSQILKEHPVENTQLQNEKLYLYYLQNGRDMYVDQELDINRLSDYDVDHIVPQSFLKDDSIDNKVLTRSDKARGKSDNVPSEEVVKKMKNYWRQLLNAKLITQRKFDNLTKAERGGLSELDKAGFIKRQLVETRQITKHVAQILDSRMNTKYDENDKLIREVKVITLKSKLVSDFRKDFQFYKVREINNYHHAHDAYLNAVVGTALIKKYPKLESEFVYGDYKVYDVRKMIAKSEQEIGKATAKYFFYSNIMNFFKTEITLANGEIRKRPLIETNGETGEIVWDKGRDFATVRKVLSMPQVNIVKKTEVQTGGFSKESILPKRNSDKLIARKKDWDPKKYGGFDSPTVAYSVLVVAKVEKGKSKKLKSVKELLGITIMERSSFEKNPIDFLEAKGYKEVKKDLIIKLPKYSLFELENGRKRMLASAGELQKGNELALPSKYVNFLYLASHYEKLKGSPEDNEQKQLFVEQHKHYLDEIIEQISEFSKRVILADANLDKVLSAYNKHRDKPIREQAENIIHLFTLTNLGAPAAFKYFDTTIDRKRYTSTKEVLDATLIHQSITGLYETRIDLSQLGGDGGEAAAKGGSGGGGGTLNIEDEHRLHETSKEPDVSLGSTWLSDFPQAWAETGGMGLAVRQAPLIIPLKATSTPVSIKQYPMSQEARLGIKPHIQRLLDQGILVPCQSPWNTPLLPVKKPGTNDYRPVQDLREVNKRVEDIHPTVPNPYNLLSGLPPSHQWYTVLDLKDAFFCLRLHPTSQPLFAFEWRDPEMGISGQLTWTRLPQGFKNSPTLFDEALHRDLADFRIQHPDLILLQYVDDLLLAATSELDCQQGTRALLQTLGNLGYRASAKKAQICQKQVKYLGYLLKEGQRWLTEARKETVMGQPTPKTPRQLREFLGTAGFCRLWIPGFAEMAAPLYPLTKTGTLFNWGPDQQKAYQEIKQALLTAPALGLPDLTKPFELFVDEKQGYAKGVLTQKLGPWRRPVAYLSKKLDPVAAGWPPCLRMVAAIAVLTKDAGKLTMGQPLVILAPHAVEALVKQPPDRWLSNARMTHYQALLLDTDRVQFGPVVALNPATLLPLPEEGLQHNCLDILAEAHGTRPDLTDQPLPDADHTWYTDGSSLLQEGQRKAGAAVTTETEVIWAKALPAGTSAQRAELIALTQALKMAEGKKLNVYTDSRYAFATAHIHGEIYRRRGLLTSEGKEIKNKDEILALLKALFLPKRLSIIHCPGHQKGHSAEARGNRMADQAARKAAITETPDTSTLLAGKRTADGSEFEKRTADGSEFESPKKKAKVE

SEQ ID NO: 2960 - protein, 2096 aa, synthetic construct
MPAAKRVKLDGGDKKYSIGLDIGTNSVGWAVITDEYKVPSKKFKVLGNTDRHSIKKNLIGALLFDSGETAEATRLKRTARRRYTRRKNRICYLQEIFSNEMAKVDDSFFHRLEESFLVEEDKKHERHPIFGNIVDEVAYHEKYPTIYHLRKKLVDSTDKADLRLIYLALAHMIKFRGHFLIEGDLNPDNSDVDKLFIQLVQTYNQLFEENPINASGVDAKAILSARLSKSRRLENLIAQLPGEKKNGLFGNLIALSLGLTPNFKSNFDLAEDAKLQLSKDTYDDDLDNLLAQIGDQYADLFLAAKNLSDAILLSDILRVNTEITKAPLSASMIKRYDEHHQDLTLLKALVRQQLPEKYKEIFFDQSKNGYAGYIDGGASQEEFYKFIKPILEKMDGTEELLVKLNREDLLRKQRTFDNGSIPHQIHLGELHAILRRQEDFYPFLKDNREKIEKILTFRIPYYVGPLARGNSRFAWMTRKSEETITPWNFEEVVDKGASAQSFIERMTNFDKNLPNEKVLPKHSLLYEYFTVYNELTKVKYVTEGMRKPAFLSGEQKKAIVDLLFKTNRKVTVKQLKEDYFKKIECFDSVEISGVEDRFNASLGTYHDLLKIIKDKDFLDNEENEDILEDIVLTLTLFEDREMIEERLKTYAHLFDDKVMKQLKRRRYTGWGRLSRKLINGIRDKQSGKTILDFLKSDGFANRNFMQLIHDDSLTFKEDIQKAQVSGQGDSLHEHIANLAGSPAIKKGILQTVKVVDELVKVMGRHKPENIVIEMARENQTTQKGQKNSRERMKRIEEGIKELGSQILKEHPVENTQLQNEKLYLYYLQNGRDMYVDQELDINRLSDYDVDHIVPQSFLKDDSIDNKVLTRSDKARGKSDNVPSEEVVKKMKNYWRQLLNAKLITQRKFDNLTKAERGGLSELDKAGFIKRQLVETRQITKHVAQILDSRMNTKYDENDKLIREVKVITLKSKLVSDFRKDFQFYKVREINNYHHAHDAYLNAVVGTALIKKYPKLESEFVYGDYKVYDVRKMIAKSEQEIGKATAKYFFYSNIMNFFKTEITLANGEIRKRPLIETNGETGEIVWDKGRDFATVRKVLSMPQVNIVKKTEVQTGGFSKESILPKRNSDKLIARKKDWDPKKYGGFDSPTVAYSVLVVAKVEKGKSKKLKSVKELLGITIMERSSFEKNPIDFLEAKGYKEVKKDLIIKLPKYSLFELENGRKRMLASAGELQKGNELALPSKYVNFLYLASHYEKLKGSPEDNEQKQLFVEQHKHYLDEIIEQISEFSKRVILADANLDKVLSAYNKHRDKPIREQAENIIHLFTLTNLGAPAAFKYFDTTIDRKRYTSTKEVLDATLIHQSITGLYETRIDLSQLGGDGGGGSEAAAKGSSGGTLNIEDEHRLHETSKEPDVSLGSTWLSDFPQAWAETGGMGLAVRQAPLIIPLKATSTPVSIKQYPMSQEARLGIKPHIQRLLDQGILVPCQSPWNTPLLPVKKPGTNDYRPVQDLREVNKRVEDIHPTVPNPYNLLSGLPPSHQWYTVLDLKDAFFCLRLHPTSQPLFAFEWRDPEMGISGQLTWTRLPQGFKNSPTLFDEALHRDLADFRIQHPDLILLQYVDDLLLAATSELDCQQGTRALLQTLGNLGYRASAKKAQICQKQVKYLGYLLKEGQRWLTEARKETVMGQPTPKTPRQLREFLGTAGFCRLWIPGFAEMAAPLYPLTKTGTLFNWGPDQQKAYQEIKQALLTAPALGLPDLTKPFELFVDEKQGYAKGVLTQKLGPWRRPVAYLSKKLDPVAAGWPPCLRMVAAIAVLTKDAGKLTMGQPLVILAPHAVEALVKQPPDRWLSNARMTHYQALLLDTDRVQFGPVVALNPATLLPLPEEGLQHNCLDILAEAHGTRPDLTDQPLPDADHTWYTDGSSLLQEGQRKAGAAVTTETEVIWAKALPAGTSAQRAELIALTQALKMAEGKKLNVYTDSRYAFATAHIHGEIYRRRGLLTSEGKEIKNKDEILALLKALFLPKRLSIIHCPGHQKGHSAEARGNRMADQAARKAAITETPDTSTLLAGKRTADGSEFEKRTADGSEFESPKKKAKVE

SEQ ID NO: 2961 - protein, 2096 aa, synthetic construct
MPAAKRVKLDGGDKKYSIGLDIGTNSVGWAVITDEYKVPSKKFKVLGNTDRHSIKKNLIGALLFDSGETAEATRLKRTARRRYTRRKNRICYLQEIFSNEMAKVDDSFFHRLEESFLVEEDKKHERHPIFGNIVDEVAYHEKYPTIYHLRKKLVDSTDKADLRLIYLALAHMIKFRGHFLIEGDLNPDNSDVDKLFIQLVQTYNQLFEENPINASGVDAKAILSARLSKSRRLENLIAQLPGEKKNGLFGNLIALSLGLTPNFKSNFDLAEDAKLQLSKDTYDDDLDNLLAQIGDQYADLFLAAKNLSDAILLSDILRVNTEITKAPLSASMIKRYDEHHQDLTLLKALVRQQLPEKYKEIFFDQSKNGYAGYIDGGASQEEFYKFIKPILEKMDGTEELLVKLNREDLLRKQRTFDNGSIPHQIHLGELHAILRRQEDFYPFLKDNREKIEKILTFRIPYYVGPLARGNSRFAWMTRKSEETITPWNFEEVVDKGASAQSFIERMTNFDKNLPNEKVLPKHSLLYEYFTVYNELTKVKYVTEGMRKPAFLSGEQKKAIVDLLFKTNRKVTVKQLKEDYFKKIECFDSVEISGVEDRFNASLGTYHDLLKIIKDKDFLDNEENEDILEDIVLTLTLFEDREMIEERLKTYAHLFDDKVMKQLKRRRYTGWGRLSRKLINGIRDKQSGKTILDFLKSDGFANRNFMQLIHDDSLTFKEDIQKAQVSGQGDSLHEHIANLAGSPAIKKGILQTVKVVDELVKVMGRHKPENIVIEMARENQTTQKGQKNSRERMKRIEEGIKELGSQILKEHPVENTQLQNEKLYLYYLQNGRDMYVDQELDINRLSDYDVDHIVPQSFLKDDSIDNKVLTRSDKARGKSDNVPSEEVVKKMKNYWRQLLNAKLITQRKFDNLTKAERGGLSELDKAGFIKRQLVETRQITKHVAQILDSRMNTKYDENDKLIREVKVITLKSKLVSDFRKDFQFYKVREINNYHHAHDAYLNAVVGTALIKKYPKLESEFVYGDYKVYDVRKMIAKSEQEIGKATAKYFFYSNIMNFFKTEITLANGEIRKRPLIETNGETGEIVWDKGRDFATVRKVLSMPQVNIVKKTEVQTGGFSKESILPKRNSDKLIARKKDWDPKKYGGFDSPTVAYSVLVVAKVEKGKSKKLKSVKELLGITIMERSSFEKNPIDFLEAKGYKEVKKDLIIKLPKYSLFELENGRKRMLASAGELQKGNELALPSKYVNFLYLASHYEKLKGSPEDNEQKQLFVEQHKHYLDEIIEQISEFSKRVILADANLDKVLSAYNKHRDKPIREQAENIIHLFTLTNLGAPAAFKYFDTTIDRKRYTSTKEVLDATLIHQSITGLYETRIDLSQLGGDGGPAPGGSEAAAKGGTLNIEDEHRLHETSKEPDVSLGSTWLSDFPQAWAETGGMGLAVRQAPLIIPLKATSTPVSIKQYPMSQEARLGIKPHIQRLLDQGILVPCQSPWNTPLLPVKKPGTNDYRPVQDLREVNKRVEDIHPTVPNPYNLLSGLPPSHQWYTVLDLKDAFFCLRLHPTSQPLFAFEWRDPEMGISGQLTWTRLPQGFKNSPTLFDEALHRDLADFRIQHPDLILLQYVDDLLLAATSELDCQQGTRALLQTLGNLGYRASAKKAQICQKQVKYLGYLLKEGQRWLTEARKETVMGQPTPKTPRQLREFLGTAGFCRLWIPGFAEMAAPLYPLTKTGTLFNWGPDQQKAYQEIKQALLTAPALGLPDLTKPFELFVDEKQGYAKGVLTQKLGPWRRPVAYLSKKLDPVAAGWPPCLRMVAAIAVLTKDAGKLTMGQPLVILAPHAVEALVKQPPDRWLSNARMTHYQALLLDTDRVQFGPVVALNPATLLPLPEEGLQHNCLDILAEAHGTRPDLTDQPLPDADHTWYTDGSSLLQEGQRKAGAAVTTETEVIWAKALPAGTSAQRAELIALTQALKMAEGKKLNVYTDSRYAFATAHIHGEIYRRRGLLTSEGKEIKNKDEILALLKALFLPKRLSIIHCPGHQKGHSAEARGNRMADQAARKAAITETPDTSTLLAGKRTADGSEFEKRTADGSEFESPKKKAKVE

SEQ ID NO: 2962 - protein, 2093 aa, synthetic construct
MPAAKRVKLDGGDKKYSIGLDIGTNSVGWAVITDEYKVPSKKFKVLGNTDRHSIKKNLIGALLFDSGETAEATRLKRTARRRYTRRKNRICYLQEIFSNEMAKVDDSFFHRLEESFLVEEDKKHERHPIFGNIVDEVAYHEKYPTIYHLRKKLVDSTDKADLRLIYLALAHMIKFRGHFLIEGDLNPDNSDVDKLFIQLVQTYNQLFEENPINASGVDAKAILSARLSKSRRLENLIAQLPGEKKNGLFGNLIALSLGLTPNFKSNFDLAEDAKLQLSKDTYDDDLDNLLAQIGDQYADLFLAAKNLSDAILLSDILRVNTEITKAPLSASMIKRYDEHHQDLTLLKALVRQQLPEKYKEIFFDQSKNGYAGYIDGGASQEEFYKFIKPILEKMDGTEELLVKLNREDLLRKQRTFDNGSIPHQIHLGELHAILRRQEDFYPFLKDNREKIEKILTFRIPYYVGPLARGNSRFAWMTRKSEETITPWNFEEVVDKGASAQSFIERMTNFDKNLPNEKVLPKHSLLYEYFTVYNELTKVKYVTEGMRKPAFLSGEQKKAIVDLLFKTNRKVTVKQLKEDYFKKIECFDSVEISGVEDRFNASLGTYHDLLKIIKDKDFLDNEENEDILEDIVLTLTLFEDREMIEERLKTYAHLFDDKVMKQLKRRRYTGWGRLSRKLINGIRDKQSGKTILDFLKSDGFANRNFMQLIHDDSLTFKEDIQKAQVSGQGDSLHEHIANLAGSPAIKKGILQTVKVVDELVKVMGRHKPENIVIEMARENQTTQKGQKNSRERMKRIEEGIKELGSQILKEHPVENTQLQNEKLYLYYLQNGRDMYVDQELDINRLSDYDVDHIVPQSFLKDDSIDNKVLTRSDKARGKSDNVPSEEVVKKMKNYWRQLLNAKLITQRKFDNLTKAERGGLSELDKAGFIKRQLVETRQITKHVAQILDSRMNTKYDENDKLIREVKVITLKSKLVSDFRKDFQFYKVREINNYHHAHDAYLNAVVGTALIKKYPKLESEFVYGDYKVYDVRKMIAKSEQEIGKATAKYFFYSNIMNFFKTEITLANGEIRKRPLIETNGETGEIVWDKGRDFATVRKVLSMPQVNIVKKTEVQTGGFSKESILPKRNSDKLIARKKDWDPKKYGGFDSPTVAYSVLVVAKVEKGKSKKLKSVKELLGITIMERSSFEKNPIDFLEAKGYKEVKKDLIIKLPKYSLFELENGRKRMLASAGELQKGNELALPSKYVNFLYLASHYEKLKGSPEDNEQKQLFVEQHKHYLDEIIEQISEFSKRVILADANLDKVLSAYNKHRDKPIREQAENIIHLFTLTNLGAPAAFKYFDTTIDRKRYTSTKEVLDATLIHQSITGLYETRIDLSQLGGDGGGGSEAAAKGGTLNIEDEHRLHETSKEPDVSLGSTWLSDFPQAWAETGGMGLAVRQAPLIIPLKATSTPVSIKQYPMSQEARLGIKPHIQRLLDQGILVPCQSPWNTPLLPVKKPGTNDYRPVQDLREVNKRVEDIHPTVPNPYNLLSGLPPSHQWYTVLDLKDAFFCLRLHPTSQPLFAFEWRDPEMGISGQLTWTRLPQGFKNSPTLFDEALHRDLADFRIQHPDLILLQYVDDLLLAATSELDCQQGTRALLQTLGNLGYRASAKKAQICQKQVKYLGYLLKEGQRWLTEARKETVMGQPTPKTPRQLREFLGTAGFCRLWIPGFAEMAAPLYPLTKTGTLFNWGPDQQKAYQEIKQALLTAPALGLPDLTKPFELFVDEKQGYAKGVLTQKLGPWRRPVAYLSKKLDPVAAGWPPCLRMVAAIAVLTKDAGKLTMGQPLVILAPHAVEALVKQPPDRWLSNARMTHYQALLLDTDRVQFGPVVALNPATLLPLPEEGLQHNCLDILAEAHGTRPDLTDQPLPDADHTWYTDGSSLLQEGQRKAGAAVTTETEVIWAKALPAGTSAQRAELIALTQALKMAEGKKLNVYTDSRYAFATAHIHGEIYRRRGLLTSEGKEIKNKDEILALLKALFLPKRLSIIHCPGHQKGHSAEARGNRMADQAARKAAITETPDTSTLLAGKRTADGSEFEKRTADGSEFESPKKKAKVE

SEQ ID NO: 2963 - protein, 2088 aa, synthetic construct
MPAAKRVKLDGGDKKYSIGLDIGTNSVGWAVITDEYKVPSKKFKVLGNTDRHSIKKNLIGALLFDSGETAEATRLKRTARRRYTRRKNRICYLQEIFSNEMAKVDDSFFHRLEESFLVEEDKKHERHPIFGNIVDEVAYHEKYPTIYHLRKKLVDSTDKADLRLIYLALAHMIKFRGHFLIEGDLNPDNSDVDKLFIQLVQTYNQLFEENPINASGVDAKAILSARLSKSRRLENLIAQLPGEKKNGLFGNLIALSLGLTPNFKSNFDLAEDAKLQLSKDTYDDDLDNLLAQIGDQYADLFLAAKNLSDAILLSDILRVNTEITKAPLSASMIKRYDEHHQDLTLLKALVRQQLPEKYKEIFFDQSKNGYAGYIDGGASQEEFYKFIKPILEKMDGTEELLVKLNREDLLRKQRTFDNGSIPHQIHLGELHAILRRQEDFYPFLKDNREKIEKILTFRIPYYVGPLARGNSRFAWMTRKSEETITPWNFEEVVDKGASAQSFIERMTNFDKNLPNEKVLPKHSLLYEYFTVYNELTKVKYVTEGMRKPAFLSGEQKKAIVDLLFKTNRKVTVKQLKEDYFKKIECFDSVEISGVEDRFNASLGTYHDLLKIIKDKDFLDNEENEDILEDIVLTLTLFEDREMIEERLKTYAHLFDDKVMKQLKRRRYTGWGRLSRKLINGIRDKQSGKTILDFLKSDGFANRNFMQLIHDDSLTFKEDIQKAQVSGQGDSLHEHIANLAGSPAIKKGILQTVKVVDELVKVMGRHKPENIVIEMARENQTTQKGQKNSRERMKRIEEGIKELGSQILKEHPVENTQLQNEKLYLYYLQNGRDMYVDQELDINRLSDYDVDHIVPQSFLKDDSIDNKVLTRSDKARGKSDNVPSEEVVKKMKNYWRQLLNAKLITQRKFDNLTKAERGGLSELDKAGFIKRQLVETRQITKHVAQILDSRMNTKYDENDKLIREVKVITLKSKLVSDFRKDFQFYKVREINNYHHAHDAYLNAVVGTALIKKYPKLESEFVYGDYKVYDVRKMIAKSEQEIGKATAKYFFYSNIMNFFKTEITLANGEIRKRPLIETNGETGEIVWDKGRDFATVRKVLSMPQVNIVKKTEVQTGGFSKESILPKRNSDKLIARKKDWDPKKYGGFDSPTVAYSVLVVAKVEKGKSKKLKSVKELLGITIMERSSFEKNPIDFLEAKGYKEVKKDLIIKLPKYSLFELENGRKRMLASAGELQKGNELALPSKYVNFLYLASHYEKLKGSPEDNEQKQLFVEQHKHYLDEIIEQISEFSKRVILADANLDKVLSAYNKHRDKPIREQAENIIHLFTLTNLGAPAAFKYFDTTIDRKRYTSTKEVLDATLIHQSITGLYETRIDLSQLGGDGGGSSGGTLNIEDEHRLHETSKEPDVSLGSTWLSDFPQAWAETGGMGLAVRQAPLIIPLKATSTPVSIKQYPMSQEARLGIKPHIQRLLDQGILVPCQSPWNTPLLPVKKPGTNDYRPVQDLREVNKRVEDIHPTVPNPYNLLSGLPPSHQWYTVLDLKDAFFCLRLHPTSQPLFAFEWRDPEMGISGQLTWTRLPQGFKNSPTLFDEALHRDLADFRIQHPDLILLQYVDDLLLAATSELDCQQGTRALLQTLGNLGYRASAKKAQICQKQVKYLGYLLKEGQRWLTEARKETVMGQPTPKTPRQLREFLGTAGFCRLWIPGFAEMAAPLYPLTKTGTLFNWGPDQQKAYQEIKQALLTAPALGLPDLTKPFELFVDEKQGYAKGVLTQKLGPWRRPVAYLSKKLDPVAAGWPPCLRMVAAIAVLTKDAGKLTMGQPLVILAPHAVEALVKQPPDRWLSNARMTHYQALLLDTDRVQFGPVVALNPATLLPLPEEGLQHNCLDILAEAHGTRPDLTDQPLPDADHTWYTDGSSLLQEGQRKAGAAVTTETEVIWAKALPAGTSAQRAELIALTQALKMAEGKKLNVYTDSRYAFATAHIHGEIYRRRGLLTSEGKEIKNKDEILALLKALFLPKRLSIIHCPGHQKGHSAEARGNRMADQAARKAAITETPDTSTLLAGKRTADGSEFEKRTADGSEFESPKKKAKVE

SEQ ID NO: 2964 - protein, 2094 aa, synthetic construct
MPAAKRVKLDGGDKKYSIGLDIGTNSVGWAVITDEYKVPSKKFKVLGNTDRHSIKKNLIGALLFDSGETAEATRLKRTARRRYTRRKNRICYLQEIFSNEMAKVDDSFFHRLEESFLVEEDKKHERHPIFGNIVDEVAYHEKYPTIYHLRKKLVDSTDKADLRLIYLALAHMIKFRGHFLIEGDLNPDNSDVDKLFIQLVQTYNQLFEENPINASGVDAKAILSARLSKSRRLENLIAQLPGEKKNGLFGNLIALSLGLTPNFKSNFDLAEDAKLQLSKDTYDDDLDNLLAQIGDQYADLFLAAKNLSDAILLSDILRVNTEITKAPLSASMIKRYDEHHQDLTLLKALVRQQLPEKYKEIFFDQSKNGYAGYIDGGASQEEFYKFIKPILEKMDGTEELLVKLNREDLLRKQRTFDNGSIPHQIHLGELHAILRRQEDFYPFLKDNREKIEKILTFRIPYYVGPLARGNSRFAWMTRKSEETITPWNFEEVVDKGASAQSFIERMTNFDKNLPNEKVLPKHSLLYEYFTVYNELTKVKYVTEGMRKPAFLSGEQKKAIVDLLFKTNRKVTVKQLKEDYFKKIECFDSVEISGVEDRFNASLGTYHDLLKIIKDKDFLDNEENEDILEDIVLTLTLFEDREMIEERLKTYAHLFDDKVMKQLKRRRYTGWGRLSRKLINGIRDKQSGKTILDFLKSDGFANRNFMQLIHDDSLTFKEDIQKAQVSGQGDSLHEHIANLAGSPAIKKGILQTVKVVDELVKVMGRHKPENIVIEMARENQTTQKGQKNSRERMKRIEEGIKELGSQILKEHPVENTQLQNEKLYLYYLQNGRDMYVDQELDINRLSDYDVDHIVPQSFLKDDSIDNKVLTRSDKARGKSDNVPSEEVVKKMKNYWRQLLNAKLITQRKFDNLTKAERGGLSELDKAGFIKRQLVETRQITKHVAQILDSRMNTKYDENDKLIREVKVITLKSKLVSDFRKDFQFYKVREINNYHHAHDAYLNAVVGTALIKKYPKLESEFVYGDYKVYDVRKMIAKSEQEIGKATAKYFFYSNIMNFFKTEITLANGEIRKRPLIETNGETGEIVWDKGRDFATVRKVLSMPQVNIVKKTEVQTGGFSKESILPKRNSDKLIARKKDWDPKKYGGFDSPTVAYSVLVVAKVEKGKSKKLKSVKELLGITIMERSSFEKNPIDFLEAKGYKEVKKDLIIKLPKYSLFELENGRKRMLASAGELQKGNELALPSKYVNFLYLASHYEKLKGSPEDNEQKQLFVEQHKHYLDEIIEQISEFSKRVILADANLDKVLSAYNKHRDKPIREQAENIIHLFTLTNLGAPAAFKYFDTTIDRKRYTSTKEVLDATLIHQSITGLYETRIDLSQLGGDGGGGSGSSPAPGGTLNIEDEHRLHETSKEPDVSLGSTWLSDFPQAWAETGGMGLAVRQAPLIIPLKATSTPVSIKQYPMSQEARLGIKPHIQRLLDQGILVPCQSPWNTPLLPVKKPGTNDYRPVQDLREVNKRVEDIHPTVPNPYNLLSGLPPSHQWYTVLDLKDAFFCLRLHPTSQPLFAFEWRDPEMGISGQLTWTRLPQGFKNSPTLFDEALHRDLADFRIQHPDLILLQYVDDLLLAATSELDCQQGTRALLQTLGNLGYRASAKKAQICQKQVKYLGYLLKEGQRWLTEARKETVMGQPTPKTPRQLREFLGTAGFCRLWIPGFAEMAAPLYPLTKTGTLFNWGPDQQKAYQEIKQALLTAPALGLPDLTKPFELFVDEKQGYAKGVLTQKLGPWRRPVAYLSKKLDPVAAGWPPCLRMVAAIAVLTKDAGKLTMGQPLVILAPHAVEALVKQPPDRWLSNARMTHYQALLLDTDRVQFGPVVALNPATLLPLPEEGLQHNCLDILAEAHGTRPDLTDQPLPDADHTWYTDGSSLLQEGQRKAGAAVTTETEVIWAKALPAGTSAQRAELIALTQALKMAEGKKLNVYTDSRYAFATAHIHGEIYRRRGLLTSEGKEIKNKDEILALLKALFLPKRLSIIHCPGHQKGHSAEARGNRMADQAARKAAITETPDTSTLLAGKRTADGSEFEKRTADGSEFESPKKKAKVE

SEQ ID NO: 2965 - protein, 2103 aa, synthetic construct
MPAAKRVKLDGGDKKYSIGLDIGTNSVGWAVITDEYKVPSKKFKVLGNTDRHSIKKNLIGALLFDSGETAEATRLKRTARRRYTRRKNRICYLQEIFSNEMAKVDDSFFHRLEESFLVEEDKKHERHPIFGNIVDEVAYHEKYPTIYHLRKKLVDSTDKADLRLIYLALAHMIKFRGHFLIEGDLNPDNSDVDKLFIQLVQTYNQLFEENPINASGVDAKAILSARLSKSRRLENLIAQLPGEKKNGLFGNLIALSLGLTPNFKSNFDLAEDAKLQLSKDTYDDDLDNLLAQIGDQYADLFLAAKNLSDAILLSDILRVNTEITKAPLSASMIKRYDEHHQDLTLLKALVRQQLPEKYKEIFFDQSKNGYAGYIDGGASQEEFYKFIKPILEKMDGTEELLVKLNREDLLRKQRTFDNGSIPHQIHLGELHAILRRQEDFYPFLKDNREKIEKILTFRIPYYVGPLARGNSRFAWMTRKSEETITPWNFEEVVDKGASAQSFIERMTNFDKNLPNEKVLPKHSLLYEYFTVYNELTKVKYVTEGMRKPAFLSGEQKKAIVDLLFKTNRKVTVKQLKEDYFKKIECFDSVEISGVEDRFNASLGTYHDLLKIIKDKDFLDNEENEDILEDIVLTLTLFEDREMIEERLKTYAHLFDDKVMKQLKRRRYTGWGRLSRKLINGIRDKQSGKTILDFLKSDGFANRNFMQLIHDDSLTFKEDIQKAQVSGQGDSLHEHIANLAGSPAIKKGILQTVKVVDELVKVMGRHKPENIVIEMARENQTTQKGQKNSRERMKRIEEGIKELGSQILKEHPVENTQLQNEKLYLYYLQNGRDMYVDQELDINRLSDYDVDHIVPQSFLKDDSIDNKVLTRSDKARGKSDNVPSEEVVKKMKNYWRQLLNAKLITQRKFDNLTKAERGGLSELDKAGFIKRQLVETRQITKHVAQILDSRMNTKYDENDKLIREVKVITLKSKLVSDFRKDFQFYKVREINNYHHAHDAYLNAVVGTALIKKYPKLESEFVYGDYKVYDVRKMIAKSEQEIGKATAKYFFYSNIMNFFKTEITLANGEIRKRPLIETNGETGEIVWDKGRDFATVRKVLSMPQVNIVKKTEVQTGGFSKESILPKRNSDKLIARKKDWDPKKYGGFDSPTVAYSVLVVAKVEKGKSKKLKSVKELLGITIMERSSFEKNPIDFLEAKGYKEVKKDLIIKLPKYSLFELENGRKRMLASAGELQKGNELALPSKYVNFLYLASHYEKLKGSPEDNEQKQLFVEQHKHYLDEIIEQISEFSKRVILADANLDKVLSAYNKHRDKPIREQAENIIHLFTLTNLGAPAAFKYFDTTIDRKRYTSTKEVLDATLIHQSITGLYETRIDLSQLGGDGGGSSGSSGSSGSSGSSGSSGGTLNIEDEHRLHETSKEPDVSLGSTWLSDFPQAWAETGGMGLAVRQAPLIIPLKATSTPVSIKQYPMSQEARLGIKPHIQRLLDQGILVPCQSPWNTPLLPVKKPGTNDYRPVQDLREVNKRVEDIHPTVPNPYNLLSGLPPSHQWYTVLDLKDAFFCLRLHPTSQPLFAFEWRDPEMGISGQLTWTRLPQGFKNSPTLFNEALHRDLADFRIQHPDLILLQYVDDLLLAATSELDCQQGTRALLQTLGNLGYRASAKKAQICQKQVKYLGYLLKEGQRWLTEARKETVMGQPTPKTPRQLREFLGTAGFCRLWIPGFAEMAAPLYPLTKPGTLFNWGPDQQKAYQEIKQALLTAPALGLPDLTKPFELFVDEKQGYAKGVLTQKLGPWRRPVAYLSKKLDPVAAGWPPCLRMVAAIAVLTKDAGKLTMGQPLVILAPHAVEALVKQPPDRWLSNARMTHYQALLLDTDRVQFGPVVALNPATLLPLPEEGLQHNCLDILAEAHGTRPDLTDQPLPDADHTWYTDGSSLLQEGQRKAGAAVTTETEVIWAKALPAGTSAQRAELIALTQALKMAEGKKLNVYTDSRYAFATAHIHGEIYRRRGWLTSEGKEIKNKDEILALLKALFLPKRLSIIHCPGHQKGHSAEARGNRMADQAARKAAITETPDTSTLLAGKRTADGSEFEKRTADGSEFESPKKKAKVE

SEQ ID NO: 2966 - protein, 2096 aa, synthetic construct; identical to SEQ ID NO: 2713

SEQ ID NO: 2967 - protein, 2091 aa, synthetic construct
MPAAKRVKLDGGDKKYSIGLDIGTNSVGWAVITDEYKVPSKKFKVLGNTDRHSIKKNLIGALLFDSGETAEATRLKRTARRRYTRRKNRICYLQEIFSNEMAKVDDSFFHRLEESFLVEEDKKHERHPIFGNIVDEVAYHEKYPTIYHLRKKLVDSTDKADLRLIYLALAHMIKFRGHFLIEGDLNPDNSDVDKLFIQLVQTYNQLFEENPINASGVDAKAILSARLSKSRRLENLIAQLPGEKKNGLFGNLIALSLGLTPNFKSNFDLAEDAKLQLSKDTYDDDLDNLLAQIGDQYADLFLAAKNLSDAILLSDILRVNTEITKAPLSASMIKRYDEHHQDLTLLKALVRQQLPEKYKEIFFDQSKNGYAGYIDGGASQEEFYKFIKPILEKMDGTEELLVKLNREDLLRKQRTFDNGSIPHQIHLGELHAILRRQEDFYPFLKDNREKIEKILTFRIPYYVGPLARGNSRFAWMTRKSEETITPWNFEEVVDKGASAQSFIERMTNFDKNLPNEKVLPKHSLLYEYFTVYNELTKVKYVTEGMRKPAFLSGEQKKAIVDLLFKTNRKVTVKQLKEDYFKKIECFDSVEISGVEDRFNASLGTYHDLLKIIKDKDFLDNEENEDILEDIVLTLTLFEDREMIEERLKTYAHLFDDKVMKQLKRRRYTGWGRLSRKLINGIRDKQSGKTILDFLKSDGFANRNFMQLIHDDSLTFKEDIQKAQVSGQGDSLHEHIANLAGSPAIKKGILQTVKVVDELVKVMGRHKPENIVIEMARENQTTQKGQKNSRERMKRIEEGIKELGSQILKEHPVENTQLQNEKLYLYYLQNGRDMYVDQELDINRLSDYDVDHIVPQSFLKDDSIDNKVLTRSDKARGKSDNVPSEEVVKKMKNYWRQLLNAKLITQRKFDNLTKAERGGLSELDKAGFIKRQLVETRQITKHVAQILDSRMNTKYDENDKLIREVKVITLKSKLVSDFRKDFQFYKVREINNYHHAHDAYLNAVVGTALIKKYPKLESEFVYGDYKVYDVRKMIAKSEQEIGKATAKYFFYSNIMNFFKTEITLANGEIRKRPLIETNGETGEIVWDKGRDFATVRKVLSMPQVNIVKKTEVQTGGFSKESILPKRNSDKLIARKKDWDPKKYGGFDSPTVAYSVLVVAKVEKGKSKKLKSVKELLGITIMERSSFEKNPIDFLEAKGYKEVKKDLIIKLPKYSLFELENGRKRMLASAGELQKGNELALPSKYVNFLYLASHYEKLKGSPEDNEQKQLFVEQHKHYLDEIIEQISEFSKRVILADANLDKVLSAYNKHRDKPIREQAENIIHLFTLTNLGAPAAFKYFDTTIDRKRYTSTKEVLDATLIHQSITGLYETRIDLSQLGGDGGGSSGGGGGTLNIEDEHRLHETSKEPDVSLGSTWLSDFPQAWAETGGMGLAVRQAPLIIPLKATSTPVSIKQYPMSQEARLGIKPHIQRLLDQGILVPCQSPWNTPLLPVKKPGTNDYRPVQDLREVNKRVEDIHPTVPNPYNLLSGLPPSHQWYTVLDLKDAFFCLRLHPTSQPLFAFEWRDPEMGISGQLTWTRLPQGFKNSPTLFNEALHRDLADFRIQHPDLILLQYVDDLLLAATSELDCQQGTRALLQTLGNLGYRASAKKAQICQKQVKYLGYLLKEGQRWLTEARKETVMGQPTPKTPRQLREFLGTAGFCRLWIPGFAEMAAPLYPLTKPGTLFNWGPDQQKAYQEIKQALLTAPALGLPDLTKPFELFVDEKQGYAKGVLTQKLGPWRRPVAYLSKKLDPVAAGWPPCLRMVAAIAVLTKDAGKLTMGQPLVILAPHAVEALVKQPPDRWLSNARMTHYQALLLDTDRVQFGPVVALNPATLLPLPEEGLQHNCLDILAEAHGTRPDLTDQPLPDADHTWYTDGSSLLQEGQRKAGAAVTTETEVIWAKALPAGTSAQRAELIALTQALKMAEGKKLNVYTDSRYAFATAHIHGEIYRRRGWLTSEGKEIKNKDEILALLKALFLPKRLSIIHCPGHQKGHSAEARGNRMADQAARKAAITETPDTSTLLAGKRTADGSEFEKRTADGSEFESPKKKAKVE

SEQ ID NO: 2968 - protein, 2105 aa, synthetic construct; identical to SEQ ID NO: 2771

SEQ ID NO: 2969 - protein, 2096 aa, synthetic construct; identical to SEQ ID NO: 2753

SEQ ID NO: 2970 - protein, 2096 aa, synthetic construct
MPAAKRVKLDGGDKKYSIGLDIGTNSVGWAVITDEYKVPSKKFKVLGNTDRHSIKKNLIGALLFDSGETAEATRLKRTARRRYTRRKNRICYLQEIFSNEMAKVDDSFFHRLEESFLVEEDKKHERHPIFGNIVDEVAYHEKYPTIYHLRKKLVDSTDKADLRLIYLALAHMIKFRGHFLIEGDLNPDNSDVDKLFIQLVQTYNQLFEENPINASGVDAKAILSARLSKSRRLENLIAQLPGEKKNGLFGNLIALSLGLTPNFKSNFDLAEDAKLQLSKDTYDDDLDNLLAQIGDQYADLFLAAKNLSDAILLSDILRVNTEITKAPLSASMIKRYDEHHQDLTLLKALVRQQLPEKYKEIFFDQSKNGYAGYIDGGASQEEFYKFIKPILEKMDGTEELLVKLNREDLLRKQRTFDNGSIPHQIHLGELHAILRRQEDFYPFLKDNREKIEKILTFRIPYYVGPLARGNSRFAWMTRKSEETITPWNFEEVVDKGASAQSFIERMTNFDKNLPNEKVLPKHSLLYEYFTVYNELTKVKYVTEGMRKPAFLSGEQKKAIVDLLFKTNRKVTVKQLKEDYFKKIECFDSVEISGVEDRFNASLGTYHDLLKIIKDKDFLDNEENEDILEDIVLTLTLFEDREMIEERLKTYAHLFDDKVMKQLKRRRYTGWGRLSRKLINGIRDKQSGKTILDFLKSDGFANRNFMQLIHDDSLTFKEDIQKAQVSGQGDSLHEHIANLAGSPAIKKGILQTVKVVDELVKVMGRHKPENIVIEMARENQTTQKGQKNSRERMKRIEEGIKELGSQILKEHPVENTQLQNEKLYLYYLQNGRDMYVDQELDINRLSDYDVDHIVPQSFLKDDSIDNKVLTRSDKARGKSDNVPSEEVVKKMKNYWRQLLNAKLITQRKFDNLTKAERGGLSELDKAGFIKRQLVETRQITKHVAQILDSRMNTKYDENDKLIREVKVITLKSKLVSDFRKDFQFYKVREINNYHHAHDAYLNAVVGTALIKKYPKLESEFVYGDYKVYDVRKMIAKSEQEIGKATAKYFFYSNIMNFFKTEITLANGEIRKRPLIETNGETGEIVWDKGRDFATVRKVLSMPQVNIVKKTEVQTGGFSKESILPKRNSDKLIARKKDWDPKKYGGFDSPTVAYSVLVVAKVEKGKSKKLKSVKELLGITIMERSSFEKNPIDFLEAKGYKEVKKDLIIKLPKYSLFELENGRKRMLASAGELQKGNELALPSKYVNFLYLASHYEKLKGSPEDNEQKQLFVEQHKHYLDEIIEQISEFSKRVILADANLDKVLSAYNKHRDKPIREQAENIIHLFTLTNLGAPAAFKYFDTTIDRKRYTSTKEVLDATLIHQSITGLYETRIDLSQLGGDGGPAPAPAPAPAPGGTLNIEDEHRLHETSKEPDVSLGSTWLSDFPQAWAETGGMGLAVRQAPLIIPLKATSTPVSIKQYPMSQEARLGIKPHIQRLLDQGILVPCQSPWNTPLLPVKKPGTNDYRPVQDLREVNKRVEDIHPTVPNPYNLLSGLPPSHQWYTVLDLKDAFFCLRLHPTSQPLFAFEWRDPEMGISGQLTWTRLPQGFKNSPTLFNEALHRDLADFRIQHPDLILLQYVDDLLLAATSELDCQQGTRALLQTLGNLGYRASAKKAQICQKQVKYLGYLLKEGQRWLTEARKETVMGQPTPKTPRQLREFLGTAGFCRLWIPGFAEMAAPLYPLTKPGTLFNWGPDQQKAYQEIKQALLTAPALGLPDLTKPFELFVDEKQGYAKGVLTQKLGPWRRPVAYLSKKLDPVAAGWPPCLRMVAAIAVLTKDAGKLTMGQPLVILAPHAVEALVKQPPDRWLSNARMTHYQALLLDTDRVQFGPVVALNPATLLPLPEEGLQHNCLDILAEAHGTRPDLTDQPLPDADHTWYTDGSSLLQEGQRKAGAAVTTETEVIWAKALPAGTSAQRAELIALTQALKMAEGKKLNVYTDSRYAFATAHIHGEIYRRRGWLTSEGKEIKNKDEILALLKALFLPKRLSIIHCPGHQKGHSAEARGNRMADQAARKAAITETPDTSTLLAGKRTADGSEFEKRTADGSEFESPKKKAKVE

SEQ ID NO: 2971 - protein, 2093 aa, synthetic construct; identical to SEQ ID NO: 2724

SEQ ID NO: 2972 - protein, 2131 aa, synthetic construct; identical to SEQ ID NO: 2711

SEQ ID NO: 2973 - protein, 2088 aa, synthetic construct
MPAAKRVKLDGGDKKYSIGLDIGTNSVGWAVITDEYKVPSKKFKVLGNTDRHSIKKNLIGALLFDSGETAEATRLKRTARRRYTRRKNRICYLQEIFSNEMAKVDDSFFHRLEESFLVEEDKKHERHPIFGNIVDEVAYHEKYPTIYHLRKKLVDSTDKADLRLIYLALAHMIKFRGHFLIEGDLNPDNSDVDKLFIQLVQTYNQLFEENPINASGVDAKAILSARLSKSRRLENLIAQLPGEKKNGLFGNLIALSLGLTPNFKSNFDLAEDAKLQLSKDTYDDDLDNLLAQIGDQYADLFLAAKNLSDAILLSDILRVNTEITKAPLSASMIKRYDEHHQDLTLLKALVRQQLPEKYKEIFFDQSKNGYAGYIDGGASQEEFYKFIKPILEKMDGTEELLVKLNREDLLRKQRTFDNGSIPHQIHLGELHAILRRQEDFYPFLKDNREKIEKILTFRIPYYVGPLARGNSRFAWMTRKSEETITPWNFEEVVDKGASAQSFIERMTNFDKNLPNEKVLPKHSLLYEYFTVYNELTKVKYVTEGMRKPAFLSGEQKKAIVDLLFKTNRKVTVKQLKEDYFKKIECFDSVEISGVEDRFNASLGTYHDLLKIIKDKDFLDNEENEDILEDIVLTLTLFEDREMIEERLKTYAHLFDDKVMKQLKRRRYTGWGRLSRKLINGIRDKQSGKTILDFLKSDGFANRNFMQLIHDDSLTFKEDIQKAQVSGQGDSLHEHIANLAGSPAIKKGILQTVKVVDELVKVMGRHKPENIVIEMARENQTTQKGQKNSRERMKRIEEGIKELGSQILKEHPVENTQLQNEKLYLYYLQNGRDMYVDQELDINRLSDYDVDHIVPQSFLKDDSIDNKVLTRSDKARGKSDNVPSEEVVKKMKNYWRQLLNAKLITQRKFDNLTKAERGGLSELDKAGFIKRQLVETRQITKHVAQILDSRMNTKYDENDKLIREVKVITLKSKLVSDFRKDFQFYKVREINNYHHAHDAYLNAVVGTALIKKYPKLESEFVYGDYKVYDVRKMIAKSEQEIGKATAKYFFYSNIMNFFKTEITLANGEIRKRPLIETNGETGEIVWDKGRDFATVRKVLSMPQVNIVKKTEVQTGGFSKESILPKRNSDKLIARKKDWDPKKYGGFDSPTVAYSVLVVAKVEKGKSKKLKSVKELLGITIMERSSFEKNPIDFLEAKGYKEVKKDLIIKLPKYSLFELENGRKRMLASAGELQKGNELALPSKYVNFLYLASHYEKLKGSPEDNEQKQLFVEQHKHYLDEIIEQISEFSKRVILADANLDKVLSAYNKHRDKPIREQAENIIHLFTLTNLGAPAAFKYFDTTIDRKRYTSTKEVLDATLIHQSITGLYETRIDLSQLGGDGGPAPGGTLNIEDEHRLHETSKEPDVSLGSTWLSDFPQAWAETGGMGLAVRQAPLIIPLKATSTPVSIKQYPMSQEARLGIKPHIQRLLDQGILVPCQSPWNTPLLPVKKPGTNDYRPVQDLREVNKRVEDIHPTVPNPYNLLSGLPPSHQWYTVLDLKDAFFCLRLHPTSQPLFAFEWRDPEMGISGQLTWTRLPQGFKNSPTLFNEALHRDLADFRIQHPDLILLQYVDDLLLAATSELDCQQGTRALLQTLGNLGYRASAKKAQICQKQVKYLGYLLKEGQRWLTEARKETVMGQPTPKTPRQLREFLGTAGFCRLWIPGFAEMAAPLYPLTKPGTLFNWGPDQQKAYQEIKQALLTAPALGLPDLTKPFELFVDEKQGYAKGVLTQKLGPWRRPVAYLSKKLDPVAAGWPPCLRMVAAIAVLTKDAGKLTMGQPLVILAPHAVEALVKQPPDRWLSNARMTHYQALLLDTDRVQFGPVVALNPATLLPLPEEGLQHNCLDILAEAHGTRPDLTDQPLPDADHTWYTDGSSLLQEGQRKAGAAVTTETEVIWAKALPAGTSAQRAELIALTQALKMAEGKKLNVYTDSRYAFATAHIHGEIYRRRGWLTSEGKEIKNKDEILALLKALFLPKRLSIIHCPGHQKGHSAEARGNRMADQAARKAAITETPDTSTLLAGKRTADGSEFEKRTADGSEFESPKKKAKVE

SEQ ID NO: 2974 - protein, 2098 aa, synthetic construct
MPAAKRVKLDGGDKKYSIGLDIGTNSVGWAVITDEYKVPSKKFKVLGNTDRHSIKKNLIGALLFDSGETAEATRLKRTARRRYTRRKNRICYLQEIFSNEMAKVDDSFFHRLEESFLVEEDKKHERHPIFGNIVDEVAYHEKYPTIYHLRKKLVDSTDKADLRLIYLALAHMIKFRGHFLIEGDLNPDNSDVDKLFIQLVQTYNQLFEENPINASGVDAKAILSARLSKSRRLENLIAQLPGEKKNGLFGNLIALSLGLTPNFKSNFDLAEDAKLQLSKDTYDDDLDNLLAQIGDQYADLFLAAKNLSDAILLSDILRVNTEITKAPLSASMIKRYDEHHQDLTLLKALVRQQLPEKYKEIFFDQSKNGYAGYIDGGASQEEFYKFIKPILEKMDGTEELLVKLNREDLLRKQRTFDNGSIPHQIHLGELHAILRRQEDFYPFLKDNREKIEKILTFRIPYYVGPLARGNSRFAWMTRKSEETITPWNFEEVVDKGASAQSFIERMTNFDKNLPNEKVLPKHSLLYEYFTVYNELTKVKYVTEGMRKPAFLSGEQKKAIVDLLFKTNRKVTVKQLKEDYFKKIECFDSVEISGVEDRFNASLGTYHDLLKIIKDKDFLDNEENEDILEDIVLTLTLFEDREMIEERLKTYAHLFDDKVMKQLKRRRYTGWGRLSRKLINGIRDKQSGKTILDFLKSDGFANRNFMQLIHDDSLTFKEDIQKAQVSGQGDSLHEHIANLAGSPAIKKGILQTVKVVDELVKVMGRHKPENIVIEMARENQTTQKGQKNSRERMKRIEEGIKELGSQILKEHPVENTQLQNEKLYLYYLQNGRDMYVDQELDINRLSDYDVDHIVPQSFLKDDSIDNKVLTRSDKARGKSDNVPSEEVVKKMKNYWRQLLNAKLITQRKFDNLTKAERGGLSELDKAGFIKRQLVETRQITKHVAQILDSRMNTKYDENDKLIREVKVITLKSKLVSDFRKDFQFYKVREINNYHHAHDAYLNAVVGTALIKKYPKLESEFVYGDYKVYDVRKMIAKSEQEIGKATAKYFFYSNIMNFFKTEITLANGEIRKRPLIETNGETGEIVWDKGRDFATVRKVLSMPQVNIVKKTEVQTGGFSKESILPKRNSDKLIARKKDWDPKKYGGFDSPTVAYSVLVVAKVEKGKSKKLKSVKELLGITIMERSSFEKNPIDFLEAKGYKEVKKDLIIKLPKYSLFELENGRKRMLASAGELQKGNELALPSKYVNFLYLASHYEKLKGSPEDNEQKQLFVEQHKHYLDEIIEQISEFSKRVILADANLDKVLSAYNKHRDKPIREQAENIIHLFTLTNLGAPAAFKYFDTTIDRKRYTSTKEVLDATLIHQSITGLYETRIDLSQLGGDGGPAPAPAPAPAPAPGGTLNIEDEHRLHETSKEPDVSLGSTWLSDFPQAWAETGGMGLAVRQAPLIIPLKATSTPVSIKQYPMSQEARLGIKPHIQRLLDQGILVPCQSPWNTPLLPVKKPGTNDYRPVQDLREVNKRVEDIHPTVPNPYNLLSGLPPSHQWYTVLDLKDAFFCLRLHPTSQPLFAFEWRDPEMGISGQLTWTRLPQGFKNSPTLFNEALHRDLADFRIQHPDLILLQYVDDLLLAATSELDCQQGTRALLQTLGNLGYRASAKKAQICQKQVKYLGYLLKEGQRWLTEARKETVMGQPTPKTPRQLREFLGTAGFCRLWIPGFAEMAAPLYPLTKPGTLFNWGPDQQKAYQEIKQALLTAPALGLPDLTKPFELFVDEKQGYAKGVLTQKLGPWRRPVAYLSKKLDPVAAGWPPCLRMVAAIAVLTKDAGKLTMGQPLVILAPHAVEALVKQPPDRWLSNARMTHYQALLLDTDRVQFGPVVALNPATLLPLPEEGLQHNCLDILAEAHGTRPDLTDQPLPDADHTWYTDGSSLLQEGQRKAGAAVTTETEVIWAKALPAGTSAQRAELIALTQALKMAEGKKLNVYTDSRYAFATAHIHGEIYRRRGWLTSEGKEIKNKDEILALLKALFLPKRLSIIHCPGHQKGHSAEARGNRMADQAARKAAITETPDTSTLLAGKRTADGSEFEKRTADGSEFESPKKKAKVE

SEQ ID NO: 2975 - protein, 2091 aa, synthetic construct
MPAAKRVKLDGGDKKYSIGLDIGTNSVGWAVITDEYKVPSKKFKVLGNTDRHSIKKNLIGALLFDSGETAEATRLKRTARRRYTRRKNRICYLQEIFSNEMAKVDDSFFHRLEESFLVEEDKKHERHPIFGNIVDEVAYHEKYPTIYHLRKKLVDSTDKADLRLIYLALAHMIKFRGHFLIEGDLNPDNSDVDKLFIQLVQTYNQLFEENPINASGVDAKAILSARLSKSRRLENLIAQLPGEKKNGLFGNLIALSLGLTPNFKSNFDLAEDAKLQLSKDTYDDDLDNLLAQIGDQYADLFLAAKNLSDAILLSDILRVNTEITKAPLSASMIKRYDEHHQDLTLLKALVRQQLPEKYKEIFFDQSKNGYAGYIDGGASQEEFYKFIKPILEKMDGTEELLVKLNREDLLRKQRTFDNGSIPHQIHLGELHAILRRQEDFYPFLKDNREKIEKILTFRIPYYVGPLARGNSRFAWMTRKSEETITPWNFEEVVDKGASAQSFIERMTNFDKNLPNEKVLPKHSLLYEYFTVYNELTKVKYVTEGMRKPAFLSGEQKKAIVDLLFKTNRKVTVKQLKEDYFKKIECFDSVEISGVEDRFNASLGTYHDLLKIIKDKDFLDNEENEDILEDIVLTLTLFEDREMIEERLKTYAHLFDDKVMKQLKRRRYTGWGRLSRKLINGIRDKQSGKTILDFLKSDGFANRNFMQLIHDDSLTFKEDIQKAQVSGQGDSLHEHIANLAGSPAIKKGILQTVKVVDELVKVMGRHKPENIVIEMARENQTTQKGQKNSRERMKRIEEGIKELGSQILKEHPVENTQLQNEKLYLYYLQNGRDMYVDQELDINRLSDYDVDHIVPQSFLKDDSIDNKVLTRSDKARGKSDNVPSEEVVKKMKNYWRQLLNAKLITQRKFDNLTKAERGGLSELDKAGFIKRQLVETRQITKHVAQILDSRMNTKYDENDKLIREVKVITLKSKLVSDFRKDFQFYKVREINNYHHAHDAYLNAVVGTALIKKYPKLESEFVYGDYKVYDVRKMIAKSEQEIGKATAKYFFYSNIMNFFKTEITLANGEIRKRPLIETNGETGEIVWDKGRDFATVRKVLSMPQVNIVKKTEVQTGGFSKESILPKRNSDKLIARKKDWDPKKYGGFDSPTVAYSVLVVAKVEKGKSKKLKSVKELLGITIMERSSFEKNPIDFLEAKGYKEVKKDLIIKLPKYSLFELENGRKRMLASAGELQKGNELALPSKYVNFLYLASHYEKLKGSPEDNEQKQLFVEQHKHYLDEIIEQISEFSKRVILADANLDKVLSAYNKHRDKPIREQAENIIHLFTLTNLGAPAAFKYFDTTIDRKRYTSTKEVLDATLIHQSITGLYETRIDLSQLGGDGGGGGGGGGGTLNIEDEHRLHETSKEPDVSLGSTWLSDFPQAWAETGGMGLAVRQAPLIIPLKATSTPVSIKQYPMSQEARLGIKPHIQRLLDQGILVPCQSPWNTPLLPVKKPGTNDYRPVQDLREVNKRVEDIHPTVPNPYNLLSGLPPSHQWYTVLDLKDAFFCLRLHPTSQPLFAFEWRDPEMGISGQLTWTRLPQGFKNSPTLFNEALHRDLADFRIQHPDLILLQYVDDLLLAATSELDCQQGTRALLQTLGNLGYRASAKKAQICQKQVKYLGYLLKEGQRWLTEARKETVMGQPTPKTPRQLREFLGTAGFCRLWIPGFAEMAAPLYPLTKPGTLFNWGPDQQKAYQEIKQALLTAPALGLPDLTKPFELFVDEKQGYAKGVLTQKLGPWRRPVAYLSKKLDPVAAGWPPCLRMVAAIAVLTKDAGKLTMGQPLVILAPHAVEALVKQPPDRWLSNARMTHYQALLLDTDRVQFGPVVALNPATLLPLPEEGLQHNCLDILAEAHGTRPDLTDQPLPDADHTWYTDGSSLLQEGQRKAGAAVTTETEVIWAKALPAGTSAQRAELIALTQALKMAEGKKLNVYTDSRYAFATAHIHGEIYRRRGWLTSEGKEIKNKDEILALLKALFLPKRLSIIHCPGHQKGHSAEARGNRMADQAARKAAITETPDTSTLLAGKRTADGSEFEKRTADGSEFESPKKKAKVE

SEQ ID NO: 2976 - protein, 2096 aa, synthetic construct; identical to SEQ ID NO: 2723

SEQ ID NO: 2977 - protein, 2096 aa, synthetic construct; identical to SEQ ID NO: 2777

SEQ ID NO: 2978 - protein, 2093 aa, synthetic construct
MPAAKRVKLDGGDKKYSIGLDIGTNSVGWAVITDEYKVPSKKFKVLGNTDRHSIKKNLIGALLFDSGETAEATRLKRTARRRYTRRKNRICYLQEIFSNEMAKVDDSFFHRLEESFLVEEDKKHERHPIFGNIVDEVAYHEKYPTIYHLRKKLVDSTDKADLRLIYLALAHMIKFRGHFLIEGDLNPDNSDVDKLFIQLVQTYNQLFEENPINASGVDAKAILSARLSKSRRLENLIAQLPGEKKNGLFGNLIALSLGLTPNFKSNFDLAEDAKLQLSKDTYDDDLDNLLAQIGDQYADLFLAAKNLSDAILLSDILRVNTEITKAPLSASMIKRYDEHHQDLTLLKALVRQQLPEKYKEIFFDQSKNGYAGYIDGGASQEEFYKFIKPILEKMDGTEELLVKLNREDLLRKQRTFDNGSIPHQIHLGELHAILRRQEDFYPFLKDNREKIEKILTFRIPYYVGPLARGNSRFAWMTRKSEETITPWNFEEVVDKGASAQSFIERMTNFDKNLPNEKVLPKHSLLYEYFTVYNELTKVKYVTEGMRKPAFLSGEQKKAIVDLLFKTNRKVTVKQLKEDYFKKIECFDSVEISGVEDRFNASLGTYHDLLKIIKDKDFLDNEENEDILEDIVLTLTLFEDREMIEERLKTYAHLFDDKVMKQLKRRRYTGWGRLSRKLINGIRDKQSGKTILDFLKSDGFANRNFMQLIHDDSLTFKEDIQKAQVSGQGDSLHEHIANLAGSPAIKKGILQTVKVVDELVKVMGRHKPENIVIEMARENQTTQKGQKNSRERMKRIEEGIKELGSQILKEHPVENTQLQNEKLYLYYLQNGRDMYVDQELDINRLSDYDVDHIVPQSFLKDDSIDNKVLTRSDKARGKSDNVPSEEVVKKMKNYWRQLLNAKLITQRKFDNLTKAERGGLSELDKAGFIKRQLVETRQITKHVAQILDSRMNTKYDENDKLIREVKVITLKSKLVSDFRKDFQFYKVREINNYHHAHDAYLNAVVGTALIKKYPKLESEFVYGDYKVYDVRKMIAKSEQEIGKATAKYFFYSNIMNFFKTEITLANGEIRKRPLIETNGETGEIVWDKGRDFATVRKVLSMPQVNIVKKTEVQTGGFSKESILPKRNSDKLIARKKDWDPKKYGGFDSPTVAYSVLVVAKVEKGKSKKLKSVKELLGITIMERSSFEKNPIDFLEAKGYKEVKKDLIIKLPKYSLFELENGRKRMLASAGELQKGNELALPSKYVNFLYLASHYEKLKGSPEDNEQKQLFVEQHKHYLDEIIEQISEFSKRVILADANLDKVLSAYNKHRDKPIREQAENIIHLFTLTNLGAPAAFKYFDTTIDRKRYTSTKEVLDATLIHQSITGLYETRIDLSQLGGDGGEAAAKGGGGGTLNIEDEHRLHETSKEPDVSLGSTWLSDFPQAWAETGGMGLAVRQAPLIIPLKATSTPVSIKQYPMSQEARLGIKPHIQRLLDQGILVPCQSPWNTPLLPVKKPGTNDYRPVQDLREVNKRVEDIHPTVPNPYNLLSGLPPSHQWYTVLDLKDAFFCLRLHPTSQPLFAFEWRDPEMGISGQLTWTRLPQGFKNSPTLFNEALHRDLADFRIQHPDLILLQYVDDLLLAATSELDCQQGTRALLQTLGNLGYRASAKKAQICQKQVKYLGYLLKEGQRWLTEARKETVMGQPTPKTPRQLREFLGTAGFCRLWIPGFAEMAAPLYPLTKPGTLFNWGPDQQKAYQEIKQALLTAPALGLPDLTKPFELFVDEKQGYAKGVLTQKLGPWRRPVAYLSKKLDPVAAGWPPCLRMVAAIAVLTKDAGKLTMGQPLVILAPHAVEALVKQPPDRWLSNARMTHYQALLLDTDRVQFGPVVALNPATLLPLPEEGLQHNCLDILAEAHGTRPDLTDQPLPDADHTWYTDGSSLLQEGQRKAGAAVTTETEVIWAKALPAGTSAQRAELIALTQALKMAEGKKLNVYTDSRYAFATAHIHGEIYRRRGWLTSEGKEIKNKDEILALLKALFLPKRLSIIHCPGHQKGHSAEARGNRMADQAARKAAITETPDTSTLLAGKRTADGSEFEKRTADGSEFESPKKKAKVE

SEQ ID NO: 2979 - protein, 2094 aa, synthetic construct
MPAAKRVKLDGGDKKYSIGLDIGTNSVGWAVITDEYKVPSKKFKVLGNTDRHSIKKNLIGALLFDSGETAEATRLKRTARRRYTRRKNRICYLQEIFSNEMAKVDDSFFHRLEESFLVEEDKKHERHPIFGNIVDEVAYHEKYPTIYHLRKKLVDSTDKADLRLIYLALAHMIKFRGHFLIEGDLNPDNSDVDKLFIQLVQTYNQLFEENPINASGVDAKAILSARLSKSRRLENLIAQLPGEKKNGLFGNLIALSLGLTPNFKSNFDLAEDAKLQLSKDTYDDDLDNLLAQIGDQYADLFLAAKNLSDAILLSDILRVNTEITKAPLSASMIKRYDEHHQDLTLLKALVRQQLPEKYKEIFFDQSKNGYAGYIDGGASQEEFYKFIKPILEKMDGTEELLVKLNREDLLRKQRTFDNGSIPHQIHLGELHAILRRQEDFYPFLKDNREKIEKILTFRIPYYVGPLARGNSRFAWMTRKSEETITPWNFEEVVDKGASAQSFIERMTNFDKNLPNEKVLPKHSLLYEYFTVYNELTKVKYVTEGMRKPAFLSGEQKKAIVDLLFKTNRKVTVKQLKEDYFKKIECFDSVEISGVEDRFNASLGTYHDLLKIIKDKDFLDNEENEDILEDIVLTLTLFEDREMIEERLKTYAHLFDDKVMKQLKRRRYTGWGRLSRKLINGIRDKQSGKTILDFLKSDGFANRNFMQLIHDDSLTFKEDIQKAQVSGQGDSLHEHIANLAGSPAIKKGILQTVKVVDELVKVMGRHKPENIVIEMARENQTTQKGQKNSRERMKRIEEGIKELGSQILKEHPVENTQLQNEKLYLYYLQNGRDMYVDQELDINRLSDYDVDHIVPQSFLKDDSIDNKVLTRSDKARGKSDNVPSEEVVKKMKNYWRQLLNAKLITQRKFDNLTKAERGGLSELDKAGFIKRQLVETRQITKHVAQILDSRMNTKYDENDKLIREVKVITLKSKLVSDFRKDFQFYKVREINNYHHAHDAYLNAVVGTALIKKYPKLESEFVYGDYKVYDVRKMIAKSEQEIGKATAKYFFYSNIMNFFKTEITLANGEIRKRPLIETNGETGEIVWDKGRDFATVRKVLSMPQVNIVKKTEVQTGGFSKESILPKRNSDKLIARKKDWDPKKYGGFDSPTVAYSVLVVAKVEKGKSKKLKSVKELLGITIMERSSFEKNPIDFLEAKGYKEVKKDLIIKLPKYSLFELENGRKRMLASAGELQKGNELALPSKYVNFLYLASHYEKLKGSPEDNEQKQLFVEQHKHYLDEIIEQISEFSKRVILADANLDKVLSAYNKHRDKPIREQAENIIHLFTLTNLGAPAAFKYFDTTIDRKRYTSTKEVLDATLIHQSITGLYETRIDLSQLGGDGGGGSGSSGGGGGTLNIEDEHRLHETSKEPDVSLGSTWLSDFPQAWAETGGMGLAVRQAPLIIPLKATSTPVSIKQYPMSQEARLGIKPHIQRLLDQGILVPCQSPWNTPLLPVKKPGTNDYRPVQDLREVNKRVEDIHPTVPNPYNLLSGLPPSHQWYTVLDLKDAFFCLRLHPTSQPLFAFEWRDPEMGISGQLTWTRLPQGFKNSPTLFNEALHRDLADFRIQHPDLILLQYVDDLLLAATSELDCQQGTRALLQTLGNLGYRASAKKAQICQKQVKYLGYLLKEGQRWLTEARKETVMGQPTPKTPRQLREFLGTAGFCRLWIPGFAEMAAPLYPLTKPGTLFNWGPDQQKAYQEIKQALLTAPALGLPDLTKPFELFVDEKQGYAKGVLTQKLGPWRRPVAYLSKKLDPVAAGWPPCLRMVAAIAVLTKDAGKLTMGQPLVILAPHAVEALVKQPPDRWLSNARMTHYQALLLDTDRVQFGPVVALNPATLLPLPEEGLQHNCLDILAEAHGTRPDLTDQPLPDADHTWYTDGSSLLQEGQRKAGAAVTTETEVIWAKALPAGTSAQRAELIALTQALKMAEGKKLNVYTDSRYAFATAHIHGEIYRRRGWLTSEGKEIKNKDEILALLKALFLPKRLSIIHCPGHQKGHSAEARGNRMADQAARKAAITETPDTSTLLAGKRTADGSEFEKRTADGSEFESPKKKAKVE

SEQ ID NO: 2980 - protein, 2092 aa, synthetic construct
MPAAKRVKLDGGDKKYSIGLDIGTNSVGWAVITDEYKVPSKKFKVLGNTDRHSIKKNLIGALLFDSGETAEATRLKRTARRRYTRRKNRICYLQEIFSNEMAKVDDSFFHRLEESFLVEEDKKHERHPIFGNIVDEVAYHEKYPTIYHLRKKLVDSTDKADLRLIYLALAHMIKFRGHFLIEGDLNPDNSDVDKLFIQLVQTYNQLFEENPINASGVDAKAILSARLSKSRRLENLIAQLPGEKKNGLFGNLIALSLGLTPNFKSNFDLAEDAKLQLSKDTYDDDLDNLLAQIGDQYADLFLAAKNLSDAILLSDILRVNTEITKAPLSASMIKRYDEHHQDLTLLKALVRQQLPEKYKEIFFDQSKNGYAGYIDGGASQEEFYKFIKPILEKMDGTEELLVKLNREDLLRKQRTFDNGSIPHQIHLGELHAILRRQEDFYPFLKDNREKIEKILTFRIPYYVGPLARGNSRFAWMTRKSEETITPWNFEEVVDKGASAQSFIERMTNFDKNLPNEKVLPKHSLLYEYFTVYNELTKVKYVTEGMRKPAFLSGEQKKAIVDLLFKTNRKVTVKQLKEDYFKKIECFDSVEISGVEDRFNASLGTYHDLLKIIKDKDFLDNEENEDILEDIVLTLTLFEDREMIEERLKTYAHLFDDKVMKQLKRRRYTGWGRLSRKLINGIRDKQSGKTILDFLKSDGFANRNFMQLIHDDSLTFKEDIQKAQVSGQGDSLHEHIANLAGSPAIKKGILQTVKVVDELVKVMGRHKPENIVIEMARENQTTQKGQKNSRERMKRIEEGIKELGSQILKEHPVENTQLQNEKLYLYYLQNGRDMYVDQELDINRLSDYDVDHIVPQSFLKDDSIDNKVLTRSDKARGKSDNVPSEEVVKKMKNYWRQLLNAKLITQRKFDNLTKAERGGLSELDKAGFIKRQLVETRQITKHVAQILDSRMNTKYDENDKLIREVKVITLKSKLVSDFRKDFQFYKVREINNYHHAHDAYLNAVVGTALIKKYPKLESEFVYGDYKVYDVRKMIAKSEQEIGKATAKYFFYSNIMNFFKTEITLANGEIRKRPLIETNGETGEIVWDKGRDFATVRKVLSMPQVNIVKKTEVQTGGFSKESILPKRNSDKLIARKKDWDPKKYGGFDSPTVAYSVLVVAKVEKGKSKKLKSVKELLGITIMERSSFEKNPIDFLEAKGYKEVKKDLIIKLPKYSLFELENGRKRMLASAGELQKGNELALPSKYVNFLYLASHYEKLKGSPEDNEQKQLFVEQHKHYLDEIIEQISEFSKRVILADANLDKVLSAYNKHRDKPIREQAENIIHLFTLTNLGAPAAFKYFDTTIDRKRYTSTKEVLDATLIHQSITGLYETRIDLSQLGGDGGPAPAPAPGGTLNIEDEHRLHETSKEPDVSLGSTWLSDFPQAWAETGGMGLAVRQAPLIIPLKATSTPVSIKQYPMSQEARLGIKPHIQRLLDQGILVPCQSPWNTPLLPVKKPGTNDYRPVQDLREVNKRVEDIHPTVPNPYNLLSGLPPSHQWYTVLDLKDAFFCLRLHPTSQPLFAFEWRDPEMGISGQLTWTRLPQGFKNSPTLFNEALHRDLADFRIQHPDLILLQYVDDLLLAATSELDCQQGTRALLQTLGNLGYRASAKKAQICQKQVKYLGYLLKEGQRWLTEARKETVMGQPTPKTPRQLREFLGTAGFCRLWIPGFAEMAAPLYPLTKPGTLFNWGPDQQKAYQEIKQALLTAPALGLPDLTKPFELFVDEKQGYAKGVLTQKLGPWRRPVAYLSKKLDPVAAGWPPCLRMVAAIAVLTKDAGKLTMGQPLVILAPHAVEALVKQPPDRWLSNARMTHYQALLLDTDRVQFGPVVALNPATLLPLPEEGLQHNCLDILAEAHGTRPDLTDQPLPDADHTWYTDGSSLLQEGQRKAGAAVTTETEVIWAKALPAGTSAQRAELIALTQALKMAEGKKLNVYTDSRYAFATAHIHGEIYRRRGWLTSEGKEIKNKDEILALLKALFLPKRLSIIHCPGHQKGHSAEARGNRMADQAARKAAITETPDTSTLLAGKRTADGSEFEKRTADGSEFESPKKKAKVE

SEQ ID NO: 2981 - protein, 2100 aa, synthetic construct
MPAAKRVKLDGGDKKYSIGLDIGTNSVGWAVITDEYKVPSKKFKVLGNTDRHSIKKNLIGALLFDSGETAEATRLKRTARRRYTRRKNRICYLQEIFSNEMAKVDDSFFHRLEESFLVEEDKKHERHPIFGNIVDEVAYHEKYPTIYHLRKKLVDSTDKADLRLIYLALAHMIKFRGHFLIEGDLNPDNSDVDKLFIQLVQTYNQLFEENPINASGVDAKAILSARLSKSRRLENLIAQLPGEKKNGLFGNLIALSLGLTPNFKSNFDLAEDAKLQLSKDTYDDDLDNLLAQIGDQYADLFLAAKNLSDAILLSDILRVNTEITKAPLSASMIKRYDEHHQDLTLLKALVRQQLPEKYKEIFFDQSKNGYAGYIDGGASQEEFYKFIKPILEKMDGTEELLVKLNREDLLRKQRTFDNGSIPHQIHLGELHAILRRQEDFYPFLKDNREKIEKILTFRIPYYVGPLARGNSRFAWMTRKSEETITPWNFEEVVDKGASAQSFIERMTNFDKNLPNEKVLPKHSLLYEYFTVYNELTKVKYVTEGMRKPAFLSGEQKKAIVDLLFKTNRKVTVKQLKEDYFKKIECFDSVEISGVEDRFNASLGTYHDLLKIIKDKDFLDNEENEDILEDIVLTLTLFEDREMIEERLKTYAHLFDDKVMKQLKRRRYTGWGRLSRKLINGIRDKQSGKTILDFLKSDGFANRNFMQLIHDDSLTFKEDIQKAQVSGQGDSLHEHIANLAGSPAIKKGILQTVKVVDELVKVMGRHKPENIVIEMARENQTTQKGQKNSRERMKRIEEGIKELGSQILKEHPVENTQLQNEKLYLYYLQNGRDMYVDQELDINRLSDYDVDHIVPQSFLKDDSIDNKVLTRSDKARGKSDNVPSEEVVKKMKNYWRQLLNAKLITQRKFDNLTKAERGGLSELDKAGFIKRQLVETRQITKHVAQILDSRMNTKYDENDKLIREVKVITLKSKLVSDFRKDFQFYKVREINNYHHAHDAYLNAVVGTALIKKYPKLESEFVYGDYKVYDVRKMIAKSEQEIGKATAKYFFYSNIMNFFKTEITLANGEIRKRPLIETNGETGEIVWDKGRDFATVRKVLSMPQVNIVKKTEVQTGGFSKESILPKRNSDKLIARKKDWDPKKYGGFDSPTVAYSVLVVAKVEKGKSKKLKSVKELLGITIMERSSFEKNPIDFLEAKGYKEVKKDLIIKLPKYSLFELENGRKRMLASAGELQKGNELALPSKYVNFLYLASHYEKLKGSPEDNEQKQLFVEQHKHYLDEIIEQISEFSKRVILADANLDKVLSAYNKHRDKPIREQAENIIHLFTLTNLGAPAAFKYFDTTIDRKRYTSTKEVLDATLIHQSITGLYETRIDLSQLGGDGGGGSGGSGGSGGSGGSGGTLNIEDEHRLHETSKEPDVSLGSTWLSDFPQAWAETGGMGLAVRQAPLIIPLKATSTPVSIKQYPMSQEARLGIKPHIQRLLDQGILVPCQSPWNTPLLPVKKPGTNDYRPVQDLREVNKRVEDIHPTVPNPYNLLSGLPPSHQWYTVLDLKDAFFCLRLHPTSQPLFAFEWRDPEMGISGQLTWTRLPQGFKNSPTLFNEALHRDLADFRIQHPDLILLQYVDDLLLAATSELDCQQGTRALLQTLGNLGYRASAKKAQICQKQVKYLGYLLKEGQRWLTEARKETVMGQPTPKTPRQLREFLGTAGFCRLWIPGFAEMAAPLYPLTKPGTLFNWGPDQQKAYQEIKQALLTAPALGLPDLTKPFELFVDEKQGYAKGVLTQKLGPWRRPVAYLSKKLDPVAAGWPPCLRMVAAIAVLTKDAGKLTMGQPLVILAPHAVEALVKQPPDRWLSNARMTHYQALLLDTDRVQFGPVVALNPATLLPLPEEGLQHNCLDILAEAHGTRPDLTDQPLPDADHTWYTDGSSLLQEGQRKAGAAVTTETEVIWAKALPAGTSAQRAELIALTQALKMAEGKKLNVYTDSRYAFATAHIHGEIYRRRGWLTSEGKEIKNKDEILALLKALFLPKRLSIIHCPGHQKGHSAEARGNRMADQAARKAAITETPDTSTLLAGKRTADGSEFEKRTADGSEFESPKKKAKVE

SEQ ID NO: 2982 - protein, 2093 aa, synthetic construct; identical to SEQ ID NO: 2726

SEQ ID NO: 2983 - protein, 2115 aa, synthetic construct; identical to SEQ ID NO: 2741

SEQ ID NO: 2984 - protein, 2090 aa, synthetic construct
MPAAKRVKLDGGDKKYSIGLDIGTNSVGWAVITDEYKVPSKKFKVLGNTDRHSIKKNLIGALLFDSGETAEATRLKRTARRRYTRRKNRICYLQEIFSNEMAKVDDSFFHRLEESFLVEEDKKHERHPIFGNIVDEVAYHEKYPTIYHLRKKLVDSTDKADLRLIYLALAHMIKFRGHFLIEGDLNPDNSDVDKLFIQLVQTYNQLFEENPINASGVDAKAILSARLSKSRRLENLIAQLPGEKKNGLFGNLIALSLGLTPNFKSNFDLAEDAKLQLSKDTYDDDLDNLLAQIGDQYADLFLAAKNLSDAILLSDILRVNTEITKAPLSASMIKRYDEHHQDLTLLKALVRQQLPEKYKEIFFDQSKNGYAGYIDGGASQEEFYKFIKPILEKMDGTEELLVKLNREDLLRKQRTFDNGSIPHQIHLGELHAILRRQEDFYPFLKDNREKIEKILTFRIPYYVGPLARGNSRFAWMTRKSEETITPWNFEEVVDKGASAQSFIERMTNFDKNLPNEKVLPKHSLLYEYFTVYNELTKVKYVTEGMRKPAFLSGEQKKAIVDLLFKTNRKVTVKQLKEDYFKKIECFDSVEISGVEDRFNASLGTYHDLLKIIKDKDFLDNEENEDILEDIVLTLTLFEDREMIEERLKTYAHLFDDKVMKQLKRRRYTGWGRLSRKLINGIRDKQSGKTILDFLKSDGFANRNFMQLIHDDSLTFKEDIQKAQVSGQGDSLHEHIANLAGSPAIKKGILQTVKVVDELVKVMGRHKPENIVIEMARENQTTQKGQKNSRERMKRIEEGIKELGSQILKEHPVENTQLQNEKLYLYYLQNGRDMYVDQELDINRLSDYDVDHIVPQSFLKDDSIDNKVLTRSDKARGKSDNVPSEEVVKKMKNYWRQLLNAKLITQRKFDNLTKAERGGLSELDKAGFIKRQLVETRQITKHVAQILDSRMNTKYDENDKLIREVKVITLKSKLVSDFRKDFQFYKVREINNYHHAHDAYLNAVVGTALIKKYPKLESEFVYGDYKVYDVRKMIAKSEQEIGKATAKYFFYSNIMNFFKTEITLANGEIRKRPLIETNGETGEIVWDKGRDFATVRKVLSMPQVNIVKKTEVQTGGFSKESILPKRNSDKLIARKKDWDPKKYGGFDSPTVAYSVLVVAKVEKGKSKKLKSVKELLGITIMERSSFEKNPIDFLEAKGYKEVKKDLIIKLPKYSLFELENGRKRMLASAGELQKGNELALPSKYVNFLYLASHYEKLKGSPEDNEQKQLFVEQHKHYLDEIIEQISEFSKRVILADANLDKVLSAYNKHRDKPIREQAENIIHLFTLTNLGAPAAFKYFDTTIDRKRYTSTKEVLDATLIHQSITGLYETRIDLSQLGGDGGGGGGGGGTLNIEDEHRLHETSKEPDVSLGSTWLSDFPQAWAETGGMGLAVRQAPLIIPLKATSTPVSIKQYPMSQEARLGIKPHIQRLLDQGILVPCQSPWNTPLLPVKKPGTNDYRPVQDLREVNKRVEDIHPTVPNPYNLLSGLPPSHQWYTVLDLKDAFFCLRLHPTSQPLFAFEWRDPEMGISGQLTWTRLPQGFKNSPTLFNEALHRDLADFRIQHPDLILLQYVDDLLLAATSELDCQQGTRALLQTLGNLGYRASAKKAQICQKQVKYLGYLLKEGQRWLTEARKETVMGQPTPKTPRQLREFLGTAGFCRLWIPGFAEMAAPLYPLTKPGTLFNWGPDQQKAYQEIKQALLTAPALGLPDLTKPFELFVDEKQGYAKGVLTQKLGPWRRPVAYLSKKLDPVAAGWPPCLRMVAAIAVLTKDAGKLTMGQPLVILAPHAVEALVKQPPDRWLSNARMTHYQALLLDTDRVQFGPVVALNPATLLPLPEEGLQHNCLDILAEAHGTRPDLTDQPLPDADHTWYTDGSSLLQEGQRKAGAAVTTETEVIWAKALPAGTSAQRAELIALTQALKMAEGKKLNVYTDSRYAFATAHIHGEIYRRRGWLTSEGKEIKNKDEILALLKALFLPKRLSIIHCPGHQKGHSAEARGNRMADQAARKAAITETPDTSTLLAGKRTADGSEFEKRTADGSEFESPKKKAKVE

SEQ ID NO: 2985 - protein, 2094 aa, synthetic construct
MPAAKRVKLDGGDKKYSIGLDIGTNSVGWAVITDEYKVPSKKFKVLGNTDRHSIKKNLIGALLFDSGETAEATRLKRTARRRYTRRKNRICYLQEIFSNEMAKVDDSFFHRLEESFLVEEDKKHERHPIFGNIVDEVAYHEKYPTIYHLRKKLVDSTDKADLRLIYLALAHMIKFRGHFLIEGDLNPDNSDVDKLFIQLVQTYNQLFEENPINASGVDAKAILSARLSKSRRLENLIAQLPGEKKNGLFGNLIALSLGLTPNFKSNFDLAEDAKLQLSKDTYDDDLDNLLAQIGDQYADLFLAAKNLSDAILLSDILRVNTEITKAPLSASMIKRYDEHHQDLTLLKALVRQQLPEKYKEIFFDQSKNGYAGYIDGGASQEEFYKFIKPILEKMDGTEELLVKLNREDLLRKQRTFDNGSIPHQIHLGELHAILRRQEDFYPFLKDNREKIEKILTFRIPYYVGPLARGNSRFAWMTRKSEETITPWNFEEVVDKGASAQSFIERMTNFDKNLPNEKVLPKHSLLYEYFTVYNELTKVKYVTEGMRKPAFLSGEQKKAIVDLLFKTNRKVTVKQLKEDYFKKIECFDSVEISGVEDRFNASLGTYHDLLKIIKDKDFLDNEENEDILEDIVLTLTLFEDREMIEERLKTYAHLFDDKVMKQLKRRRYTGWGRLSRKLINGIRDKQSGKTILDFLKSDGFANRNFMQLIHDDSLTFKEDIQKAQVSGQGDSLHEHIANLAGSPAIKKGILQTVKVVDELVKVMGRHKPENIVIEMARENQTTQKGQKNSRERMKRIEEGIKELGSQILKEHPVENTQLQNEKLYLYYLQNGRDMYVDQELDINRLSDYDVDHIVPQSFLKDDSIDNKVLTRSDKARGKSDNVPSEEVVKKMKNYWRQLLNAKLITQRKFDNLTKAERGGLSELDKAGFIKRQLVETRQITKHVAQILDSRMNTKYDENDKLIREVKVITLKSKLVSDFRKDFQFYKVREINNYHHAHDAYLNAVVGTALIKKYPKLESEFVYGDYKVYDVRKMIAKSEQEIGKATAKYFFYSNIMNFFKTEITLANGEIRKRPLIETNGETGEIVWDKGRDFATVRKVLSMPQVNIVKKTEVQTGGFSKESILPKRNSDKLIARKKDWDPKKYGGFDSPTVAYSVLVVAKVEKGKSKKLKSVKELLGITIMERSSFEKNPIDFLEAKGYKEVKKDLIIKLPKYSLFELENGRKRMLASAGELQKGNELALPSKYVNFLYLASHYEKLKGSPEDNEQKQLFVEQHKHYLDEIIEQISEFSKRVILADANLDKVLSAYNKHRDKPIREQAENIIHLFTLTNLGAPAAFKYFDTTIDRKRYTSTKEVLDATLIHQSITGLYETRIDLSQLGGDGGGGSGSSPAPGGTLNIEDEHRLHETSKEPDVSLGSTWLSDFPQAWAETGGMGLAVRQAPLIIPLKATSTPVSIKQYPMSQEARLGIKPHIQRLLDQGILVPCQSPWNTPLLPVKKPGTNDYRPVQDLREVNKRVEDIHPTVPNPYNLLSGLPPSHQWYTVLDLKDAFFCLRLHPTSQPLFAFEWRDPEMGISGQLTWTRLPQGFKNSPTLFNEALHRDLADFRIQHPDLILLQYVDDLLLAATSELDCQQGTRALLQTLGNLGYRASAKKAQICQKQVKYLGYLLKEGQRWLTEARKETVMGQPTPKTPRQLREFLGTAGFCRLWIPGFAEMAAPLYPLTKPGTLFNWGPDQQKAYQEIKQALLTAPALGLPDLTKPFELFVDEKQGYAKGVLTQKLGPWRRPVAYLSKKLDPVAAGWPPCLRMVAAIAVLTKDAGKLTMGQPLVILAPHAVEALVKQPPDRWLSNARMTHYQALLLDTDRVQFGPVVALNPATLLPLPEEGLQHNCLDILAEAHGTRPDLTDQPLPDADHTWYTDGSSLLQEGQRKAGAAVTTETEVIWAKALPAGTSAQRAELIALTQALKMAEGKKLNVYTDSRYAFATAHIHGEIYRRRGWLTSEGKEIKNKDEILALLKALFLPKRLSIIHCPGHQKGHSAEARGNRMADQAARKAAITETPDTSTLLAGKRTADGSEFEKRTADGSEFESPKKKAKVE

SEQ ID NO: 2986 - protein, 2088 aa, synthetic construct
MPAAKRVKLDGGDKKYSIGLDIGTNSVGWAVITDEYKVPSKKFKVLGNTDRHSIKKNLIGALLFDSGETAEATRLKRTARRRYTRRKNRICYLQEIFSNEMAKVDDSFFHRLEESFLVEEDKKHERHPIFGNIVDEVAYHEKYPTIYHLRKKLVDSTDKADLRLIYLALAHMIKFRGHFLIEGDLNPDNSDVDKLFIQLVQTYNQLFEENPINASGVDAKAILSARLSKSRRLENLIAQLPGEKKNGLFGNLIALSLGLTPNFKSNFDLAEDAKLQLSKDTYDDDLDNLLAQIGDQYADLFLAAKNLSDAILLSDILRVNTEITKAPLSASMIKRYDEHHQDLTLLKALVRQQLPEKYKEIFFDQSKNGYAGYIDGGASQEEFYKFIKPILEKMDGTEELLVKLNREDLLRKQRTFDNGSIPHQIHLGELHAILRRQEDFYPFLKDNREKIEKILTFRIPYYVGPLARGNSRFAWMTRKSEETITPWNFEEVVDKGASAQSFIERMTNFDKNLPNEKVLPKHSLLYEYFTVYNELTKVKYVTEGMRKPAFLSGEQKKAIVDLLFKTNRKVTVKQLKEDYFKKIECFDSVEISGVEDRFNASLGTYHDLLKIIKDKDFLDNEENEDILEDIVLTLTLFEDREMIEERLKTYAHLFDDKVMKQLKRRRYTGWGRLSRKLINGIRDKQSGKTILDFLKSDGFANRNFMQLIHDDSLTFKEDIQKAQVSGQGDSLHEHIANLAGSPAIKKGILQTVKVVDELVKVMGRHKPENIVIEMARENQTTQKGQKNSRERMKRIEEGIKELGSQILKEHPVENTQLQNEKLYLYYLQNGRDMYVDQELDINRLSDYDVDHIVPQSFLKDDSIDNKVLTRSDKARGKSDNVPSEEVVKKMKNYWRQLLNAKLITQRKFDNLTKAERGGLSELDKAGFIKRQLVETRQITKHVAQILDSRMNTKYDENDKLIREVKVITLKSKLVSDFRKDFQFYKVREINNYHHAHDAYLNAVVGTALIKKYPKLESEFVYGDYKVYDVRKMIAKSEQEIGKATAKYFFYSNIMNFFKTEITLANGEIRKRPLIETNGETGEIVWDKGRDFATVRKVLSMPQVNIVKKTEVQTGGFSKESILPKRNSDKLIARKKDWDPKKYGGFDSPTVAYSVLVVAKVEKGKSKKLKSVKELLGITIMERSSFEKNPIDFLEAKGYKEVKKDLIIKLPKYSLFELENGRKRMLASAGELQKGNELALPSKYVNFLYLASHYEKLKGSPEDNEQKQLFVEQHKHYLDEIIEQISEFSKRVILADANLDKVLSAYNKHRDKPIREQAENIIHLFTLTNLGAPAAFKYFDTTIDRKRYTSTKEVLDATLIHQSITGLYETRIDLSQLGGDGGGSSGGTLNIEDEHRLHETSKEPDVSLGSTWLSDFPQAWAETGGMGLAVRQAPLIIPLKATSTPVSIKQYPMSQEARLGIKPHIQRLLDQGILVPCQSPWNTPLLPVKKPGTNDYRPVQDLREVNKRVEDIHPTVPNPYNLLSGLPPSHQWYTVLDLKDAFFCLRLHPTSQPLFAFEWRDPEMGISGQLTWTRLPQGFKNSPTLFNEALHRDLADFRIQHPDLILLQYVDDLLLAATSELDCQQGTRALLQTLGNLGYRASAKKAQICQKQVKYLGYLLKEGQRWLTEARKETVMGQPTPKTPRQLREFLGTAGFCRLWIPGFAEMAAPLYPLTKPGTLFNWGPDQQKAYQEIKQALLTAPALGLPDLTKPFELFVDEKQGYAKGVLTQKLGPWRRPVAYLSKKLDPVAAGWPPCLRMVAAIAVLTKDAGKLTMGQPLVILAPHAVEALVKQPPDRWLSNARMTHYQALLLDTDRVQFGPVVALNPATLLPLPEEGLQHNCLDILAEAHGTRPDLTDQPLPDADHTWYTDGSSLLQEGQRKAGAAVTTETEVIWAKALPAGTSAQRAELIALTQALKMAEGKKLNVYTDSRYAFATAHIHGEIYRRRGWLTSEGKEIKNKDEILALLKALFLPKRLSIIHCPGHQKGHSAEARGNRMADQAARKAAITETPDTSTLLAGKRTADGSEFEKRTADGSEFESPKKKAKVE

SEQ ID NO: 2987 - protein, 2096 aa, synthetic construct; identical to SEQ ID NO: 2776

SEQ ID NO: 2988 - protein, 2094 aa, synthetic construct
MPAAKRVKLDGGDKKYSIGLDIGTNSVGWAVITDEYKVPSKKFKVLGNTDRHSIKKNLIGALLFDSGETAEATRLKRTARRRYTRRKNRICYLQEIFSNEMAKVDDSFFHRLEESFLVEEDKKHERHPIFGNIVDEVAYHEKYPTIYHLRKKLVDSTDKADLRLIYLALAHMIKFRGHFLIEGDLNPDNSDVDKLFIQLVQTYNQLFEENPINASGVDAKAILSARLSKSRRLENLIAQLPGEKKNGLFGNLIALSLGLTPNFKSNFDLAEDAKLQLSKDTYDDDLDNLLAQIGDQYADLFLAAKNLSDAILLSDILRVNTEITKAPLSASMIKRYDEHHQDLTLLKALVRQQLPEKYKEIFFDQSKNGYAGYIDGGASQEEFYKFIKPILEKMDGTEELLVKLNREDLLRKQRTFDNGSIPHQIHLGELHAILRRQEDFYPFLKDNREKIEKILTFRIPYYVGPLARGNSRFAWMTRKSEETITPWNFEEVVDKGASAQSFIERMTNFDKNLPNEKVLPKHSLLYEYFTVYNELTKVKYVTEGMRKPAFLSGEQKKAIVDLLFKTNRKVTVKQLKEDYFKKIECFDSVEISGVEDRFNASLGTYHDLLKIIKDKDFLDNEENEDILEDIVLTLTLFEDREMIEERLKTYAHLFDDKVMKQLKRRRYTGWGRLSRKLINGIRDKQSGKTILDFLKSDGFANRNFMQLIHDDSLTFKEDIQKAQVSGQGDSLHEHIANLAGSPAIKKGILQTVKVVDELVKVMGRHKPENIVIEMARENQTTQKGQKNSRERMKRIEEGIKELGSQILKEHPVENTQLQNEKLYLYYLQNGRDMYVDQELDINRLSDYDVDHIVPQSFLKDDSIDNKVLTRSDKARGKSDNVPSEEVVKKMKNYWRQLLNAKLITQRKFDNLTKAERGGLSELDKAGFIKRQLVETRQITKHVAQILDSRMNTKYDENDKLIREVKVITLKSKLVSDFRKDFQFYKVREINNYHHAHDAYLNAVVGTALIKKYPKLESEFVYGDYKVYDVRKMIAKSEQEIGKATAKYFFYSNIMNFFKTEITLANGEIRKRPLIETNGETGEIVWDKGRDFATVRKVLSMPQVNIVKKTEVQTGGFSKESILPKRNSDKLIARKKDWDPKKYGGFDSPTVAYSVLVVAKVEKGKSKKLKSVKELLGITIMERSSFEKNPIDFLEAKGYKEVKKDLIIKLPKYSLFELENGRKRMLASAGELQKGNELALPSKYVNFLYLASHYEKLKGSPEDNEQKQLFVEQHKHYLDEIIEQISEFSKRVILADANLDKVLSAYNKHRDKPIREQAENIIHLFTLTNLGAPAAFKYFDTTIDRKRYTSTKEVLDATLIHQSITGLYETRIDLSQLGGDGGGSSPAPGGGGGTLNIEDEHRLHETSKEPDVSLGSTWLSDFPQAWAETGGMGLAVRQAPLIIPLKATSTPVSIKQYPMSQEARLGIKPHIQRLLDQGILVPCQSPWNTPLLPVKKPGTNDYRPVQDLREVNKRVEDIHPTVPNPYNLLSGLPPSHQWYTVLDLKDAFFCLRLHPTSQPLFAFEWRDPEMGISGQLTWTRLPQGFKNSPTLFNEALHRDLADFRIQHPDLILLQYVDDLLLAATSELDCQQGTRALLQTLGNLGYRASAKKAQICQKQVKYLGYLLKEGQRWLTEARKETVMGQPTPKTPRQLREFLGTAGFCRLWIPGFAEMAAPLYPLTKPGTLFNWGPDQQKAYQEIKQALLTAPALGLPDLTKPFELFVDEKQGYAKGVLTQKLGPWRRPVAYLSKKLDPVAAGWPPCLRMVAAIAVLTKDAGKLTMGQPLVILAPHAVEALVKQPPDRWLSNARMTHYQALLLDTDRVQFGPVVALNPATLLPLPEEGLQHNCLDILAEAHGTRPDLTDQPLPDADHTWYTDGSSLLQEGQRKAGAAVTTETEVIWAKALPAGTSAQRAELIALTQALKMAEGKKLNVYTDSRYAFATAHIHGEIYRRRGWLTSEGKEIKNKDEILALLKALFLPKRLSIIHCPGHQKGHSAEARGNRMADQAARKAAITETPDTSTLLAGKRTADGSEFEKRTADGSEFESPKKKAKVE

SEQ ID NO: 2989 - protein, 2096 aa, synthetic construct; identical to SEQ ID NO: 2727

SEQ ID NO: 2990 - protein, 2096 aa, synthetic construct; identical to SEQ ID NO: 2764

SEQ ID NO: 2991 - protein, 2110 aa, synthetic construct; identical to SEQ ID NO: 2716

SEQ ID NO: 2992 - protein, 2115 aa, synthetic construct
MPAAKRVKLDGGDKKYSIGLDIGTNSVGWAVITDEYKVPSKKFKVLGNTDRHSIKKNLIGALLFDSGETAEATRLKRTARRRYTRRKNRICYLQEIFSNEMAKVDDSFFHRLEESFLVEEDKKHERHPIFGNIVDEVAYHEKYPTIYHLRKKLVDSTDKADLRLIYLALAHMIKFRGHFLIEGDLNPDNSDVDKLFIQLVQTYNQLFEENPINASGVDAKAILSARLSKSRRLENLIAQLPGEKKNGLFGNLIALSLGLTPNFKSNFDLAEDAKLQLSKDTYDDDLDNLLAQIGDQYADLFLAAKNLSDAILLSDILRVNTEITKAPLSASMIKRYDEHHQDLTLLKALVRQQLPEKYKEIFFDQSKNGYAGYIDGGASQEEFYKFIKPILEKMDGTEELLVKLNREDLLRKQRTFDNGSIPHQIHLGELHAILRRQEDFYPFLKDNREKIEKILTFRIPYYVGPLARGNSRFAWMTRKSEETITPWNFEEVVDKGASAQSFIERMTNFDKNLPNEKVLPKHSLLYEYFTVYNELTKVKYVTEGMRKPAFLSGEQKKAIVDLLFKTNRKVTVKQLKEDYFKKIECFDSVEISGVEDRFNASLGTYHDLLKIIKDKDFLDNEENEDILEDIVLTLTLFEDREMIEERLKTYAHLFDDKVMKQLKRRRYTGWGRLSRKLINGIRDKQSGKTILDFLKSDGFANRNFMQLIHDDSLTFKEDIQKAQVSGQGDSLHEHIANLAGSPAIKKGILQTVKVVDELVKVMGRHKPENIVIEMARENQTTQKGQKNSRERMKRIEEGIKELGSQILKEHPVENTQLQNEKLYLYYLQNGRDMYVDQELDINRLSDYDVDHIVPQSFLKDDSIDNKVLTRSDKARGKSDNVPSEEVVKKMKNYWRQLLNAKLITQRKFDNLTKAERGGLSELDKAGFIKRQLVETRQITKHVAQILDSRMNTKYDENDKLIREVKVITLKSKLVSDFRKDFQFYKVREINNYHHAHDAYLNAVVGTALIKKYPKLESEFVYGDYKVYDVRKMIAKSEQEIGKATAKYFFYSNIMNFFKTEITLANGEIRKRPLIETNGETGEIVWDKGRDFATVRKVLSMPQVNIVKKTEVQTGGFSKESILPKRNSDKLIARKKDWDPKKYGGFDSPTVAYSVLVVAKVEKGKSKKLKSVKELLGITIMERSSFEKNPIDFLEAKGYKEVKKDLIIKLPKYSLFELENGRKRMLASAGELQKGNELALPSKYVNFLYLASHYEKLKGSPEDNEQKQLFVEQHKHYLDEIIEQISEFSKRVILADANLDKVLSAYNKHRDKPIREQAENIIHLFTLTNLGAPAAFKYFDTTIDRKRYTSTKEVLDATLIHQSITGLYETRIDLSQLGGDGGEAAAKEAAAKEAAAKEAAAKEAAAKEAAAKGGTLNIEDEHRLHETSKEPDVSLGSTWLSDFPQAWAETGGMGLAVRQAPLIIPLKATSTPVSIKQYPMSQEARLGIKPHIQRLLDQGILVPCQSPWNTPLLPVKKPGTNDYRPVQDLREVNKRVEDIHPTVPNPYNLLSGLPPSHQWYTVLDLKDAFFCLRLHPTSQPLFAFEWRDPEMGISGQLTWTRLPQGFKNSPTLFNEALHRDLADFRIQHPDLILLQYVDDLLLAATSELDCQQGTRALLQTLGNLGYRASAKKAQICQKQVKYLGYLLKEGQRWLTEARKETVMGQPTPKTPRQLREFLGTAGFCRLWIPGFAEMAAPLYPLTKPGTLFNWGPDQQKAYQEIKQALLTAPALGLPDLTKPFELFVDEKQGYAKGVLTQKLGPWRRPVAYLSKKLDPVAAGWPPCLRMVAAIAVLTKDAGKLTMGQPLVILAPHAVEALVKQPPDRWLSNARMTHYQALLLDTDRVQFGPVVALNPATLLPLPEEGLQHNCLDILAEAHGTRPDLTDQPLPDADHTWYTDGSSLLQEGQRKAGAAVTTETEVIWAKALPAGTSAQRAELIALTQALKMAEGKKLNVYTDSRYAFATAHIHGEIYRRRGWLTSEGKEIKNKDEILALLKALFLPKRLSIIHCPGHQKGHSAEARGNRMADQAARKAAITETPDTSTLLAGKRTADGSEFEKRTADGSEFESPKKKAKVE

SEQ ID NO: 2993 - protein, 2094 aa, synthetic construct; identical to SEQ ID NO: 2766

SEQ ID NO: 2994 - protein, 2094 aa, synthetic construct; identical to SEQ ID NO: 2773

SEQ ID NO: 2995 - protein, 2097 aa, synthetic construct
MPAAKRVKLDGGDKKYSIGLDIGTNSVGWAVITDEYKVPSKKFKVLGNTDRHSIKKNLIGALLFDSGETAEATRLKRTARRRYTRRKNRICYLQEIFSNEMAKVDDSFFHRLEESFLVEEDKKHERHPIFGNIVDEVAYHEKYPTIYHLRKKLVDSTDKADLRLIYLALAHMIKFRGHFLIEGDLNPDNSDVDKLFIQLVQTYNQLFEENPINASGVDAKAILSARLSKSRRLENLIAQLPGEKKNGLFGNLIALSLGLTPNFKSNFDLAEDAKLQLSKDTYDDDLDNLLAQIGDQYADLFLAAKNLSDAILLSDILRVNTEITKAPLSASMIKRYDEHHQDLTLLKALVRQQLPEKYKEIFFDQSKNGYAGYIDGGASQEEFYKFIKPILEKMDGTEELLVKLNREDLLRKQRTFDNGSIPHQIHLGELHAILRRQEDFYPFLKDNREKIEKILTFRIPYYVGPLARGNSRFAWMTRKSEETITPWNFEEVVDKGASAQSFIERMTNFDKNLPNEKVLPKHSLLYEYFTVYNELTKVKYVTEGMRKPAFLSGEQKKAIVDLLFKTNRKVTVKQLKEDYFKKIECFDSVEISGVEDRFNASLGTYHDLLKIIKDKDFLDNEENEDILEDIVLTLTLFEDREMIEERLKTYAHLFDDKVMKQLKRRRYTGWGRLSRKLINGIRDKQSGKTILDFLKSDGFANRNFMQLIHDDSLTFKEDIQKAQVSGQGDSLHEHIANLAGSPAIKKGILQTVKVVDELVKVMGRHKPENIVIEMARENQTTQKGQKNSRERMKRIEEGIKELGSQILKEHPVENTQLQNEKLYLYYLQNGRDMYVDQELDINRLSDYDVDHIVPQSFLKDDSIDNKVLTRSDKARGKSDNVPSEEVVKKMKNYWRQLLNAKLITQRKFDNLTKAERGGLSELDKAGFIKRQLVETRQITKHVAQILDSRMNTKYDENDKLIREVKVITLKSKLVSDFRKDFQFYKVREINNYHHAHDAYLNAVVGTALIKKYPKLESEFVYGDYKVYDVRKMIAKSEQEIGKATAKYFFYSNIMNFFKTEITLANGEIRKRPLIETNGETGEIVWDKGRDFATVRKVLSMPQVNIVKKTEVQTGGFSKESILPKRNSDKLIARKKDWDPKKYGGFDSPTVAYSVLVVAKVEKGKSKKLKSVKELLGITIMERSSFEKNPIDFLEAKGYKEVKKDLIIKLPKYSLFELENGRKRMLASAGELQKGNELALPSKYVNFLYLASHYEKLKGSPEDNEQKQLFVEQHKHYLDEIIEQISEFSKRVILADANLDKVLSAYNKHRDKPIREQAENIIHLFTLTNLGAPAAFKYFDTTIDRKRYTSTKEVLDATLIHQSITGLYETRIDLSQLGGDGGGSAGSAAGSGEFGGTLNIEDEHRLHETSKEPDVSLGSTWLSDFPQAWAETGGMGLAVRQAPLIIPLKATSTPVSIKQYPMSQEARLGIKPHIQRLLDQGILVPCQSPWNTPLLPVKKPGTNDYRPVQDLREVNKRVEDIHPTVPNPYNLLSGLPPSHQWYTVLDLKDAFFCLRLHPTSQPLFAFEWRDPEMGISGQLTWTRLPQGFKNSPTLFNEALHRDLADFRIQHPDLILLQYVDDLLLAATSELDCQQGTRALLQTLGNLGYRASAKKAQICQKQVKYLGYLLKEGQRWLTEARKETVMGQPTPKTPRQLREFLGTAGFCRLWIPGFAEMAAPLYPLTKPGTLFNWGPDQQKAYQEIKQALLTAPALGLPDLTKPFELFVDEKQGYAKGVLTQKLGPWRRPVAYLSKKLDPVAAGWPPCLRMVAAIAVLTKDAGKLTMGQPLVILAPHAVEALVKQPPDRWLSNARMTHYQALLLDTDRVQFGPVVALNPATLLPLPEEGLQHNCLDILAEAHGTRPDLTDQPLPDADHTWYTDGSSLLQEGQRKAGAAVTTETEVIWAKALPAGTSAQRAELIALTQALKMAEGKKLNVYTDSRYAFATAHIHGEIYRRRGWLTSEGKEIKNKDEILALLKALFLPKRLSIIHCPGHQKGHSAEARGNRMADQAARKAAITETPDTSTLLAGKRTADGSEFEKRTADGSEFESPKKKAKVE

SEQ ID NO: 2996 - protein, 2091 aa, synthetic construct
MPAAKRVKLDGGDKKYSIGLDIGTNSVGWAVITDEYKVPSKKFKVLGNTDRHSIKKNLIGALLFDSGETAEATRLKRTARRRYTRRKNRICYLQEIFSNEMAKVDDSFFHRLEESFLVEEDKKHERHPIFGNIVDEVAYHEKYPTIYHLRKKLVDSTDKADLRLIYLALAHMIKFRGHFLIEGDLNPDNSDVDKLFIQLVQTYNQLFEENPINASGVDAKAILSARLSKSRRLENLIAQLPGEKKNGLFGNLIALSLGLTPNFKSNFDLAEDAKLQLSKDTYDDDLDNLLAQIGDQYADLFLAAKNLSDAILLSDILRVNTEITKAPLSASMIKRYDEHHQDLTLLKALVRQQLPEKYKEIFFDQSKNGYAGYIDGGASQEEFYKFIKPILEKMDGTEELLVKLNREDLLRKQRTFDNGSIPHQIHLGELHAILRRQEDFYPFLKDNREKIEKILTFRIPYYVGPLARGNSRFAWMTRKSEETITPWNFEEVVDKGASAQSFIERMTNFDKNLPNEKVLPKHSLLYEYFTVYNELTKVKYVTEGMRKPAFLSGEQKKAIVDLLFKTNRKVTVKQLKEDYFKKIECFDSVEISGVEDRFNASLGTYHDLLKIIKDKDFLDNEENEDILEDIVLTLTLFEDREMIEERLKTYAHLFDDKVMKQLKRRRYTGWGRLSRKLINGIRDKQSGKTILDFLKSDGFANRNFMQLIHDDSLTFKEDIQKAQVSGQGDSLHEHIANLAGSPAIKKGILQTVKVVDELVKVMGRHKPENIVIEMARENQTTQKGQKNSRERMKRIEEGIKELGSQILKEHPVENTQLQNEKLYLYYLQNGRDMYVDQELDINRLSDYDVDHIVPQSFLKDDSIDNKVLTRSDKARGKSDNVPSEEVVKKMKNYWRQLLNAKLITQRKFDNLTKAERGGLSELDKAGFIKRQLVETRQITKHVAQILDSRMNTKYDENDKLIREVKVITLKSKLVSDFRKDFQFYKVREINNYHHAHDAYLNAVVGTALIKKYPKLESEFVYGDYKVYDVRKMIAKSEQEIGKATAKYFFYSNIMNFFKTEITLANGEIRKRPLIETNGETGEIVWDKGRDFATVRKVLSMPQVNIVKKTEVQTGGFSKESILPKRNSDKLIARKKDWDPKKYGGFDSPTVAYSVLVVAKVEKGKSKKLKSVKELLGITIMERSSFEKNPIDFLEAKGYKEVKKDLIIKLPKYSLFELENGRKRMLASAGELQKGNELALPSKYVNFLYLASHYEKLKGSPEDNEQKQLFVEQHKHYLDEIIEQISEFSKRVILADANLDKVLSAYNKHRDKPIREQAENIIHLFTLTNLGAPAAFKYFDTTIDRKRYTSTKEVLDATLIHQSITGLYETRIDLSQLGGDGGPAPGSSGGTLNIEDEHRLHETSKEPDVSLGSTWLSDFPQAWAETGGMGLAVRQAPLIIPLKATSTPVSIKQYPMSQEARLGIKPHIQRLLDQGILVPCQSPWNTPLLPVKKPGTNDYRPVQDLREVNKRVEDIHPTVPNPYNLLSGLPPSHQWYTVLDLKDAFFCLRLHPTSQPLFAFEWRDPEMGISGQLTWTRLPQGFKNSPTLFNEALHRDLADFRIQHPDLILLQYVDDLLLAATSELDCQQGTRALLQTLGNLGYRASAKKAQICQKQVKYLGYLLKEGQRWLTEARKETVMGQPTPKTPRQLREFLGTAGFCRLWIPGFAEMAAPLYPLTKPGTLFNWGPDQQKAYQEIKQALLTAPALGLPDLTKPFELFVDEKQGYAKGVLTQKLGPWRRPVAYLSKKLDPVAAGWPPCLRMVAAIAVLTKDAGKLTMGQPLVILAPHAVEALVKQPPDRWLSNARMTHYQALLLDTDRVQFGPVVALNPATLLPLPEEGLQHNCLDILAEAHGTRPDLTDQPLPDADHTWYTDGSSLLQEGQRKAGAAVTTETEVIWAKALPAGTSAQRAELIALTQALKMAEGKKLNVYTDSRYAFATAHIHGEIYRRRGWLTSEGKEIKNKDEILALLKALFLPKRLSIIHCPGHQKGHSAEARGNRMADQAARKAAITETPDTSTLLAGKRTADGSEFEKRTADGSEFESPKKKAKVE

SEQ ID NO: 2997 - protein, 2096 aa, synthetic construct
MPAAKRVKLDGGDKKYSIGLDIGTNSVGWAVITDEYKVPSKKFKVLGNTDRHSIKKNLIGALLFDSGETAEATRLKRTARRRYTRRKNRICYLQEIFSNEMAKVDDSFFHRLEESFLVEEDKKHERHPIFGNIVDEVAYHEKYPTIYHLRKKLVDSTDKADLRLIYLALAHMIKFRGHFLIEGDLNPDNSDVDKLFIQLVQTYNQLFEENPINASGVDAKAILSARLSKSRRLENLIAQLPGEKKNGLFGNLIALSLGLTPNFKSNFDLAEDAKLQLSKDTYDDDLDNLLAQIGDQYADLFLAAKNLSDAILLSDILRVNTEITKAPLSASMIKRYDEHHQDLTLLKALVRQQLPEKYKEIFFDQSKNGYAGYIDGGASQEEFYKFIKPILEKMDGTEELLVKLNREDLLRKQRTFDNGSIPHQIHLGELHAILRRQEDFYPFLKDNREKIEKILTFRIPYYVGPLARGNSRFAWMTRKSEETITPWNFEEVVDKGASAQSFIERMTNFDKNLPNEKVLPKHSLLYEYFTVYNELTKVKYVTEGMRKPAFLSGEQKKAIVDLLFKTNRKVTVKQLKEDYFKKIECFDSVEISGVEDRFNASLGTYHDLLKIIKDKDFLDNEENEDILEDIVLTLTLFEDREMIEERLKTYAHLFDDKVMKQLKRRRYTGWGRLSRKLINGIRDKQSGKTILDFLKSDGFANRNFMQLIHDDSLTFKEDIQKAQVSGQGDSLHEHIANLAGSPAIKKGILQTVKVVDELVKVMGRHKPENIVIEMARENQTTQKGQKNSRERMKRIEEGIKELGSQILKEHPVENTQLQNEKLYLYYLQNGRDMYVDQELDINRLSDYDVDHIVPQSFLKDDSIDNKVLTRSDKARGKSDNVPSEEVVKKMKNYWRQLLNAKLITQRKFDNLTKAERGGLSELDKAGFIKRQLVETRQITKHVAQILDSRMNTKYDENDKLIREVKVITLKSKLVSDFRKDFQFYKVREINNYHHAHDAYLNAVVGTALIKKYPKLESEFVYGDYKVYDVRKMIAKSEQEIGKATAKYFFYSNIMNFFKTEITLANGEIRKRPLIETNGETGEIVWDKGRDFATVRKVLSMPQVNIVKKTEVQTGGFSKESILPKRNSDKLIARKKDWDPKKYGGFDSPTVAYSVLVVAKVEKGKSKKLKSVKELLGITIMERSSFEKNPIDFLEAKGYKEVKKDLIIKLPKYSLFELENGRKRMLASAGELQKGNELALPSKYVNFLYLASHYEKLKGSPEDNEQKQLFVEQHKHYLDEIIEQISEFSKRVILADANLDKVLSAYNKHRDKPIREQAENIIHLFTLTNLGAPAAFKYFDTTIDRKRYTSTKEVLDATLIHQSITGLYETRIDLSQLGGDGGEAAAKGGGGSSGGTLNIEDEHRLHETSKEPDVSLGSTWLSDFPQAWAETGGMGLAVRQAPLIIPLKATSTPVSIKQYPMSQEARLGIKPHIQRLLDQGILVPCQSPWNTPLLPVKKPGTNDYRPVQDLREVNKRVEDIHPTVPNPYNLLSGLPPSHQWYTVLDLKDAFFCLRLHPTSQPLFAFEWRDPEMGISGQLTWTRLPQGFKNSPTLFNEALHRDLADFRIQHPDLILLQYVDDLLLAATSELDCQQGTRALLQTLGNLGYRASAKKAQICQKQVKYLGYLLKEGQRWLTEARKETVMGQPTPKTPRQLREFLGTAGFCRLWIPGFAEMAAPLYPLTKPGTLFNWGPDQQKAYQEIKQALLTAPALGLPDLTKPFELFVDEKQGYAKGVLTQKLGPWRRPVAYLSKKLDPVAAGWPPCLRMVAAIAVLTKDAGKLTMGQPLVILAPHAVEALVKQPPDRWLSNARMTHYQALLLDTDRVQFGPVVALNPATLLPLPEEGLQHNCLDILAEAHGTRPDLTDQPLPDADHTWYTDGSSLLQEGQRKAGAAVTTETEVIWAKALPAGTSAQRAELIALTQALKMAEGKKLNVYTDSRYAFATAHIHGEIYRRRGWLTSEGKEIKNKDEILALLKALFLPKRLSIIHCPGHQKGHSAEARGNRMADQAARKAAITETPDTSTLLAGKRTADGSEFEKRTADGSEFESPKKKAKVE

SEQ ID NO: 2998 - protein, 2100 aa, synthetic construct
MPAAKRVKLDGGDKKYSIGLDIGTNSVGWAVITDEYKVPSKKFKVLGNTDRHSIKKNLIGALLFDSGETAEATRLKRTARRRYTRRKNRICYLQEIFSNEMAKVDDSFFHRLEESFLVEEDKKHERHPIFGNIVDEVAYHEKYPTIYHLRKKLVDSTDKADLRLIYLALAHMIKFRGHFLIEGDLNPDNSDVDKLFIQLVQTYNQLFEENPINASGVDAKAILSARLSKSRRLENLIAQLPGEKKNGLFGNLIALSLGLTPNFKSNFDLAEDAKLQLSKDTYDDDLDNLLAQIGDQYADLFLAAKNLSDAILLSDILRVNTEITKAPLSASMIKRYDEHHQDLTLLKALVRQQLPEKYKEIFFDQSKNGYAGYIDGGASQEEFYKFIKPILEKMDGTEELLVKLNREDLLRKQRTFDNGSIPHQIHLGELHAILRRQEDFYPFLKDNREKIEKILTFRIPYYVGPLARGNSRFAWMTRKSEETITPWNFEEVVDKGASAQSFIERMTNFDKNLPNEKVLPKHSLLYEYFTVYNELTKVKYVTEGMRKPAFLSGEQKKAIVDLLFKTNRKVTVKQLKEDYFKKIECFDSVEISGVEDRFNASLGTYHDLLKIIKDKDFLDNEENEDILEDIVLTLTLFEDREMIEERLKTYAHLFDDKVMKQLKRRRYTGWGRLSRKLINGIRDKQSGKTILDFLKSDGFANRNFMQLIHDDSLTFKEDIQKAQVSGQGDSLHEHIANLAGSPAIKKGILQTVKVVDELVKVMGRHKPENIVIEMARENQTTQKGQKNSRERMKRIEEGIKELGSQILKEHPVENTQLQNEKLYLYYLQNGRDMYVDQELDINRLSDYDVDHIVPQSFLKDDSIDNKVLTRSDKARGKSDNVPSEEVVKKMKNYWRQLLNAKLITQRKFDNLTKAERGGLSELDKAGFIKRQLVETRQITKHVAQILDSRMNTKYDENDKLIREVKVITLKSKLVSDFRKDFQFYKVREINNYHHAHDAYLNAVVGTALIKKYPKLESEFVYGDYKVYDVRKMIAKSEQEIGKATAKYFFYSNIMNFFKTEITLANGEIRKRPLIETNGETGEIVWDKGRDFATVRKVLSMPQVNIVKKTEVQTGGFSKESILPKRNSDKLIARKKDWDPKKYGGFDSPTVAYSVLVVAKVEKGKSKKLKSVKELLGITIMERSSFEKNPIDFLEAKGYKEVKKDLIIKLPKYSLFELENGRKRMLASAGELQKGNELALPSKYVNFLYLASHYEKLKGSPEDNEQKQLFVEQHKHYLDEIIEQISEFSKRVILADANLDKVLSAYNKHRDKPIREQAENIIHLFTLTNLGAPAAFKYFDTTIDRKRYTSTKEVLDATLIHQSITGLYETRIDLSQLGGDGGGSSGSSGSSGSSGSSGGTLNIEDEHRLHETSKEPDVSLGSTWLSDFPQAWAETGGMGLAVRQAPLIIPLKATSTPVSIKQYPMSQEARLGIKPHIQRLLDQGILVPCQSPWNTPLLPVKKPGTNDYRPVQDLREVNKRVEDIHPTVPNPYNLLSGLPPSHQWYTVLDLKDAFFCLRLHPTSQPLFAFEWRDPEMGISGQLTWTRLPQGFKNSPTLFNEALHRDLADFRIQHPDLILLQYVDDLLLAATSELDCQQGTRALLQTLGNLGYRASAKKAQICQKQVKYLGYLLKEGQRWLTEARKETVMGQPTPKTPRQLREFLGTAGFCRLWIPGFAEMAAPLYPLTKPGTLFNWGPDQQKAYQEIKQALLTAPALGLPDLTKPFELFVDEKQGYAKGVLTQKLGPWRRPVAYLSKKLDPVAAGWPPCLRMVAAIAVLTKDAGKLTMGQPLVILAPHAVEALVKQPPDRWLSNARMTHYQALLLDTDRVQFGPVVALNPATLLPLPEEGLQHNCLDILAEAHGTRPDLTDQPLPDADHTWYTDGSSLLQEGQRKAGAAVTTETEVIWAKALPAGTSAQRAELIALTQALKMAEGKKLNVYTDSRYAFATAHIHGEIYRRRGWLTSEGKEIKNKDEILALLKALFLPKRLSIIHCPGHQKGHSAEARGNRMADQAARKAAITETPDTSTLLAGKRTADGSEFEKRTADGSEFESPKKKAKVE

SEQ ID NO: 2999 - protein, 2096 aa, synthetic construct; identical to SEQ ID NO: 2719

SEQ ID NO: 3000 - protein, 2088 aa, synthetic construct
MPAAKRVKLDGGDKKYSIGLDIGTNSVGWAVITDEYKVPSKKFKVLGNTDRHSIKKNLIGALLFDSGETAEATRLKRTARRRYTRRKNRICYLQEIFSNEMAKVDDSFFHRLEESFLVEEDKKHERHPIFGNIVDEVAYHEKYPTIYHLRKKLVDSTDKADLRLIYLALAHMIKFRGHFLIEGDLNPDNSDVDKLFIQLVQTYNQLFEENPINASGVDAKAILSARLSKSRRLENLIAQLPGEKKNGLFGNLIALSLGLTPNFKSNFDLAEDAKLQLSKDTYDDDLDNLLAQIGDQYADLFLAAKNLSDAILLSDILRVNTEITKAPLSASMIKRYDEHHQDLTLLKALVRQQLPEKYKEIFFDQSKNGYAGYIDGGASQEEFYKFIKPILEKMDGTEELLVKLNREDLLRKQRTFDNGSIPHQIHLGELHAILRRQEDFYPFLKDNREKIEKILTFRIPYYVGPLARGNSRFAWMTRKSEETITPWNFEEVVDKGASAQSFIERMTNFDKNLPNEKVLPKHSLLYEYFTVYNELTKVKYVTEGMRKPAFLSGEQKKAIVDLLFKTNRKVTVKQLKEDYFKKIECFDSVEISGVEDRFNASLGTYHDLLKIIKDKDFLDNEENEDILEDIVLTLTLFEDREMIEERLKTYAHLFDDKVMKQLKRRRYTGWGRLSRKLINGIRDKQSGKTILDFLKSDGFANRNFMQLIHDDSLTFKEDIQKAQVSGQGDSLHEHIANLAGSPAIKKGILQTVKVVDELVKVMGRHKPENIVIEMARENQTTQKGQKNSRERMKRIEEGIKELGSQILKEHPVENTQLQNEKLYLYYLQNGRDMYVDQELDINRLSDYDVDHIVPQSFLKDDSIDNKVLTRSDKARGKSDNVPSEEVVKKMKNYWRQLLNAKLITQRKFDNLTKAERGGLSELDKAGFIKRQLVETRQITKHVAQILDSRMNTKYDENDKLIREVKVITLKSKLVSDFRKDFQFYKVREINNYHHAHDAYLNAVVGTALIKKYPKLESEFVYGDYKVYDVRKMIAKSEQEIGKATAKYFFYSNIMNFFKTEITLANGEIRKRPLIETNGETGEIVWDKGRDFATVRKVLSMPQVNIVKKTEVQTGGFSKESILPKRNSDKLIARKKDWDPKKYGGFDSPTVAYSVLVVAKVEKGKSKKLKSVKELLGITIMERSSFEKNPIDFLEAKGYKEVKKDLIIKLPKYSLFELENGRKRMLASAGELQKGNELALPSKYVNFLYLASHYEKLKGSPEDNEQKQLFVEQHKHYLDEIIEQISEFSKRVILADANLDKVLSAYNKHRDKPIREQAENIIHLFTLTNLGAPAAFKYFDTTIDRKRYTSTKEVLDATLIHQSITGLYETRIDLSQLGGDGGGGSGGTLNIEDEHRLHETSKEPDVSLGSTWLSDFPQAWAETGGMGLAVRQAPLIIPLKATSTPVSIKQYPMSQEARLGIKPHIQRLLDQGILVPCQSPWNTPLLPVKKPGTNDYRPVQDLREVNKRVEDIHPTVPNPYNLLSGLPPSHQWYTVLDLKDAFFCLRLHPTSQPLFAFEWRDPEMGISGQLTWTRLPQGFKNSPTLFNEALHRDLADFRIQHPDLILLQYVDDLLLAATSELDCQQGTRALLQTLGNLGYRASAKKAQICQKQVKYLGYLLKEGQRWLTEARKETVMGQPTPKTPRQLREFLGTAGFCRLWIPGFAEMAAPLYPLTKPGTLFNWGPDQQKAYQEIKQALLTAPALGLPDLTKPFELFVDEKQGYAKGVLTQKLGPWRRPVAYLSKKLDPVAAGWPPCLRMVAAIAVLTKDAGKLTMGQPLVILAPHAVEALVKQPPDRWLSNARMTHYQALLLDTDRVQFGPVVALNPATLLPLPEEGLQHNCLDILAEAHGTRPDLTDQPLPDADHTWYTDGSSLLQEGQRKAGAAVTTETEVIWAKALPAGTSAQRAELIALTQALKMAEGKKLNVYTDSRYAFATAHIHGEIYRRRGWLTSEGKEIKNKDEILALLKALFLPKRLSIIHCPGHQKGHSAEARGNRMADQAARKAAITETPDTSTLLAGKRTADGSEFEKRTADGSEFESPKKKAKVE

SEQ ID NO: 3001 - protein, 2100 aa, synthetic construct; identical to SEQ ID NO: 2725

SEQ ID NO: 3002 - protein, 2093 aa, synthetic construct; identical to SEQ ID NO: 2740

SEQ ID NO: 3003 - protein, 2094 aa, synthetic construct; identical to SEQ ID NO: 2752

SEQ ID NO: 3004 - protein, 2097 aa, synthetic construct; identical to SEQ ID NO: 2763

SEQ ID NO: 3005 - protein, 2096 aa, synthetic construct
MPAAKRVKLDGGDKKYSIGLDIGTNSVGWAVITDEYKVPSKKFKVLGNTDRHSIKKNLIGALLFDSGETAEATRLKRTARRRYTRRKNRICYLQEIFSNEMAKVDDSFFHRLEESFLVEEDKKHERHPIFGNIVDEVAYHEKYPTIYHLRKKLVDSTDKADLRLIYLALAHMIKFRGHFLIEGDLNPDNSDVDKLFIQLVQTYNQLFEENPINASGVDAKAILSARLSKSRRLENLIAQLPGEKKNGLFGNLIALSLGLTPNFKSNFDLAEDAKLQLSKDTYDDDLDNLLAQIGDQYADLFLAAKNLSDAILLSDILRVNTEITKAPLSASMIKRYDEHHQDLTLLKALVRQQLPEKYKEIFFDQSKNGYAGYIDGGASQEEFYKFIKPILEKMDGTEELLVKLNREDLLRKQRTFDNGSIPHQIHLGELHAILRRQEDFYPFLKDNREKIEKILTFRIPYYVGPLARGNSRFAWMTRKSEETITPWNFEEVVDKGASAQSFIERMTNFDKNLPNEKVLPKHSLLYEYFTVYNELTKVKYVTEGMRKPAFLSGEQKKAIVDLLFKTNRKVTVKQLKEDYFKKIECFDSVEISGVEDRFNASLGTYHDLLKIIKDKDFLDNEENEDILEDIVLTLTLFEDREMIEERLKTYAHLFDDKVMKQLKRRRYTGWGRLSRKLINGIRDKQSGKTILDFLKSDGFANRNFMQLIHDDSLTFKEDIQKAQVSGQGDSLHEHIANLAGSPAIKKGILQTVKVVDELVKVMGRHKPENIVIEMARENQTTQKGQKNSRERMKRIEEGIKELGSQILKEHPVENTQLQNEKLYLYYLQNGRDMYVDQELDINRLSDYDVDHIVPQSFLKDDSIDNKVLTRSDKARGKSDNVPSEEVVKKMKNYWRQLLNAKLITQRKFDNLTKAERGGLSELDKAGFIKRQLVETRQITKHVAQILDSRMNTKYDENDKLIREVKVITLKSKLVSDFRKDFQFYKVREINNYHHAHDAYLNAVVGTALIKKYPKLESEFVYGDYKVYDVRKMIAKSEQEIGKATAKYFFYSNIMNFFKTEITLANGEIRKRPLIETNGETGEIVWDKGRDFATVRKVLSMPQVNIVKKTEVQTGGFSKESILPKRNSDKLIARKKDWDPKKYGGFDSPTVAYSVLVVAKVEKGKSKKLKSVKELLGITIMERSSFEKNPIDFLEAKGYKEVKKDLIIKLPKYSLFELENGRKRMLASAGELQKGNELALPSKYVNFLYLASHYEKLKGSPEDNEQKQLFVEQHKHYLDEIIEQISEFSKRVILADANLDKVLSAYNKHRDKPIREQAENIIHLFTLTNLGAPAAFKYFDTTIDRKRYTSTKEVLDATLIHQSITGLYETRIDLSQLGGDGGEAAAKPAPGSSGGTLNIEDEHRLHETSKEPDVSLGSTWLSDFPQAWAETGGMGLAVRQAPLIIPLKATSTPVSIKQYPMSQEARLGIKPHIQRLLDQGILVPCQSPWNTPLLPVKKPGTNDYRPVQDLREVNKRVEDIHPTVPNPYNLLSGLPPSHQWYTVLDLKDAFFCLRLHPTSQPLFAFEWRDPEMGISGQLTWTRLPQGFKNSPTLFNEALHRDLADFRIQHPDLILLQYVDDLLLAATSELDCQQGTRALLQTLGNLGYRASAKKAQICQKQVKYLGYLLKEGQRWLTEARKETVMGQPTPKTPRQLREFLGTAGFCRLWIPGFAEMAAPLYPLTKPGTLFNWGPDQQKAYQEIKQALLTAPALGLPDLTKPFELFVDEKQGYAKGVLTQKLGPWRRPVAYLSKKLDPVAAGWPPCLRMVAAIAVLTKDAGKLTMGQPLVILAPHAVEALVKQPPDRWLSNARMTHYQALLLDTDRVQFGPVVALNPATLLPLPEEGLQHNCLDILAEAHGTRPDLTDQPLPDADHTWYTDGSSLLQEGQRKAGAAVTTETEVIWAKALPAGTSAQRAELIALTQALKMAEGKKLNVYTDSRYAFATAHIHGEIYRRRGWLTSEGKEIKNKDEILALLKALFLPKRLSIIHCPGHQKGHSAEARGNRMADQAARKAAITETPDTSTLLAGKRTADGSEFEKRTADGSEFESPKKKAKVE

SEQ ID NO: 3006 - protein, 2089 aa, synthetic construct
MPAAKRVKLDGGDKKYSIGLDIGTNSVGWAVITDEYKVPSKKFKVLGNTDRHSIKKNLIGALLFDSGETAEATRLKRTARRRYTRRKNRICYLQEIFSNEMAKVDDSFFHRLEESFLVEEDKKHERHPIFGNIVDEVAYHEKYPTIYHLRKKLVDSTDKADLRLIYLALAHMIKFRGHFLIEGDLNPDNSDVDKLFIQLVQTYNQLFEENPINASGVDAKAILSARLSKSRRLENLIAQLPGEKKNGLFGNLIALSLGLTPNFKSNFDLAEDAKLQLSKDTYDDDLDNLLAQIGDQYADLFLAAKNLSDAILLSDILRVNTEITKAPLSASMIKRYDEHHQDLTLLKALVRQQLPEKYKEIFFDQSKNGYAGYIDGGASQEEFYKFIKPILEKMDGTEELLVKLNREDLLRKQRTFDNGSIPHQIHLGELHAILRRQEDFYPFLKDNREKIEKILTFRIPYYVGPLARGNSRFAWMTRKSEETITPWNFEEVVDKGASAQSFIERMTNFDKNLPNEKVLPKHSLLYEYFTVYNELTKVKYVTEGMRKPAFLSGEQKKAIVDLLFKTNRKVTVKQLKEDYFKKIECFDSVEISGVEDRFNASLGTYHDLLKIIKDKDFLDNEENEDILEDIVLTLTLFEDREMIEERLKTYAHLFDDKVMKQLKRRRYTGWGRLSRKLINGIRDKQSGKTILDFLKSDGFANRNFMQLIHDDSLTFKEDIQKAQVSGQGDSLHEHIANLAGSPAIKKGILQTVKVVDELVKVMGRHKPENIVIEMARENQTTQKGQKNSRERMKRIEEGIKELGSQILKEHPVENTQLQNEKLYLYYLQNGRDMYVDQELDINRLSDYDVDHIVPQSFLKDDSIDNKVLTRSDKARGKSDNVPSEEVVKKMKNYWRQLLNAKLITQRKFDNLTKAERGGLSELDKAGFIKRQLVETRQITKHVAQILDSRMNTKYDENDKLIREVKVITLKSKLVSDFRKDFQFYKVREINNYHHAHDAYLNAVVGTALIKKYPKLESEFVYGDYKVYDVRKMIAKSEQEIGKATAKYFFYSNIMNFFKTEITLANGEIRKRPLIETNGETGEIVWDKGRDFATVRKVLSMPQVNIVKKTEVQTGGFSKESILPKRNSDKLIARKKDWDPKKYGGFDSPTVAYSVLVVAKVEKGKSKKLKSVKELLGITIMERSSFEKNPIDFLEAKGYKEVKKDLIIKLPKYSLFELENGRKRMLASAGELQKGNELALPSKYVNFLYLASHYEKLKGSPEDNEQKQLFVEQHKHYLDEIIEQISEFSKRVILADANLDKVLSAYNKHRDKPIREQAENIIHLFTLTNLGAPAAFKYFDTTIDRKRYTSTKEVLDATLIHQSITGLYETRIDLSQLGGDGGGGGGGGTLNIEDEHRLHETSKEPDVSLGSTWLSDFPQAWAETGGMGLAVRQAPLIIPLKATSTPVSIKQYPMSQEARLGIKPHIQRLLDQGILVPCQSPWNTPLLPVKKPGTNDYRPVQDLREVNKRVEDIHPTVPNPYNLLSGLPPSHQWYTVLDLKDAFFCLRLHPTSQPLFAFEWRDPEMGISGQLTWTRLPQGFKNSPTLFNEALHRDLADFRIQHPDLILLQYVDDLLLAATSELDCQQGTRALLQTLGNLGYRASAKKAQICQKQVKYLGYLLKEGQRWLTEARKETVMGQPTPKTPRQLREFLGTAGFCRLWIPGFAEMAAPLYPLTKPGTLFNWGPDQQKAYQEIKQALLTAPALGLPDLTKPFELFVDEKQGYAKGVLTQKLGPWRRPVAYLSKKLDPVAAGWPPCLRMVAAIAVLTKDAGKLTMGQPLVILAPHAVEALVKQPPDRWLSNARMTHYQALLLDTDRVQFGPVVALNPATLLPLPEEGLQHNCLDILAEAHGTRPDLTDQPLPDADHTWYTDGSSLLQEGQRKAGAAVTTETEVIWAKALPAGTSAQRAELIALTQALKMAEGKKLNVYTDSRYAFATAHIHGEIYRRRGWLTSEGKEIKNKDEILALLKALFLPKRLSIIHCPGHQKGHSAEARGNRMADQAARKAAITETPDTSTLLAGKRTADGSEFEKRTADGSEFESPKKKAKVE

SEQ ID NO: 3007 - protein, 2096 aa, synthetic construct; identical to SEQ ID NO: 2748

SEQ ID NO: 3008 - protein, 2090 aa, synthetic construct; identical to SEQ ID NO: 2730

SEQ ID NO: 3009 - protein, 2096 aa, synthetic construct
MPAAKRVKLDGGDKKYSIGLDIGTNSVGWAVITDEYKVPSKKFKVLGNTDRHSIKKNLIGALLFDSGETAEATRLKRTARRRYTRRKNRICYLQEIFSNEMAKVDDSFFHRLEESFLVEEDKKHERHPIFGNIVDEVAYHEKYPTIYHLRKKLVDSTDKADLRLIYLALAHMIKFRGHFLIEGDLNPDNSDVDKLFIQLVQTYNQLFEENPINASGVDAKAILSARLSKSRRLENLIAQLPGEKKNGLFGNLIALSLGLTPNFKSNFDLAEDAKLQLSKDTYDDDLDNLLAQIGDQYADLFLAAKNLSDAILLSDILRVNTEITKAPLSASMIKRYDEHHQDLTLLKALVRQQLPEKYKEIFFDQSKNGYAGYIDGGASQEEFYKFIKPILEKMDGTEELLVKLNREDLLRKQRTFDNGSIPHQIHLGELHAILRRQEDFYPFLKDNREKIEKILTFRIPYYVGPLARGNSRFAWMTRKSEETITPWNFEEVVDKGASAQSFIERMTNFDKNLPNEKVLPKHSLLYEYFTVYNELTKVKYVTEGMRKPAFLSGEQKKAIVDLLFKTNRKVTVKQLKEDYFKKIECFDSVEISGVEDRFNASLGTYHDLLKIIKDKDFLDNEENEDILEDIVLTLTLFEDREMIEERLKTYAHLFDDKVMKQLKRRRYTGWGRLSRKLINGIRDKQSGKTILDFLKSDGFANRNFMQLIHDDSLTFKEDIQKAQVSGQGDSLHEHIANLAGSPAIKKGILQTVKVVDELVKVMGRHKPENIVIEMARENQTTQKGQKNSRERMKRIEEGIKELGSQILKEHPVENTQLQNEKLYLYYLQNGRDMYVDQELDINRLSDYDVDHIVPQSFLKDDSIDNKVLTRSDKARGKSDNVPSEEVVKKMKNYWRQLLNAKLITQRKFDNLTKAERGGLSELDKAGFIKRQLVETRQITKHVAQILDSRMNTKYDENDKLIREVKVITLKSKLVSDFRKDFQFYKVREINNYHHAHDAYLNAVVGTALIKKYPKLESEFVYGDYKVYDVRKMIAKSEQEIGKATAKYFFYSNIMNFFKTEITLANGEIRKRPLIETNGETGEIVWDKGRDFATVRKVLSMPQVNIVKKTEVQTGGFSKESILPKRNSDKLIARKKDWDPKKYGGFDSPTVAYSVLVVAKVEKGKSKKLKSVKELLGITIMERSSFEKNPIDFLEAKGYKEVKKDLIIKLPKYSLFELENGRKRMLASAGELQKGNELALPSKYVNFLYLASHYEKLKGSPEDNEQKQLFVEQHKHYLDEIIEQISEFSKRVILADANLDKVLSAYNKHRDKPIREQAENIIHLFTLTNLGAPAAFKYFDTTIDRKRYTSTKEVLDATLIHQSITGLYETRIDLSQLGGDGGPAPEAAAKGGGGGTLNIEDEHRLHETSKEPDVSLGSTWLSDFPQAWAETGGMGLAVRQAPLIIPLKATSTPVSIKQYPMSQEARLGIKPHIQRLLDQGILVPCQSPWNTPLLPVKKPGTNDYRPVQDLREVNKRVEDIHPTVPNPYNLLSGLPPSHQWYTVLDLKDAFFCLRLHPTSQPLFAFEWRDPEMGISGQLTWTRLPQGFKNSPTLFNEALHRDLADFRIQHPDLILLQYVDDLLLAATSELDCQQGTRALLQTLGNLGYRASAKKAQICQKQVKYLGYLLKEGQRWLTEARKETVMGQPTPKTPRQLREFLGTAGFCRLWIPGFAEMAAPLYPLTKPGTLFNWGPDQQKAYQEIKQALLTAPALGLPDLTKPFELFVDEKQGYAKGVLTQKLGPWRRPVAYLSKKLDPVAAGWPPCLRMVAAIAVLTKDAGKLTMGQPLVILAPHAVEALVKQPPDRWLSNARMTHYQALLLDTDRVQFGPVVALNPATLLPLPEEGLQHNCLDILAEAHGTRPDLTDQPLPDADHTWYTDGSSLLQEGQRKAGAAVTTETEVIWAKALPAGTSAQRAELIALTQALKMAEGKKLNVYTDSRYAFATAHIHGEIYRRRGWLTSEGKEIKNKDEILALLKALFLPKRLSIIHCPGHQKGHSAEARGNRMADQAARKAAITETPDTSTLLAGKRTADGSEFEKRTADGSEFESPKKKAKVE

SEQ ID NO: 3010 - protein, 2101 aa, synthetic construct
MPAAKRVKLDGGDKKYSIGLDIGTNSVGWAVITDEYKVPSKKFKVLGNTDRHSIKKNLIGALLFDSGETAEATRLKRTARRRYTRRKNRICYLQEIFSNEMAKVDDSFFHRLEESFLVEEDKKHERHPIFGNIVDEVAYHEKYPTIYHLRKKLVDSTDKADLRLIYLALAHMIKFRGHFLIEGDLNPDNSDVDKLFIQLVQTYNQLFEENPINASGVDAKAILSARLSKSRRLENLIAQLPGEKKNGLFGNLIALSLGLTPNFKSNFDLAEDAKLQLSKDTYDDDLDNLLAQIGDQYADLFLAAKNLSDAILLSDILRVNTEITKAPLSASMIKRYDEHHQDLTLLKALVRQQLPEKYKEIFFDQSKNGYAGYIDGGASQEEFYKFIKPILEKMDGTEELLVKLNREDLLRKQRTFDNGSIPHQIHLGELHAILRRQEDFYPFLKDNREKIEKILTFRIPYYVGPLARGNSRFAWMTRKSEETITPWNFEEVVDKGASAQSFIERMTNFDKNLPNEKVLPKHSLLYEYFTVYNELTKVKYVTEGMRKPAFLSGEQKKAIVDLLFKTNRKVTVKQLKEDYFKKIECFDSVEISGVEDRFNASLGTYHDLLKIIKDKDFLDNEENEDILEDIVLTLTLFEDREMIEERLKTYAHLFDDKVMKQLKRRRYTGWGRLSRKLINGIRDKQSGKTILDFLKSDGFANRNFMQLIHDDSLTFKEDIQKAQVSGQGDSLHEHIANLAGSPAIKKGILQTVKVVDELVKVMGRHKPENIVIEMARENQTTQKGQKNSRERMKRIEEGIKELGSQILKEHPVENTQLQNEKLYLYYLQNGRDMYVDQELDINRLSDYDVDHIVPQSFLKDDSIDNKVLTRSDKARGKSDNVPSEEVVKKMKNYWRQLLNAKLITQRKFDNLTKAERGGLSELDKAGFIKRQLVETRQITKHVAQILDSRMNTKYDENDKLIREVKVITLKSKLVSDFRKDFQFYKVREINNYHHAHDAYLNAVVGTALIKKYPKLESEFVYGDYKVYDVRKMIAKSEQEIGKATAKYFFYSNIMNFFKTEITLANGEIRKRPLIETNGETGEIVWDKGRDFATVRKVLSMPQVNIVKKTEVQTGGFSKESILPKRNSDKLIARKKDWDPKKYGGFDSPTVAYSVLVVAKVEKGKSKKLKSVKELLGITIMERSSFEKNPIDFLEAKGYKEVKKDLIIKLPKYSLFELENGRKRMLASAGELQKGNELALPSKYVNFLYLASHYEKLKGSPEDNEQKQLFVEQHKHYLDEIIEQISEFSKRVILADANLDKVLSAYNKHRDKPIREQAENIIHLFTLTNLGAPAAFKYFDTTIDRKRYTSTKEVLDATLIHQSITGLYETRIDLSQLGGDGGSGSETPGTSESATPESGGTLNIEDEHRLHETSKEPDVSLGSTWLSDFPQAWAETGGMGLAVRQAPLIIPLKATSTPVSIKQYPMSQEARLGIKPHIQRLLDQGILVPCQSPWNTPLLPVKKPGTNDYRPVQDLREVNKRVEDIHPTVPNPYNLLSGLPPSHQWYTVLDLKDAFFCLRLHPTSQPLFAFEWRDPEMGISGQLTWTRLPQGFKNSPTLFNEALHRDLADFRIQHPDLILLQYVDDLLLAATSELDCQQGTRALLQTLGNLGYRASAKKAQICQKQVKYLGYLLKEGQRWLTEARKETVMGQPTPKTPRQLREFLGTAGFCRLWIPGFAEMAAPLYPLTKPGTLFNWGPDQQKAYQEIKQALLTAPALGLPDLTKPFELFVDEKQGYAKGVLTQKLGPWRRPVAYLSKKLDPVAAGWPPCLRMVAAIAVLTKDAGKLTMGQPLVILAPHAVEALVKQPPDRWLSNARMTHYQALLLDTDRVQFGPVVALNPATLLPLPEEGLQHNCLDILAEAHGTRPDLTDQPLPDADHTWYTDGSSLLQEGQRKAGAAVTTETEVIWAKALPAGTSAQRAELIALTQALKMAEGKKLNVYTDSRYAFATAHIHGEIYRRRGWLTSEGKEIKNKDEILALLKALFLPKRLSIIHCPGHQKGHSAEARGNRMADQAARKAAITETPDTSTLLAGKRTADGSEFEKRTADGSEFESPKKKAKVE

SEQ ID NO: 3011 - protein, 2091 aa, synthetic construct
MPAAKRVKLDGGDKKYSIGLDIGTNSVGWAVITDEYKVPSKKFKVLGNTDRHSIKKNLIGALLFDSGETAEATRLKRTARRRYTRRKNRICYLQEIFSNEMAKVDDSFFHRLEESFLVEEDKKHERHPIFGNIVDEVAYHEKYPTIYHLRKKLVDSTDKADLRLIYLALAHMIKFRGHFLIEGDLNPDNSDVDKLFIQLVQTYNQLFEENPINASGVDAKAILSARLSKSRRLENLIAQLPGEKKNGLFGNLIALSLGLTPNFKSNFDLAEDAKLQLSKDTYDDDLDNLLAQIGDQYADLFLAAKNLSDAILLSDILRVNTEITKAPLSASMIKRYDEHHQDLTLLKALVRQQLPEKYKEIFFDQSKNGYAGYIDGGASQEEFYKFIKPILEKMDGTEELLVKLNREDLLRKQRTFDNGSIPHQIHLGELHAILRRQEDFYPFLKDNREKIEKILTFRIPYYVGPLARGNSRFAWMTRKSEETITPWNFEEVVDKGASAQSFIERMTNFDKNLPNEKVLPKHSLLYEYFTVYNELTKVKYVTEGMRKPAFLSGEQKKAIVDLLFKTNRKVTVKQLKEDYFKKIECFDSVEISGVEDRFNASLGTYHDLLKIIKDKDFLDNEENEDILEDIVLTLTLFEDREMIEERLKTYAHLFDDKVMKQLKRRRYTGWGRLSRKLINGIRDKQSGKTILDFLKSDGFANRNFMQLIHDDSLTFKEDIQKAQVSGQGDSLHEHIANLAGSPAIKKGILQTVKVVDELVKVMGRHKPENIVIEMARENQTTQKGQKNSRERMKRIEEGIKELGSQILKEHPVENTQLQNEKLYLYYLQNGRDMYVDQELDINRLSDYDVDHIVPQSFLKDDSIDNKVLTRSDKARGKSDNVPSEEVVKKMKNYWRQLLNAKLITQRKFDNLTKAERGGLSELDKAGFIKRQLVETRQITKHVAQILDSRMNTKYDENDKLIREVKVITLKSKLVSDFRKDFQFYKVREINNYHHAHDAYLNAVVGTALIKKYPKLESEFVYGDYKVYDVRKMIAKSEQEIGKATAKYFFYSNIMNFFKTEITLANGEIRKRPLIETNGETGEIVWDKGRDFATVRKVLSMPQVNIVKKTEVQTGGFSKESILPKRNSDKLIARKKDWDPKKYGGFDSPTVAYSVLVVAKVEKGKSKKLKSVKELLGITIMERSSFEKNPIDFLEAKGYKEVKKDLIIKLPKYSLFELENGRKRMLASAGELQKGNELALPSKYVNFLYLASHYEKLKGSPEDNEQKQLFVEQHKHYLDEIIEQISEFSKRVILADANLDKVLSAYNKHRDKPIREQAENIIHLFTLTNLGAPAAFKYFDTTIDRKRYTSTKEVLDATLIHQSITGLYETRIDLSQLGGDGGGGSGSSGGTLNIEDEHRLHETSKEPDVSLGSTWLSDFPQAWAETGGMGLAVRQAPLIIPLKATSTPVSIKQYPMSQEARLGIKPHIQRLLDQGILVPCQSPWNTPLLPVKKPGTNDYRPVQDLREVNKRVEDIHPTVPNPYNLLSGLPPSHQWYTVLDLKDAFFCLRLHPTSQPLFAFEWRDPEMGISGQLTWTRLPQGFKNSPTLFNEALHRDLADFRIQHPDLILLQYVDDLLLAATSELDCQQGTRALLQTLGNLGYRASAKKAQICQKQVKYLGYLLKEGQRWLTEARKETVMGQPTPKTPRQLREFLGTAGFCRLWIPGFAEMAAPLYPLTKPGTLFNWGPDQQKAYQEIKQALLTAPALGLPDLTKPFELFVDEKQGYAKGVLTQKLGPWRRPVAYLSKKLDPVAAGWPPCLRMVAAIAVLTKDAGKLTMGQPLVILAPHAVEALVKQPPDRWLSNARMTHYQALLLDTDRVQFGPVVALNPATLLPLPEEGLQHNCLDILAEAHGTRPDLTDQPLPDADHTWYTDGSSLLQEGQRKAGAAVTTETEVIWAKALPAGTSAQRAELIALTQALKMAEGKKLNVYTDSRYAFATAHIHGEIYRRRGWLTSEGKEIKNKDEILALLKALFLPKRLSIIHCPGHQKGHSAEARGNRMADQAARKAAITETPDTSTLLAGKRTADGSEFEKRTADGSEFESPKKKAKVE

SEQ ID NO: 3012 - protein, 2096 aa, synthetic construct; identical to SEQ ID NO: 2758

SEQ ID NO: 3013 - protein, 2094 aa, synthetic construct
MPAAKRVKLDGGDKKYSIGLDIGTNSVGWAVITDEYKVPSKKFKVLGNTDRHSIKKNLIGALLFDSGETAEATRLKRTARRRYTRRKNRICYLQEIFSNEMAKVDDSFFHRLEESFLVEEDKKHERHPIFGNIVDEVAYHEKYPTIYHLRKKLVDSTDKADLRLIYLALAHMIKFRGHFLIEGDLNPDNSDVDKLFIQLVQTYNQLFEENPINASGVDAKAILSARLSKSRRLENLIAQLPGEKKNGLFGNLIALSLGLTPNFKSNFDLAEDAKLQLSKDTYDDDLDNLLAQIGDQYADLFLAAKNLSDAILLSDILRVNTEITKAPLSASMIKRYDEHHQDLTLLKALVRQQLPEKYKEIFFDQSKNGYAGYIDGGASQEEFYKFIKPILEKMDGTEELLVKLNREDLLRKQRTFDNGSIPHQIHLGELHAILRRQEDFYPFLKDNREKIEKILTFRIPYYVGPLARGNSRFAWMTRKSEETITPWNFEEVVDKGASAQSFIERMTNFDKNLPNEKVLPKHSLLYEYFTVYNELTKVKYVTEGMRKPAFLSGEQKKAIVDLLFKTNRKVTVKQLKEDYFKKIECFDSVEISGVEDRFNASLGTYHDLLKIIKDKDFLDNEENEDILEDIVLTLTLFEDREMIEERLKTYAHLFDDKVMKQLKRRRYTGWGRLSRKLINGIRDKQSGKTILDFLKSDGFANRNFMQLIHDDSLTFKEDIQKAQVSGQGDSLHEHIANLAGSPAIKKGILQTVKVVDELVKVMGRHKPENIVIEMARENQTTQKGQKNSRERMKRIEEGIKELGSQILKEHPVENTQLQNEKLYLYYLQNGRDMYVDQELDINRLSDYDVDHIVPQSFLKDDSIDNKVLTRSDKARGKSDNVPSEEVVKKMKNYWRQLLNAKLITQRKFDNLTKAERGGLSELDKAGFIKRQLVETRQITKHVAQILDSRMNTKYDENDKLIREVKVITLKSKLVSDFRKDFQFYKVREINNYHHAHDAYLNAVVGTALIKKYPKLESEFVYGDYKVYDVRKMIAKSEQEIGKATAKYFFYSNIMNFFKTEITLANGEIRKRPLIETNGETGEIVWDKGRDFATVRKVLSMPQVNIVKKTEVQTGGFSKESILPKRNSDKLIARKKDWDPKKYGGFDSPTVAYSVLVVAKVEKGKSKKLKSVKELLGITIMERSSFEKNPIDFLEAKGYKEVKKDLIIKLPKYSLFELENGRKRMLASAGELQKGNELALPSKYVNFLYLASHYEKLKGSPEDNEQKQLFVEQHKHYLDEIIEQISEFSKRVILADANLDKVLSAYNKHRDKPIREQAENIIHLFTLTNLGAPAAFKYFDTTIDRKRYTSTKEVLDATLIHQSITGLYETRIDLSQLGGDGGPAPGGSGGGGGTLNIEDEHRLHETSKEPDVSLGSTWLSDFPQAWAETGGMGLAVRQAPLIIPLKATSTPVSIKQYPMSQEARLGIKPHIQRLLDQGILVPCQSPWNTPLLPVKKPGTNDYRPVQDLREVNKRVEDIHPTVPNPYNLLSGLPPSHQWYTVLDLKDAFFCLRLHPTSQPLFAFEWRDPEMGISGQLTWTRLPQGFKNSPTLFNEALHRDLADFRIQHPDLILLQYVDDLLLAATSELDCQQGTRALLQTLGNLGYRASAKKAQICQKQVKYLGYLLKEGQRWLTEARKETVMGQPTPKTPRQLREFLGTAGFCRLWIPGFAEMAAPLYPLTKPGTLFNWGPDQQKAYQEIKQALLTAPALGLPDLTKPFELFVDEKQGYAKGVLTQKLGPWRRPVAYLSKKLDPVAAGWPPCLRMVAAIAVLTKDAGKLTMGQPLVILAPHAVEALVKQPPDRWLSNARMTHYQALLLDTDRVQFGPVVALNPATLLPLPEEGLQHNCLDILAEAHGTRPDLTDQPLPDADHTWYTDGSSLLQEGQRKAGAAVTTETEVIWAKALPAGTSAQRAELIALTQALKMAEGKKLNVYTDSRYAFATAHIHGEIYRRRGWLTSEGKEIKNKDEILALLKALFLPKRLSIIHCPGHQKGHSAEARGNRMADQAARKAAITETPDTSTLLAGKRTADGSEFEKRTADGSEFESPKKKAKVE

SEQ ID NO: 3014 - protein, 2096 aa, synthetic construct; identical to SEQ ID NO: 2714

SEQ ID NO: 3015 - protein, 2093 aa, synthetic construct; identical to SEQ ID NO: 2718

SEQ ID NO: 3016 - protein, 2094 aa, synthetic construct; identical to SEQ ID NO: 2762

SEQ ID NO: 3017 - protein, 2095 aa, synthetic construct; identical to SEQ ID NO: 2749

SEQ ID NO: 3018 - protein, 2096 aa, synthetic construct; identical to SEQ ID NO: 2721

SEQ ID NO: 3019 - protein, 2096 aa, synthetic construct; identical to SEQ ID NO: 2747

SEQ ID NO: 3020 - protein, 2096 aa, synthetic construct; identical to SEQ ID NO: 2755

SEQ ID NO: 3021 - protein, 2096 aa, synthetic construct
MPAAKRVKLDGGDKKYSIGLDIGTNSVGWAVITDEYKVPSKKFKVLGNTDRHSIKKNLIGALLFDSGETAEATRLKRTARRRYTRRKNRICYLQEIFSNEMAKVDDSFFHRLEESFLVEEDKKHERHPIFGNIVDEVAYHEKYPTIYHLRKKLVDSTDKADLRLIYLALAHMIKFRGHFLIEGDLNPDNSDVDKLFIQLVQTYNQLFEENPINASGVDAKAILSARLSKSRRLENLIAQLPGEKKNGLFGNLIALSLGLTPNFKSNFDLAEDAKLQLSKDTYDDDLDNLLAQIGDQYADLFLAAKNLSDAILLSDILRVNTEITKAPLSASMIKRYDEHHQDLTLLKALVRQQLPEKYKEIFFDQSKNGYAGYIDGGASQEEFYKFIKPILEKMDGTEELLVKLNREDLLRKQRTFDNGSIPHQIHLGELHAILRRQEDFYPFLKDNREKIEKILTFRIPYYVGPLARGNSRFAWMTRKSEETITPWNFEEVVDKGASAQSFIERMTNFDKNLPNEKVLPKHSLLYEYFTVYNELTKVKYVTEGMRKPAFLSGEQKKAIVDLLFKTNRKVTVKQLKEDYFKKIECFDSVEISGVEDRFNASLGTYHDLLKIIKDKDFLDNEENEDILEDIVLTLTLFEDREMIEERLKTYAHLFDDKVMKQLKRRRYTGWGRLSRKLINGIRDKQSGKTILDFLKSDGFANRNFMQLIHDDSLTFKEDIQKAQVSGQGDSLHEHIANLAGSPAIKKGILQTVKVVDELVKVMGRHKPENIVIEMARENQTTQKGQKNSRERMKRIEEGIKELGSQILKEHPVENTQLQNEKLYLYYLQNGRDMYVDQELDINRLSDYDVDHIVPQSFLKDDSIDNKVLTRSDKARGKSDNVPSEEVVKKMKNYWRQLLNAKLITQRKFDNLTKAERGGLSELDKAGFIKRQLVETRQITKHVAQILDSRMNTKYDENDKLIREVKVITLKSKLVSDFRKDFQFYKVREINNYHHAHDAYLNAVVGTALIKKYPKLESEFVYGDYKVYDVRKMIAKSEQEIGKATAKYFFYSNIMNFFKTEITLANGEIRKRPLIETNGETGEIVWDKGRDFATVRKVLSMPQVNIVKKTEVQTGGFSKESILPKRNSDKLIARKKDWDPKKYGGFDSPTVAYSVLVVAKVEKGKSKKLKSVKELLGITIMERSSFEKNPIDFLEAKGYKEVKKDLIIKLPKYSLFELENGRKRMLASAGELQKGNELALPSKYVNFLYLASHYEKLKGSPEDNEQKQLFVEQHKHYLDEIIEQISEFSKRVILADANLDKVLSAYNKHRDKPIREQAENIIHLFTLTNLGAPAAFKYFDTTIDRKRYTSTKEVLDATLIHQSITGLYETRIDLSQLGGDGGEAAAKGSSGGSGGTLNIEDEHRLHETSKEPDVSLGSTWLSDFPQAWAETGGMGLAVRQAPLIIPLKATSTPVSIKQYPMSQEARLGIKPHIQRLLDQGILVPCQSPWNTPLLPVKKPGTNDYRPVQDLREVNKRVEDIHPTVPNPYNLLSGLPPSHQWYTVLDLKDAFFCLRLHPTSQPLFAFEWRDPEMGISGQLTWTRLPQGFKNSPTLFNEALHRDLADFRIQHPDLILLQYVDDLLLAATSELDCQQGTRALLQTLGNLGYRASAKKAQICQKQVKYLGYLLKEGQRWLTEARKETVMGQPTPKTPRQLREFLGTAGFCRLWIPGFAEMAAPLYPLTKPGTLFNWGPDQQKAYQEIKQALLTAPALGLPDLTKPFELFVDEKQGYAKGVLTQKLGPWRRPVAYLSKKLDPVAAGWPPCLRMVAAIAVLTKDAGKLTMGQPLVILAPHAVEALVKQPPDRWLSNARMTHYQALLLDTDRVQFGPVVALNPATLLPLPEEGLQHNCLDILAEAHGTRPDLTDQPLPDADHTWYTDGSSLLQEGQRKAGAAVTTETEVIWAKALPAGTSAQRAELIALTQALKMAEGKKLNVYTDSRYAFATAHIHGEIYRRRGWLTSEGKEIKNKDEILALLKALFLPKRLSIIHCPGHQKGHSAEARGNRMADQAARKAAITETPDTSTLLAGKRTADGSEFEKRTADGSEFESPKKKAKVE

SEQ ID NO: 3022 - protein, 2094 aa, synthetic construct
MPAAKRVKLDGGDKKYSIGLDIGTNSVGWAVITDEYKVPSKKFKVLGNTDRHSIKKNLIGALLFDSGETAEATRLKRTARRRYTRRKNRICYLQEIFSNEMAKVDDSFFHRLEESFLVEEDKKHERHPIFGNIVDEVAYHEKYPTIYHLRKKLVDSTDKADLRLIYLALAHMIKFRGHFLIEGDLNPDNSDVDKLFIQLVQTYNQLFEENPINASGVDAKAILSARLSKSRRLENLIAQLPGEKKNGLFGNLIALSLGLTPNFKSNFDLAEDAKLQLSKDTYDDDLDNLLAQIGDQYADLFLAAKNLSDAILLSDILRVNTEITKAPLSASMIKRYDEHHQDLTLLKALVRQQLPEKYKEIFFDQSKNGYAGYIDGGASQEEFYKFIKPILEKMDGTEELLVKLNREDLLRKQRTFDNGSIPHQIHLGELHAILRRQEDFYPFLKDNREKIEKILTFRIPYYVGPLARGNSRFAWMTRKSEETITPWNFEEVVDKGASAQSFIERMTNFDKNLPNEKVLPKHSLLYEYFTVYNELTKVKYVTEGMRKPAFLSGEQKKAIVDLLFKTNRKVTVKQLKEDYFKKIECFDSVEISGVEDRFNASLGTYHDLLKIIKDKDFLDNEENEDILEDIVLTLTLFEDREMIEERLKTYAHLFDDKVMKQLKRRRYTGWGRLSRKLINGIRDKQSGKTILDFLKSDGFANRNFMQLIHDDSLTFKEDIQKAQVSGQGDSLHEHIANLAGSPAIKKGILQTVKVVDELVKVMGRHKPENIVIEMARENQTTQKGQKNSRERMKRIEEGIKELGSQILKEHPVENTQLQNEKLYLYYLQNGRDMYVDQELDINRLSDYDVDHIVPQSFLKDDSIDNKVLTRSDKARGKSDNVPSEEVVKKMKNYWRQLLNAKLITQRKFDNLTKAERGGLSELDKAGFIKRQLVETRQITKHVAQILDSRMNTKYDENDKLIREVKVITLKSKLVSDFRKDFQFYKVREINNYHHAHDAYLNAVVGTALIKKYPKLESEFVYGDYKVYDVRKMIAKSEQEIGKATAKYFFYSNIMNFFKTEITLANGEIRKRPLIETNGETGEIVWDKGRDFATVRKVLSMPQVNIVKKTEVQTGGFSKESILPKRNSDKLIARKKDWDPKKYGGFDSPTVAYSVLVVAKVEKGKSKKLKSVKELLGITIMERSSFEKNPIDFLEAKGYKEVKKDLIIKLPKYSLFELENGRKRMLASAGELQKGNELALPSKYVNFLYLASHYEKLKGSPEDNEQKQLFVEQHKHYLDEIIEQISEFSKRVILADANLDKVLSAYNKHRDKPIREQAENIIHLFTLTNLGAPAAFKYFDTTIDRKRYTSTKEVLDATLIHQSITGLYETRIDLSQLGGDGGGGGGSSGGSGGTLNIEDEHRLHETSKEPDVSLGSTWLSDFPQAWAETGGMGLAVRQAPLIIPLKATSTPVSIKQYPMSQEARLGIKPHIQRLLDQGILVPCQSPWNTPLLPVKKPGTNDYRPVQDLREVNKRVEDIHPTVPNPYNLLSGLPPSHQWYTVLDLKDAFFCLRLHPTSQPLFAFEWRDPEMGISGQLTWTRLPQGFKNSPTLFNEALHRDLADFRIQHPDLILLQYVDDLLLAATSELDCQQGTRALLQTLGNLGYRASAKKAQICQKQVKYLGYLLKEGQRWLTEARKETVMGQPTPKTPRQLREFLGTAGFCRLWIPGFAEMAAPLYPLTKPGTLFNWGPDQQKAYQEIKQALLTAPALGLPDLTKPFELFVDEKQGYAKGVLTQKLGPWRRPVAYLSKKLDPVAAGWPPCLRMVAAIAVLTKDAGKLTMGQPLVILAPHAVEALVKQPPDRWLSNARMTHYQALLLDTDRVQFGPVVALNPATLLPLPEEGLQHNCLDILAEAHGTRPDLTDQPLPDADHTWYTDGSSLLQEGQRKAGAAVTTETEVIWAKALPAGTSAQRAELIALTQALKMAEGKKLNVYTDSRYAFATAHIHGEIYRRRGWLTSEGKEIKNKDEILALLKALFLPKRLSIIHCPGHQKGHSAEARGNRMADQAARKAAITETPDTSTLLAGKRTADGSEFEKRTADGSEFESPKKKAKVE

SEQ ID NO: 3023 - protein, 2096 aa, synthetic construct; identical to SEQ ID NO: 2759

SEQ ID NO: 3024 - protein, 2092 aa, synthetic construct
MPAAKRVKLDGGDKKYSIGLDIGTNSVGWAVITDEYKVPSKKFKVLGNTDRHSIKKNLIGALLFDSGETAEATRLKRTARRRYTRRKNRICYLQEIFSNEMAKVDDSFFHRLEESFLVEEDKKHERHPIFGNIVDEVAYHEKYPTIYHLRKKLVDSTDKADLRLIYLALAHMIKFRGHFLIEGDLNPDNSDVDKLFIQLVQTYNQLFEENPINASGVDAKAILSARLSKSRRLENLIAQLPGEKKNGLFGNLIALSLGLTPNFKSNFDLAEDAKLQLSKDTYDDDLDNLLAQIGDQYADLFLAAKNLSDAILLSDILRVNTEITKAPLSASMIKRYDEHHQDLTLLKALVRQQLPEKYKEIFFDQSKNGYAGYIDGGASQEEFYKFIKPILEKMDGTEELLVKLNREDLLRKQRTFDNGSIPHQIHLGELHAILRRQEDFYPFLKDNREKIEKILTFRIPYYVGPLARGNSRFAWMTRKSEETITPWNFEEVVDKGASAQSFIERMTNFDKNLPNEKVLPKHSLLYEYFTVYNELTKVKYVTEGMRKPAFLSGEQKKAIVDLLFKTNRKVTVKQLKEDYFKKIECFDSVEISGVEDRFNASLGTYHDLLKIIKDKDFLDNEENEDILEDIVLTLTLFEDREMIEERLKTYAHLFDDKVMKQLKRRRYTGWGRLSRKLINGIRDKQSGKTILDFLKSDGFANRNFMQLIHDDSLTFKEDIQKAQVSGQGDSLHEHIANLAGSPAIKKGILQTVKVVDELVKVMGRHKPENIVIEMARENQTTQKGQKNSRERMKRIEEGIKELGSQILKEHPVENTQLQNEKLYLYYLQNGRDMYVDQELDINRLSDYDVDHIVPQSFLKDDSIDNKVLTRSDKARGKSDNVPSEEVVKKMKNYWRQLLNAKLITQRKFDNLTKAERGGLSELDKAGFIKRQLVETRQITKHVAQILDSRMNTKYDENDKLIREVKVITLKSKLVSDFRKDFQFYKVREINNYHHAHDAYLNAVVGTALIKKYPKLESEFVYGDYKVYDVRKMIAKSEQEIGKATAKYFFYSNIMNFFKTEITLANGEIRKRPLIETNGETGEIVWDKGRDFATVRKVLSMPQVNIVKKTEVQTGGFSKESILPKRNSDKLIARKKDWDPKKYGGFDSPTVAYSVLVVAKVEKGKSKKLKSVKELLGITIMERSSFEKNPIDFLEAKGYKEVKKDLIIKLPKYSLFELENGRKRMLASAGELQKGNELALPSKYVNFLYLASHYEKLKGSPEDNEQKQLFVEQHKHYLDEIIEQISEFSKRVILADANLDKVLSAYNKHRDKPIREQAENIIHLFTLTNLGAPAAFKYFDTTIDRKRYTSTKEVLDATLIHQSITGLYETRIDLSQLGGDGGGGGGGGGGGTLNIEDEHRLHETSKEPDVSLGSTWLSDFPQAWAETGGMGLAVRQAPLIIPLKATSTPVSIKQYPMSQEARLGIKPHIQRLLDQGILVPCQSPWNTPLLPVKKPGTNDYRPVQDLREVNKRVEDIHPTVPNPYNLLSGLPPSHQWYTVLDLKDAFFCLRLHPTSQPLFAFEWRDPEMGISGQLTWTRLPQGFKNSPTLFNEALHRDLADFRIQHPDLILLQYVDDLLLAATSELDCQQGTRALLQTLGNLGYRASAKKAQICQKQVKYLGYLLKEGQRWLTEARKETVMGQPTPKTPRQLREFLGTAGFCRLWIPGFAEMAAPLYPLTKPGTLFNWGPDQQKAYQEIKQALLTAPALGLPDLTKPFELFVDEKQGYAKGVLTQKLGPWRRPVAYLSKKLDPVAAGWPPCLRMVAAIAVLTKDAGKLTMGQPLVILAPHAVEALVKQPPDRWLSNARMTHYQALLLDTDRVQFGPVVALNPATLLPLPEEGLQHNCLDILAEAHGTRPDLTDQPLPDADHTWYTDGSSLLQEGQRKAGAAVTTETEVIWAKALPAGTSAQRAELIALTQALKMAEGKKLNVYTDSRYAFATAHIHGEIYRRRGWLTSEGKEIKNKDEILALLKALFLPKRLSIIHCPGHQKGHSAEARGNRMADQAARKAAITETPDTSTLLAGKRTADGSEFEKRTADGSEFESPKKKAKVE

SEQ ID NO: 3025 - protein, 2094 aa, synthetic construct; identical to SEQ ID NO: 2742

SEQ ID NO: 3026 - protein, 2094 aa, synthetic construct; identical to SEQ ID NO: 2715

SEQ ID NO: 3027 - protein, 2097 aa, synthetic construct; identical to SEQ ID NO: 2728

SEQ ID NO: 3028 - protein, 2091 aa, synthetic construct; identical to SEQ ID NO: 2743

SEQ ID NO: 3029 - protein, 2090 aa, synthetic construct
MPAAKRVKLDGGDKKYSIGLDIGTNSVGWAVITDEYKVPSKKFKVLGNTDRHSIKKNLIGALLFDSGETAEATRLKRTARRRYTRRKNRICYLQEIFSNEMAKVDDSFFHRLEESFLVEEDKKHERHPIFGNIVDEVAYHEKYPTIYHLRKKLVDSTDKADLRLIYLALAHMIKFRGHFLIEGDLNPDNSDVDKLFIQLVQTYNQLFEENPINASGVDAKAILSARLSKSRRLENLIAQLPGEKKNGLFGNLIALSLGLTPNFKSNFDLAEDAKLQLSKDTYDDDLDNLLAQIGDQYADLFLAAKNLSDAILLSDILRVNTEITKAPLSASMIKRYDEHHQDLTLLKALVRQQLPEKYKEIFFDQSKNGYAGYIDGGASQEEFYKFIKPILEKMDGTEELLVKLNREDLLRKQRTFDNGSIPHQIHLGELHAILRRQEDFYPFLKDNREKIEKILTFRIPYYVGPLARGNSRFAWMTRKSEETITPWNFEEVVDKGASAQSFIERMTNFDKNLPNEKVLPKHSLLYEYFTVYNELTKVKYVTEGMRKPAFLSGEQKKAIVDLLFKTNRKVTVKQLKEDYFKKIECFDSVEISGVEDRFNASLGTYHDLLKIIKDKDFLDNEENEDILEDIVLTLTLFEDREMIEERLKTYAHLFDDKVMKQLKRRRYTGWGRLSRKLINGIRDKQSGKTILDFLKSDGFANRNFMQLIHDDSLTFKEDIQKAQVSGQGDSLHEHIANLAGSPAIKKGILQTVKVVDELVKVMGRHKPENIVIEMARENQTTQKGQKNSRERMKRIEEGIKELGSQILKEHPVENTQLQNEKLYLYYLQNGRDMYVDQELDINRLSDYDVDHIVPQSFLKDDSIDNKVLTRSDKARGKSDNVPSEEVVKKMKNYWRQLLNAKLITQRKFDNLTKAERGGLSELDKAGFIKRQLVETRQITKHVAQILDSRMNTKYDENDKLIREVKVITLKSKLVSDFRKDFQFYKVREINNYHHAHDAYLNAVVGTALIKKYPKLESEFVYGDYKVYDVRKMIAKSEQEIGKATAKYFFYSNIMNFFKTEITLANGEIRKRPLIETNGETGEIVWDKGRDFATVRKVLSMPQVNIVKKTEVQTGGFSKESILPKRNSDKLIARKKDWDPKKYGGFDSPTVAYSVLVVAKVEKGKSKKLKSVKELLGITIMERSSFEKNPIDFLEAKGYKEVKKDLIIKLPKYSLFELENGRKRMLASAGELQKGNELALPSKYVNFLYLASHYEKLKGSPEDNEQKQLFVEQHKHYLDEIIEQISEFSKRVILADANLDKVLSAYNKHRDKPIREQAENIIHLFTLTNLGAPAAFKYFDTTIDRKRYTSTKEVLDATLIHQSITGLYETRIDLSQLGGDGGPAPAPGGTLNIEDEHRLHETSKEPDVSLGSTWLSDFPQAWAETGGMGLAVRQAPLIIPLKATSTPVSIKQYPMSQEARLGIKPHIQRLLDQGILVPCQSPWNTPLLPVKKPGTNDYRPVQDLREVNKRVEDIHPTVPNPYNLLSGLPPSHQWYTVLDLKDAFFCLRLHPTSQPLFAFEWRDPEMGISGQLTWTRLPQGFKNSPTLFNEALHRDLADFRIQHPDLILLQYVDDLLLAATSELDCQQGTRALLQTLGNLGYRASAKKAQICQKQVKYLGYLLKEGQRWLTEARKETVMGQPTPKTPRQLREFLGTAGFCRLWIPGFAEMAAPLYPLTKPGTLFNWGPDQQKAYQEIKQALLTAPALGLPDLTKPFELFVDEKQGYAKGVLTQKLGPWRRPVAYLSKKLDPVAAGWPPCLRMVAAIAVLTKDAGKLTMGQPLVILAPHAVEALVKQPPDRWLSNARMTHYQALLLDTDRVQFGPVVALNPATLLPLPEEGLQHNCLDILAEAHGTRPDLTDQPLPDADHTWYTDGSSLLQEGQRKAGAAVTTETEVIWAKALPAGTSAQRAELIALTQALKMAEGKKLNVYTDSRYAFATAHIHGEIYRRRGWLTSEGKEIKNKDEILALLKALFLPKRLSIIHCPGHQKGHSAEARGNRMADQAARKAAITETPDTSTLLAGKRTADGSEFEKRTADGSEFESPKKKAKVE

SEQ ID NO: 3030 - protein, 2091 aa, synthetic construct; identical to SEQ ID NO: 2750

SEQ ID NO: 3031 - protein, 2094 aa, synthetic construct; identical to SEQ ID NO: 2768

SEQ ID NO: 3032 - protein, 2094 aa, synthetic construct; identical to SEQ ID NO: 2770

SEQ ID NO: 3033 - protein, 2091 aa, synthetic construct; identical to SEQ ID NO: 2779

SEQ ID NO: 3034 - protein, 2093 aa, synthetic construct; identical to SEQ ID NO: 2774

SEQ ID NO: 3035 - protein, 2103 aa, synthetic construct
MPAAKRVKLDGGDKKYSIGLDIGTNSVGWAVITDEYKVPSKKFKVLGNTDRHSIKKNLIGALLFDSGETAEATRLKRTARRRYTRRKNRICYLQEIFSNEMAKVDDSFFHRLEESFLVEEDKKHERHPIFGNIVDEVAYHEKYPTIYHLRKKLVDSTDKADLRLIYLALAHMIKFRGHFLIEGDLNPDNSDVDKLFIQLVQTYNQLFEENPINASGVDAKAILSARLSKSRRLENLIAQLPGEKKNGLFGNLIALSLGLTPNFKSNFDLAEDAKLQLSKDTYDDDLDNLLAQIGDQYADLFLAAKNLSDAILLSDILRVNTEITKAPLSASMIKRYDEHHQDLTLLKALVRQQLPEKYKEIFFDQSKNGYAGYIDGGASQEEFYKFIKPILEKMDGTEELLVKLNREDLLRKQRTFDNGSIPHQIHLGELHAILRRQEDFYPFLKDNREKIEKILTFRIPYYVGPLARGNSRFAWMTRKSEETITPWNFEEVVDKGASAQSFIERMTNFDKNLPNEKVLPKHSLLYEYFTVYNELTKVKYVTEGMRKPAFLSGEQKKAIVDLLFKTNRKVTVKQLKEDYFKKIECFDSVEISGVEDRFNASLGTYHDLLKIIKDKDFLDNEENEDILEDIVLTLTLFEDREMIEERLKTYAHLFDDKVMKQLKRRRYTGWGRLSRKLINGIRDKQSGKTILDFLKSDGFANRNFMQLIHDDSLTFKEDIQKAQVSGQGDSLHEHIANLAGSPAIKKGILQTVKVVDELVKVMGRHKPENIVIEMARENQTTQKGQKNSRERMKRIEEGIKELGSQILKEHPVENTQLQNEKLYLYYLQNGRDMYVDQELDINRLSDYDVDHIVPQSFLKDDSIDNKVLTRSDKARGKSDNVPSEEVVKKMKNYWRQLLNAKLITQRKFDNLTKAERGGLSELDKAGFIKRQLVETRQITKHVAQILDSRMNTKYDENDKLIREVKVITLKSKLVSDFRKDFQFYKVREINNYHHAHDAYLNAVVGTALIKKYPKLESEFVYGDYKVYDVRKMIAKSEQEIGKATAKYFFYSNIMNFFKTEITLANGEIRKRPLIETNGETGEIVWDKGRDFATVRKVLSMPQVNIVKKTEVQTGGFSKESILPKRNSDKLIARKKDWDPKKYGGFDSPTVAYSVLVVAKVEKGKSKKLKSVKELLGITIMERSSFEKNPIDFLEAKGYKEVKKDLIIKLPKYSLFELENGRKRMLASAGELQKGNELALPSKYVNFLYLASHYEKLKGSPEDNEQKQLFVEQHKHYLDEIIEQISEFSKRVILADANLDKVLSAYNKHRDKPIREQAENIIHLFTLTNLGAPAAFKYFDTTIDRKRYTSTKEVLDATLIHQSITGLYETRIDLSQLGGDGGGGSGGSGGSGGSGGSGGSGGTLNIEDEHRLHETSKEPDVSLGSTWLSDFPQAWAETGGMGLAVRQAPLIIPLKATSTPVSIKQYPMSQEARLGIKPHIQRLLDQGILVPCQSPWNTPLLPVKKPGTNDYRPVQDLREVNKRVEDIHPTVPNPYNLLSGLPPSHQWYTVLDLKDAFFCLRLHPTSQPLFAFEWRDPEMGISGQLTWTRLPQGFKNSPTLFNEALHRDLADFRIQHPDLILLQYVDDLLLAATSELDCQQGTRALLQTLGNLGYRASAKKAQICQKQVKYLGYLLKEGQRWLTEARKETVMGQPTPKTPRQLREFLGKAGFCRLFIPGFAEMAAPLYPLTKPGTLFNWGPDQQKAYQEIKQALLTAPALGLPDLTKPFELFVDEKQGYAKGVLTQKLGPWRRPVAYLSKKLDPVAAGWPPCLRMVAAIAVLTKDAGKLTMGQPLVILAPHAVEALVKQPPDRWLSNARMTHYQALLLDTDRVQFGPVVALNPATLLPLPEEGLQHNCLDILAEAHGTRPDLTDQPLPDADHTWYTDGSSLLQEGQRKAGAAVTTETEVIWAKALPAGTSAQRAELIALTQALKMAEGKKLNVYTDSRYAFATAHIHGEIYRRRGWLTSEGKEIKNKDEILALLKALFLPKRLSIIHCPGHQKGHSAEARGNRMADQAARKAAITETPDTSTLLAGKRTADGSEFEKRTADGSEFESPKKKAKVE

SEQ ID NO: 3036 - protein, 2105 aa, synthetic construct; identical to SEQ ID NO: 2844

SEQ ID NO: 3037 - protein, 2088 aa, synthetic construct; identical to SEQ ID NO: 2812

SEQ ID NO: 3038 - protein, 2103 aa, synthetic construct; identical to SEQ ID NO: 2816

SEQ ID NO: 3039 - protein, 2097 aa, synthetic construct; identical to SEQ ID NO: 2795

SEQ ID NO: 3040 - protein, 2096 aa, synthetic construct; identical to SEQ ID NO: 2831

SEQ ID NO: 3041 - protein, 2095 aa, synthetic construct; identical to SEQ ID NO: 2845

SEQ ID NO: 3042 - protein, 2094 aa, synthetic construct; identical to SEQ ID NO: 2818

SEQ ID NO: 3043 - protein, 2110 aa, synthetic construct; identical to SEQ ID NO: 2803

SEQ ID NO: 3044 - protein, 2091 aa, synthetic construct
MPAAKRVKLDGGDKKYSIGLDIGTNSVGWAVITDEYKVPSKKFKVLGNTDRHSIKKNLIGALLFDSGETAEATRLKRTARRRYTRRKNRICYLQEIFSNEMAKVDDSFFHRLEESFLVEEDKKHERHPIFGNIVDEVAYHEKYPTIYHLRKKLVDSTDKADLRLIYLALAHMIKFRGHFLIEGDLNPDNSDVDKLFIQLVQTYNQLFEENPINASGVDAKAILSARLSKSRRLENLIAQLPGEKKNGLFGNLIALSLGLTPNFKSNFDLAEDAKLQLSKDTYDDDLDNLLAQIGDQYADLFLAAKNLSDAILLSDILRVNTEITKAPLSASMIKRYDEHHQDLTLLKALVRQQLPEKYKEIFFDQSKNGYAGYIDGGASQEEFYKFIKPILEKMDGTEELLVKLNREDLLRKQRTFDNGSIPHQIHLGELHAILRRQEDFYPFLKDNREKIEKILTFRIPYYVGPLARGNSRFAWMTRKSEETITPWNFEEVVDKGASAQSFIERMTNFDKNLPNEKVLPKHSLLYEYFTVYNELTKVKYVTEGMRKPAFLSGEQKKAIVDLLFKTNRKVTVKQLKEDYFKKIECFDSVEISGVEDRFNASLGTYHDLLKIIKDKDFLDNEENEDILEDIVLTLTLFEDREMIEERLKTYAHLFDDKVMKQLKRRRYTGWGRLSRKLINGIRDKQSGKTILDFLKSDGFANRNFMQLIHDDSLTFKEDIQKAQVSGQGDSLHEHIANLAGSPAIKKGILQTVKVVDELVKVMGRHKPENIVIEMARENQTTQKGQKNSRERMKRIEEGIKELGSQILKEHPVENTQLQNEKLYLYYLQNGRDMYVDQELDINRLSDYDVDHIVPQSFLKDDSIDNKVLTRSDKARGKSDNVPSEEVVKKMKNYWRQLLNAKLITQRKFDNLTKAERGGLSELDKAGFIKRQLVETRQITKHVAQILDSRMNTKYDENDKLIREVKVITLKSKLVSDFRKDFQFYKVREINNYHHAHDAYLNAVVGTALIKKYPKLESEFVYGDYKVYDVRKMIAKSEQEIGKATAKYFFYSNIMNFFKTEITLANGEIRKRPLIETNGETGEIVWDKGRDFATVRKVLSMPQVNIVKKTEVQTGGFSKESILPKRNSDKLIARKKDWDPKKYGGFDSPTVAYSVLVVAKVEKGKSKKLKSVKELLGITIMERSSFEKNPIDFLEAKGYKEVKKDLIIKLPKYSLFELENGRKRMLASAGELQKGNELALPSKYVNFLYLASHYEKLKGSPEDNEQKQLFVEQHKHYLDEIIEQISEFSKRVILADANLDKVLSAYNKHRDKPIREQAENIIHLFTLTNLGAPAAFKYFDTTIDRKRYTSTKEVLDATLIHQSITGLYETRIDLSQLGGDGGGGGGGGGGTLNIEDEHRLHETSKEPDVSLGSTWLSDFPQAWAETGGMGLAVRQAPLIIPLKATSTPVSIKQYPMSQEARLGIKPHIQRLLDQGILVPCQSPWNTPLLPVKKPGTNDYRPVQDLREVNKRVEDIHPTVPNPYNLLSGLPPSHQWYTVLDLKDAFFCLRLHPTSQPLFAFEWRDPEMGISGQLTWTRLPQGFKNSPTLFNEALHRDLADFRIQHPDLILLQYVDDLLLAATSELDCQQGTRALLQTLGNLGYRASAKKAQICQKQVKYLGYLLKEGQRWLTEARKETVMGQPTPKTPRQLREFLGKAGFCRLFIPGFAEMAAPLYPLTKPGTLFNWGPDQQKAYQEIKQALLTAPALGLPDLTKPFELFVDEKQGYAKGVLTQKLGPWRRPVAYLSKKLDPVAAGWPPCLRMVAAIAVLTKDAGKLTMGQPLVILAPHAVEALVKQPPDRWLSNARMTHYQALLLDTDRVQFGPVVALNPATLLPLPEEGLQHNCLDILAEAHGTRPDLTDQPLPDADHTWYTDGSSLLQEGQRKAGAAVTTETEVIWAKALPAGTSAQRAELIALTQALKMAEGKKLNVYTDSRYAFATAHIHGEIYRRRGWLTSEGKEIKNKDEILALLKALFLPKRLSIIHCPGHQKGHSAEARGNRMADQAARKAAITETPDTSTLLAGKRTADGSEFEKRTADGSEFESPKKKAKVE

SEQ ID NO: 3045 - protein, 2096 aa, synthetic construct
MPAAKRVKLDGGDKKYSIGLDIGTNSVGWAVITDEYKVPSKKFKVLGNTDRHSIKKNLIGALLFDSGETAEATRLKRTARRRYTRRKNRICYLQEIFSNEMAKVDDSFFHRLEESFLVEEDKKHERHPIFGNIVDEVAYHEKYPTIYHLRKKLVDSTDKADLRLIYLALAHMIKFRGHFLIEGDLNPDNSDVDKLFIQLVQTYNQLFEENPINASGVDAKAILSARLSKSRRLENLIAQLPGEKKNGLFGNLIALSLGLTPNFKSNFDLAEDAKLQLSKDTYDDDLDNLLAQIGDQYADLFLAAKNLSDAILLSDILRVNTEITKAPLSASMIKRYDEHHQDLTLLKALVRQQLPEKYKEIFFDQSKNGYAGYIDGGASQEEFYKFIKPILEKMDGTEELLVKLNREDLLRKQRTFDNGSIPHQIHLGELHAILRRQEDFYPFLKDNREKIEKILTFRIPYYVGPLARGNSRFAWMTRKSEETITPWNFEEVVDKGASAQSFIERMTNFDKNLPNEKVLPKHSLLYEYFTVYNELTKVKYVTEGMRKPAFLSGEQKKAIVDLLFKTNRKVTVKQLKEDYFKKIECFDSVEISGVEDRFNASLGTYHDLLKIIKDKDFLDNEENEDILEDIVLTLTLFEDREMIEERLKTYAHLFDDKVMKQLKRRRYTGWGRLSRKLINGIRDKQSGKTILDFLKSDGFANRNFMQLIHDDSLTFKEDIQKAQVSGQGDSLHEHIANLAGSPAIKKGILQTVKVVDELVKVMGRHKPENIVIEMARENQTTQKGQKNSRERMKRIEEGIKELGSQILKEHPVENTQLQNEKLYLYYLQNGRDMYVDQELDINRLSDYDVDHIVPQSFLKDDSIDNKVLTRSDKARGKSDNVPSEEVVKKMKNYWRQLLNAKLITQRKFDNLTKAERGGLSELDKAGFIKRQLVETRQITKHVAQILDSRMNTKYDENDKLIREVKVITLKSKLVSDFRKDFQFYKVREINNYHHAHDAYLNAVVGTALIKKYPKLESEFVYGDYKVYDVRKMIAKSEQEIGKATAKYFFYSNIMNFFKTEITLANGEIRKRPLIETNGETGEIVWDKGRDFATVRKVLSMPQVNIVKKTEVQTGGFSKESILPKRNSDKLIARKKDWDPKKYGGFDSPTVAYSVLVVAKVEKGKSKKLKSVKELLGITIMERSSFEKNPIDFLEAKGYKEVKKDLIIKLPKYSLFELENGRKRMLASAGELQKGNELALPSKYVNFLYLASHYEKLKGSPEDNEQKQLFVEQHKHYLDEIIEQISEFSKRVILADANLDKVLSAYNKHRDKPIREQAENIIHLFTLTNLGAPAAFKYFDTTIDRKRYTSTKEVLDATLIHQSITGLYETRIDLSQLGGDGGGGGEAAAKGGSGGTLNIEDEHRLHETSKEPDVSLGSTWLSDFPQAWAETGGMGLAVRQAPLIIPLKATSTPVSIKQYPMSQEARLGIKPHIQRLLDQGILVPCQSPWNTPLLPVKKPGTNDYRPVQDLREVNKRVEDIHPTVPNPYNLLSGLPPSHQWYTVLDLKDAFFCLRLHPTSQPLFAFEWRDPEMGISGQLTWTRLPQGFKNSPTLFNEALHRDLADFRIQHPDLILLQYVDDLLLAATSELDCQQGTRALLQTLGNLGYRASAKKAQICQKQVKYLGYLLKEGQRWLTEARKETVMGQPTPKTPRQLREFLGKAGFCRLFIPGFAEMAAPLYPLTKPGTLFNWGPDQQKAYQEIKQALLTAPALGLPDLTKPFELFVDEKQGYAKGVLTQKLGPWRRPVAYLSKKLDPVAAGWPPCLRMVAAIAVLTKDAGKLTMGQPLVILAPHAVEALVKQPPDRWLSNARMTHYQALLLDTDRVQFGPVVALNPATLLPLPEEGLQHNCLDILAEAHGTRPDLTDQPLPDADHTWYTDGSSLLQEGQRKAGAAVTTETEVIWAKALPAGTSAQRAELIALTQALKMAEGKKLNVYTDSRYAFATAHIHGEIYRRRGWLTSEGKEIKNKDEILALLKALFLPKRLSIIHCPGHQKGHSAEARGNRMADQAARKAAITETPDTSTLLAGKRTADGSEFEKRTADGSEFESPKKKAKVE

SEQ ID NO: 3046 - protein, 2096 aa, synthetic construct; identical to SEQ ID NO: 2829

SEQ ID NO: 3047 - protein, 2094 aa, synthetic construct
MPAAKRVKLDGGDKKYSIGLDIGTNSVGWAVITDEYKVPSKKFKVLGNTDRHSIKKNLIGALLFDSGETAEATRLKRTARRRYTRRKNRICYLQEIFSNEMAKVDDSFFHRLEESFLVEEDKKHERHPIFGNIVDEVAYHEKYPTIYHLRKKLVDSTDKADLRLIYLALAHMIKFRGHFLIEGDLNPDNSDVDKLFIQLVQTYNQLFEENPINASGVDAKAILSARLSKSRRLENLIAQLPGEKKNGLFGNLIALSLGLTPNFKSNFDLAEDAKLQLSKDTYDDDLDNLLAQIGDQYADLFLAAKNLSDAILLSDILRVNTEITKAPLSASMIKRYDEHHQDLTLLKALVRQQLPEKYKEIFFDQSKNGYAGYIDGGASQEEFYKFIKPILEKMDGTEELLVKLNREDLLRKQRTFDNGSIPHQIHLGELHAILRRQEDFYPFLKDNREKIEKILTFRIPYYVGPLARGNSRFAWMTRKSEETITPWNFEEVVDKGASAQSFIERMTNFDKNLPNEKVLPKHSLLYEYFTVYNELTKVKYVTEGMRKPAFLSGEQKKAIVDLLFKTNRKVTVKQLKEDYFKKIECFDSVEISGVEDRFNASLGTYHDLLKIIKDKDFLDNEENEDILEDIVLTLTLFEDREMIEERLKTYAHLFDDKVMKQLKRRRYTGWGRLSRKLINGIRDKQSGKTILDFLKSDGFANRNFMQLIHDDSLTFKEDIQKAQVSGQGDSLHEHIANLAGSPAIKKGILQTVKVVDELVKVMGRHKPENIVIEMARENQTTQKGQKNSRERMKRIEEGIKELGSQILKEHPVENTQLQNEKLYLYYLQNGRDMYVDQELDINRLSDYDVDHIVPQSFLKDDSIDNKVLTRSDKARGKSDNVPSEEVVKKMKNYWRQLLNAKLITQRKFDNLTKAERGGLSELDKAGFIKRQLVETRQITKHVAQILDSRMNTKYDENDKLIREVKVITLKSKLVSDFRKDFQFYKVREINNYHHAHDAYLNAVVGTALIKKYPKLESEFVYGDYKVYDVRKMIAKSEQEIGKATAKYFFYSNIMNFFKTEITLANGEIRKRPLIETNGETGEIVWDKGRDFATVRKVLSMPQVNIVKKTEVQTGGFSKESILPKRNSDKLIARKKDWDPKKYGGFDSPTVAYSVLVVAKVEKGKSKKLKSVKELLGITIMERSSFEKNPIDFLEAKGYKEVKKDLIIKLPKYSLFELENGRKRMLASAGELQKGNELALPSKYVNFLYLASHYEKLKGSPEDNEQKQLFVEQHKHYLDEIIEQISEFSKRVILADANLDKVLSAYNKHRDKPIREQAENIIHLFTLTNLGAPAAFKYFDTTIDRKRYTSTKEVLDATLIHQSITGLYETRIDLSQLGGDGGGSSGGGGGSGGTLNIEDEHRLHETSKEPDVSLGSTWLSDFPQAWAETGGMGLAVRQAPLIIPLKATSTPVSIKQYPMSQEARLGIKPHIQRLLDQGILVPCQSPWNTPLLPVKKPGTNDYRPVQDLREVNKRVEDIHPTVPNPYNLLSGLPPSHQWYTVLDLKDAFFCLRLHPTSQPLFAFEWRDPEMGISGQLTWTRLPQGFKNSPTLFNEALHRDLADFRIQHPDLILLQYVDDLLLAATSELDCQQGTRALLQTLGNLGYRASAKKAQICQKQVKYLGYLLKEGQRWLTEARKETVMGQPTPKTPRQLREFLGKAGFCRLFIPGFAEMAAPLYPLTKPGTLFNWGPDQQKAYQEIKQALLTAPALGLPDLTKPFELFVDEKQGYAKGVLTQKLGPWRRPVAYLSKKLDPVAAGWPPCLRMVAAIAVLTKDAGKLTMGQPLVILAPHAVEALVKQPPDRWLSNARMTHYQALLLDTDRVQFGPVVALNPATLLPLPEEGLQHNCLDILAEAHGTRPDLTDQPLPDADHTWYTDGSSLLQEGQRKAGAAVTTETEVIWAKALPAGTSAQRAELIALTQALKMAEGKKLNVYTDSRYAFATAHIHGEIYRRRGWLTSEGKEIKNKDEILALLKALFLPKRLSIIHCPGHQKGHSAEARGNRMADQAARKAAITETPDTSTLLAGKRTADGSEFEKRTADGSEFESPKKKAKVE

SEQ ID NO: 3048 - protein, 2094 aa, synthetic construct; identical to SEQ ID NO: 2852

SEQ ID NO: 3049 - protein, 2097 aa, synthetic construct; identical to SEQ ID NO: 2814

SEQ ID NO: 3050 - protein, 2096 aa, synthetic construct
MPAAKRVKLDGGDKKYSIGLDIGTNSVGWAVITDEYKVPSKKFKVLGNTDRHSIKKNLIGALLFDSGETAEATRLKRTARRRYTRRKNRICYLQEIFSNEMAKVDDSFFHRLEESFLVEEDKKHERHPIFGNIVDEVAYHEKYPTIYHLRKKLVDSTDKADLRLIYLALAHMIKFRGHFLIEGDLNPDNSDVDKLFIQLVQTYNQLFEENPINASGVDAKAILSARLSKSRRLENLIAQLPGEKKNGLFGNLIALSLGLTPNFKSNFDLAEDAKLQLSKDTYDDDLDNLLAQIGDQYADLFLAAKNLSDAILLSDILRVNTEITKAPLSASMIKRYDEHHQDLTLLKALVRQQLPEKYKEIFFDQSKNGYAGYIDGGASQEEFYKFIKPILEKMDGTEELLVKLNREDLLRKQRTFDNGSIPHQIHLGELHAILRRQEDFYPFLKDNREKIEKILTFRIPYYVGPLARGNSRFAWMTRKSEETITPWNFEEVVDKGASAQSFIERMTNFDKNLPNEKVLPKHSLLYEYFTVYNELTKVKYVTEGMRKPAFLSGEQKKAIVDLLFKTNRKVTVKQLKEDYFKKIECFDSVEISGVEDRFNASLGTYHDLLKIIKDKDFLDNEENEDILEDIVLTLTLFEDREMIEERLKTYAHLFDDKVMKQLKRRRYTGWGRLSRKLINGIRDKQSGKTILDFLKSDGFANRNFMQLIHDDSLTFKEDIQKAQVSGQGDSLHEHIANLAGSPAIKKGILQTVKVVDELVKVMGRHKPENIVIEMARENQTTQKGQKNSRERMKRIEEGIKELGSQILKEHPVENTQLQNEKLYLYYLQNGRDMYVDQELDINRLSDYDVDHIVPQSFLKDDSIDNKVLTRSDKARGKSDNVPSEEVVKKMKNYWRQLLNAKLITQRKFDNLTKAERGGLSELDKAGFIKRQLVETRQITKHVAQILDSRMNTKYDENDKLIREVKVITLKSKLVSDFRKDFQFYKVREINNYHHAHDAYLNAVVGTALIKKYPKLESEFVYGDYKVYDVRKMIAKSEQEIGKATAKYFFYSNIMNFFKTEITLANGEIRKRPLIETNGETGEIVWDKGRDFATVRKVLSMPQVNIVKKTEVQTGGFSKESILPKRNSDKLIARKKDWDPKKYGGFDSPTVAYSVLVVAKVEKGKSKKLKSVKELLGITIMERSSFEKNPIDFLEAKGYKEVKKDLIIKLPKYSLFELENGRKRMLASAGELQKGNELALPSKYVNFLYLASHYEKLKGSPEDNEQKQLFVEQHKHYLDEIIEQISEFSKRVILADANLDKVLSAYNKHRDKPIREQAENIIHLFTLTNLGAPAAFKYFDTTIDRKRYTSTKEVLDATLIHQSITGLYETRIDLSQLGGDGGGGGEAAAKGSSGGTLNIEDEHRLHETSKEPDVSLGSTWLSDFPQAWAETGGMGLAVRQAPLIIPLKATSTPVSIKQYPMSQEARLGIKPHIQRLLDQGILVPCQSPWNTPLLPVKKPGTNDYRPVQDLREVNKRVEDIHPTVPNPYNLLSGLPPSHQWYTVLDLKDAFFCLRLHPTSQPLFAFEWRDPEMGISGQLTWTRLPQGFKNSPTLFNEALHRDLADFRIQHPDLILLQYVDDLLLAATSELDCQQGTRALLQTLGNLGYRASAKKAQICQKQVKYLGYLLKEGQRWLTEARKETVMGQPTPKTPRQLREFLGKAGFCRLFIPGFAEMAAPLYPLTKPGTLFNWGPDQQKAYQEIKQALLTAPALGLPDLTKPFELFVDEKQGYAKGVLTQKLGPWRRPVAYLSKKLDPVAAGWPPCLRMVAAIAVLTKDAGKLTMGQPLVILAPHAVEALVKQPPDRWLSNARMTHYQALLLDTDRVQFGPVVALNPATLLPLPEEGLQHNCLDILAEAHGTRPDLTDQPLPDADHTWYTDGSSLLQEGQRKAGAAVTTETEVIWAKALPAGTSAQRAELIALTQALKMAEGKKLNVYTDSRYAFATAHIHGEIYRRRGWLTSEGKEIKNKDEILALLKALFLPKRLSIIHCPGHQKGHSAEARGNRMADQAARKAAITETPDTSTLLAGKRTADGSEFEKRTADGSEFESPKKKAKVE

SEQ ID NO: 3051 - protein, 2096 aa, synthetic construct; identical to SEQ ID NO: 2785

SEQ ID NO: 3052 - protein, 2096 aa, synthetic construct; identical to SEQ ID NO: 2822

SEQ ID NO: 3053 - protein, 2096 aa, synthetic construct; identical to SEQ ID NO: 2817

SEQ ID NO: 3054 - protein, 2096 aa, synthetic construct; identical to SEQ ID NO: 2851

SEQ ID NO: 3055 - protein, 2091 aa, synthetic construct
MPAAKRVKLDGGDKKYSIGLDIGTNSVGWAVITDEYKVPSKKFKVLGNTDRHSIKKNLIGALLFDSGETAEATRLKRTARRRYTRRKNRICYLQEIFSNEMAKVDDSFFHRLEESFLVEEDKKHERHPIFGNIVDEVAYHEKYPTIYHLRKKLVDSTDKADLRLIYLALAHMIKFRGHFLIEGDLNPDNSDVDKLFIQLVQTYNQLFEENPINASGVDAKAILSARLSKSRRLENLIAQLPGEKKNGLFGNLIALSLGLTPNFKSNFDLAEDAKLQLSKDTYDDDLDNLLAQIGDQYADLFLAAKNLSDAILLSDILRVNTEITKAPLSASMIKRYDEHHQDLTLLKALVRQQLPEKYKEIFFDQSKNGYAGYIDGGASQEEFYKFIKPILEKMDGTEELLVKLNREDLLRKQRTFDNGSIPHQIHLGELHAILRRQEDFYPFLKDNREKIEKILTFRIPYYVGPLARGNSRFAWMTRKSEETITPWNFEEVVDKGASAQSFIERMTNFDKNLPNEKVLPKHSLLYEYFTVYNELTKVKYVTEGMRKPAFLSGEQKKAIVDLLFKTNRKVTVKQLKEDYFKKIECFDSVEISGVEDRFNASLGTYHDLLKIIKDKDFLDNEENEDILEDIVLTLTLFEDREMIEERLKTYAHLFDDKVMKQLKRRRYTGWGRLSRKLINGIRDKQSGKTILDFLKSDGFANRNFMQLIHDDSLTFKEDIQKAQVSGQGDSLHEHIANLAGSPAIKKGILQTVKVVDELVKVMGRHKPENIVIEMARENQTTQKGQKNSRERMKRIEEGIKELGSQILKEHPVENTQLQNEKLYLYYLQNGRDMYVDQELDINRLSDYDVDHIVPQSFLKDDSIDNKVLTRSDKARGKSDNVPSEEVVKKMKNYWRQLLNAKLITQRKFDNLTKAERGGLSELDKAGFIKRQLVETRQITKHVAQILDSRMNTKYDENDKLIREVKVITLKSKLVSDFRKDFQFYKVREINNYHHAHDAYLNAVVGTALIKKYPKLESEFVYGDYKVYDVRKMIAKSEQEIGKATAKYFFYSNIMNFFKTEITLANGEIRKRPLIETNGETGEIVWDKGRDFATVRKVLSMPQVNIVKKTEVQTGGFSKESILPKRNSDKLIARKKDWDPKKYGGFDSPTVAYSVLVVAKVEKGKSKKLKSVKELLGITIMERSSFEKNPIDFLEAKGYKEVKKDLIIKLPKYSLFELENGRKRMLASAGELQKGNELALPSKYVNFLYLASHYEKLKGSPEDNEQKQLFVEQHKHYLDEIIEQISEFSKRVILADANLDKVLSAYNKHRDKPIREQAENIIHLFTLTNLGAPAAFKYFDTTIDRKRYTSTKEVLDATLIHQSITGLYETRIDLSQLGGDGGGSSPAPGGTLNIEDEHRLHETSKEPDVSLGSTWLSDFPQAWAETGGMGLAVRQAPLIIPLKATSTPVSIKQYPMSQEARLGIKPHIQRLLDQGILVPCQSPWNTPLLPVKKPGTNDYRPVQDLREVNKRVEDIHPTVPNPYNLLSGLPPSHQWYTVLDLKDAFFCLRLHPTSQPLFAFEWRDPEMGISGQLTWTRLPQGFKNSPTLFNEALHRDLADFRIQHPDLILLQYVDDLLLAATSELDCQQGTRALLQTLGNLGYRASAKKAQICQKQVKYLGYLLKEGQRWLTEARKETVMGQPTPKTPRQLREFLGKAGFCRLFIPGFAEMAAPLYPLTKPGTLFNWGPDQQKAYQEIKQALLTAPALGLPDLTKPFELFVDEKQGYAKGVLTQKLGPWRRPVAYLSKKLDPVAAGWPPCLRMVAAIAVLTKDAGKLTMGQPLVILAPHAVEALVKQPPDRWLSNARMTHYQALLLDTDRVQFGPVVALNPATLLPLPEEGLQHNCLDILAEAHGTRPDLTDQPLPDADHTWYTDGSSLLQEGQRKAGAAVTTETEVIWAKALPAGTSAQRAELIALTQALKMAEGKKLNVYTDSRYAFATAHIHGEIYRRRGWLTSEGKEIKNKDEILALLKALFLPKRLSIIHCPGHQKGHSAEARGNRMADQAARKAAITETPDTSTLLAGKRTADGSEFEKRTADGSEFESPKKKAKVE

SEQ ID NO: 3056 - protein, 2094 aa, synthetic construct
MPAAKRVKLDGGDKKYSIGLDIGTNSVGWAVITDEYKVPSKKFKVLGNTDRHSIKKNLIGALLFDSGETAEATRLKRTARRRYTRRKNRICYLQEIFSNEMAKVDDSFFHRLEESFLVEEDKKHERHPIFGNIVDEVAYHEKYPTIYHLRKKLVDSTDKADLRLIYLALAHMIKFRGHFLIEGDLNPDNSDVDKLFIQLVQTYNQLFEENPINASGVDAKAILSARLSKSRRLENLIAQLPGEKKNGLFGNLIALSLGLTPNFKSNFDLAEDAKLQLSKDTYDDDLDNLLAQIGDQYADLFLAAKNLSDAILLSDILRVNTEITKAPLSASMIKRYDEHHQDLTLLKALVRQQLPEKYKEIFFDQSKNGYAGYIDGGASQEEFYKFIKPILEKMDGTEELLVKLNREDLLRKQRTFDNGSIPHQIHLGELHAILRRQEDFYPFLKDNREKIEKILTFRIPYYVGPLARGNSRFAWMTRKSEETITPWNFEEVVDKGASAQSFIERMTNFDKNLPNEKVLPKHSLLYEYFTVYNELTKVKYVTEGMRKPAFLSGEQKKAIVDLLFKTNRKVTVKQLKEDYFKKIECFDSVEISGVEDRFNASLGTYHDLLKIIKDKDFLDNEENEDILEDIVLTLTLFEDREMIEERLKTYAHLFDDKVMKQLKRRRYTGWGRLSRKLINGIRDKQSGKTILDFLKSDGFANRNFMQLIHDDSLTFKEDIQKAQVSGQGDSLHEHIANLAGSPAIKKGILQTVKVVDELVKVMGRHKPENIVIEMARENQTTQKGQKNSRERMKRIEEGIKELGSQILKEHPVENTQLQNEKLYLYYLQNGRDMYVDQELDINRLSDYDVDHIVPQSFLKDDSIDNKVLTRSDKARGKSDNVPSEEVVKKMKNYWRQLLNAKLITQRKFDNLTKAERGGLSELDKAGFIKRQLVETRQITKHVAQILDSRMNTKYDENDKLIREVKVITLKSKLVSDFRKDFQFYKVREINNYHHAHDAYLNAVVGTALIKKYPKLESEFVYGDYKVYDVRKMIAKSEQEIGKATAKYFFYSNIMNFFKTEITLANGEIRKRPLIETNGETGEIVWDKGRDFATVRKVLSMPQVNIVKKTEVQTGGFSKESILPKRNSDKLIARKKDWDPKKYGGFDSPTVAYSVLVVAKVEKGKSKKLKSVKELLGITIMERSSFEKNPIDFLEAKGYKEVKKDLIIKLPKYSLFELENGRKRMLASAGELQKGNELALPSKYVNFLYLASHYEKLKGSPEDNEQKQLFVEQHKHYLDEIIEQISEFSKRVILADANLDKVLSAYNKHRDKPIREQAENIIHLFTLTNLGAPAAFKYFDTTIDRKRYTSTKEVLDATLIHQSITGLYETRIDLSQLGGDGGGSSGGGPAPGGTLNIEDEHRLHETSKEPDVSLGSTWLSDFPQAWAETGGMGLAVRQAPLIIPLKATSTPVSIKQYPMSQEARLGIKPHIQRLLDQGILVPCQSPWNTPLLPVKKPGTNDYRPVQDLREVNKRVEDIHPTVPNPYNLLSGLPPSHQWYTVLDLKDAFFCLRLHPTSQPLFAFEWRDPEMGISGQLTWTRLPQGFKNSPTLFNEALHRDLADFRIQHPDLILLQYVDDLLLAATSELDCQQGTRALLQTLGNLGYRASAKKAQICQKQVKYLGYLLKEGQRWLTEARKETVMGQPTPKTPRQLREFLGKAGFCRLFIPGFAEMAAPLYPLTKPGTLFNWGPDQQKAYQEIKQALLTAPALGLPDLTKPFELFVDEKQGYAKGVLTQKLGPWRRPVAYLSKKLDPVAAGWPPCLRMVAAIAVLTKDAGKLTMGQPLVILAPHAVEALVKQPPDRWLSNARMTHYQALLLDTDRVQFGPVVALNPATLLPLPEEGLQHNCLDILAEAHGTRPDLTDQPLPDADHTWYTDGSSLLQEGQRKAGAAVTTETEVIWAKALPAGTSAQRAELIALTQALKMAEGKKLNVYTDSRYAFATAHIHGEIYRRRGWLTSEGKEIKNKDEILALLKALFLPKRLSIIHCPGHQKGHSAEARGNRMADQAARKAAITETPDTSTLLAGKRTADGSEFEKRTADGSEFESPKKKAKVE

SEQ ID NO: 3057 - protein, 2096 aa, synthetic construct; identical to SEQ ID NO: 2810

SEQ ID NO: 3058 - protein, 2091 aa, synthetic construct
MPAAKRVKLDGGDKKYSIGLDIGTNSVGWAVITDEYKVPSKKFKVLGNTDRHSIKKNLIGALLFDSGETAEATRLKRTARRRYTRRKNRICYLQEIFSNEMAKVDDSFFHRLEESFLVEEDKKHERHPIFGNIVDEVAYHEKYPTIYHLRKKLVDSTDKADLRLIYLALAHMIKFRGHFLIEGDLNPDNSDVDKLFIQLVQTYNQLFEENPINASGVDAKAILSARLSKSRRLENLIAQLPGEKKNGLFGNLIALSLGLTPNFKSNFDLAEDAKLQLSKDTYDDDLDNLLAQIGDQYADLFLAAKNLSDAILLSDILRVNTEITKAPLSASMIKRYDEHHQDLTLLKALVRQQLPEKYKEIFFDQSKNGYAGYIDGGASQEEFYKFIKPILEKMDGTEELLVKLNREDLLRKQRTFDNGSIPHQIHLGELHAILRRQEDFYPFLKDNREKIEKILTFRIPYYVGPLARGNSRFAWMTRKSEETITPWNFEEVVDKGASAQSFIERMTNFDKNLPNEKVLPKHSLLYEYFTVYNELTKVKYVTEGMRKPAFLSGEQKKAIVDLLFKTNRKVTVKQLKEDYFKKIECFDSVEISGVEDRFNASLGTYHDLLKIIKDKDFLDNEENEDILEDIVLTLTLFEDREMIEERLKTYAHLFDDKVMKQLKRRRYTGWGRLSRKLINGIRDKQSGKTILDFLKSDGFANRNFMQLIHDDSLTFKEDIQKAQVSGQGDSLHEHIANLAGSPAIKKGILQTVKVVDELVKVMGRHKPENIVIEMARENQTTQKGQKNSRERMKRIEEGIKELGSQILKEHPVENTQLQNEKLYLYYLQNGRDMYVDQELDINRLSDYDVDHIVPQSFLKDDSIDNKVLTRSDKARGKSDNVPSEEVVKKMKNYWRQLLNAKLITQRKFDNLTKAERGGLSELDKAGFIKRQLVETRQITKHVAQILDSRMNTKYDENDKLIREVKVITLKSKLVSDFRKDFQFYKVREINNYHHAHDAYLNAVVGTALIKKYPKLESEFVYGDYKVYDVRKMIAKSEQEIGKATAKYFFYSNIMNFFKTEITLANGEIRKRPLIETNGETGEIVWDKGRDFATVRKVLSMPQVNIVKKTEVQTGGFSKESILPKRNSDKLIARKKDWDPKKYGGFDSPTVAYSVLVVAKVEKGKSKKLKSVKELLGITIMERSSFEKNPIDFLEAKGYKEVKKDLIIKLPKYSLFELENGRKRMLASAGELQKGNELALPSKYVNFLYLASHYEKLKGSPEDNEQKQLFVEQHKHYLDEIIEQISEFSKRVILADANLDKVLSAYNKHRDKPIREQAENIIHLFTLTNLGAPAAFKYFDTTIDRKRYTSTKEVLDATLIHQSITGLYETRIDLSQLGGDGGGSSGGGGGTLNIEDEHRLHETSKEPDVSLGSTWLSDFPQAWAETGGMGLAVRQAPLIIPLKATSTPVSIKQYPMSQEARLGIKPHIQRLLDQGILVPCQSPWNTPLLPVKKPGTNDYRPVQDLREVNKRVEDIHPTVPNPYNLLSGLPPSHQWYTVLDLKDAFFCLRLHPTSQPLFAFEWRDPEMGISGQLTWTRLPQGFKNSPTLFNEALHRDLADFRIQHPDLILLQYVDDLLLAATSELDCQQGTRALLQTLGNLGYRASAKKAQICQKQVKYLGYLLKEGQRWLTEARKETVMGQPTPKTPRQLREFLGKAGFCRLFIPGFAEMAAPLYPLTKPGTLFNWGPDQQKAYQEIKQALLTAPALGLPDLTKPFELFVDEKQGYAKGVLTQKLGPWRRPVAYLSKKLDPVAAGWPPCLRMVAAIAVLTKDAGKLTMGQPLVILAPHAVEALVKQPPDRWLSNARMTHYQALLLDTDRVQFGPVVALNPATLLPLPEEGLQHNCLDILAEAHGTRPDLTDQPLPDADHTWYTDGSSLLQEGQRKAGAAVTTETEVIWAKALPAGTSAQRAELIALTQALKMAEGKKLNVYTDSRYAFATAHIHGEIYRRRGWLTSEGKEIKNKDEILALLKALFLPKRLSIIHCPGHQKGHSAEARGNRMADQAARKAAITETPDTSTLLAGKRTADGSEFEKRTADGSEFESPKKKAKVE

SEQ ID NO: 3059 - protein, 2094 aa, synthetic construct; identical to SEQ ID NO: 2804

SEQ ID NO: 3060 - protein, 2091 aa, synthetic construct
MPAAKRVKLDGGDKKYSIGLDIGTNSVGWAVITDEYKVPSKKFKVLGNTDRHSIKKNLIGALLFDSGETAEATRLKRTARRRYTRRKNRICYLQEIFSNEMAKVDDSFFHRLEESFLVEEDKKHERHPIFGNIVDEVAYHEKYPTIYHLRKKLVDSTDKADLRLIYLALAHMIKFRGHFLIEGDLNPDNSDVDKLFIQLVQTYNQLFEENPINASGVDAKAILSARLSKSRRLENLIAQLPGEKKNGLFGNLIALSLGLTPNFKSNFDLAEDAKLQLSKDTYDDDLDNLLAQIGDQYADLFLAAKNLSDAILLSDILRVNTEITKAPLSASMIKRYDEHHQDLTLLKALVRQQLPEKYKEIFFDQSKNGYAGYIDGGASQEEFYKFIKPILEKMDGTEELLVKLNREDLLRKQRTFDNGSIPHQIHLGELHAILRRQEDFYPFLKDNREKIEKILTFRIPYYVGPLARGNSRFAWMTRKSEETITPWNFEEVVDKGASAQSFIERMTNFDKNLPNEKVLPKHSLLYEYFTVYNELTKVKYVTEGMRKPAFLSGEQKKAIVDLLFKTNRKVTVKQLKEDYFKKIECFDSVEISGVEDRFNASLGTYHDLLKIIKDKDFLDNEENEDILEDIVLTLTLFEDREMIEERLKTYAHLFDDKVMKQLKRRRYTGWGRLSRKLINGIRDKQSGKTILDFLKSDGFANRNFMQLIHDDSLTFKEDIQKAQVSGQGDSLHEHIANLAGSPAIKKGILQTVKVVDELVKVMGRHKPENIVIEMARENQTTQKGQKNSRERMKRIEEGIKELGSQILKEHPVENTQLQNEKLYLYYLQNGRDMYVDQELDINRLSDYDVDHIVPQSFLKDDSIDNKVLTRSDKARGKSDNVPSEEVVKKMKNYWRQLLNAKLITQRKFDNLTKAERGGLSELDKAGFIKRQLVETRQITKHVAQILDSRMNTKYDENDKLIREVKVITLKSKLVSDFRKDFQFYKVREINNYHHAHDAYLNAVVGTALIKKYPKLESEFVYGDYKVYDVRKMIAKSEQEIGKATAKYFFYSNIMNFFKTEITLANGEIRKRPLIETNGETGEIVWDKGRDFATVRKVLSMPQVNIVKKTEVQTGGFSKESILPKRNSDKLIARKKDWDPKKYGGFDSPTVAYSVLVVAKVEKGKSKKLKSVKELLGITIMERSSFEKNPIDFLEAKGYKEVKKDLIIKLPKYSLFELENGRKRMLASAGELQKGNELALPSKYVNFLYLASHYEKLKGSPEDNEQKQLFVEQHKHYLDEIIEQISEFSKRVILADANLDKVLSAYNKHRDKPIREQAENIIHLFTLTNLGAPAAFKYFDTTIDRKRYTSTKEVLDATLIHQSITGLYETRIDLSQLGGDGGPAPGGSGGTLNIEDEHRLHETSKEPDVSLGSTWLSDFPQAWAETGGMGLAVRQAPLIIPLKATSTPVSIKQYPMSQEARLGIKPHIQRLLDQGILVPCQSPWNTPLLPVKKPGTNDYRPVQDLREVNKRVEDIHPTVPNPYNLLSGLPPSHQWYTVLDLKDAFFCLRLHPTSQPLFAFEWRDPEMGISGQLTWTRLPQGFKNSPTLFNEALHRDLADFRIQHPDLILLQYVDDLLLAATSELDCQQGTRALLQTLGNLGYRASAKKAQICQKQVKYLGYLLKEGQRWLTEARKETVMGQPTPKTPRQLREFLGKAGFCRLFIPGFAEMAAPLYPLTKPGTLFNWGPDQQKAYQEIKQALLTAPALGLPDLTKPFELFVDEKQGYAKGVLTQKLGPWRRPVAYLSKKLDPVAAGWPPCLRMVAAIAVLTKDAGKLTMGQPLVILAPHAVEALVKQPPDRWLSNARMTHYQALLLDTDRVQFGPVVALNPATLLPLPEEGLQHNCLDILAEAHGTRPDLTDQPLPDADHTWYTDGSSLLQEGQRKAGAAVTTETEVIWAKALPAGTSAQRAELIALTQALKMAEGKKLNVYTDSRYAFATAHIHGEIYRRRGWLTSEGKEIKNKDEILALLKALFLPKRLSIIHCPGHQKGHSAEARGNRMADQAARKAAITETPDTSTLLAGKRTADGSEFEKRTADGSEFESPKKKAKVE

SEQ ID NO: 3061 - protein, 2093 aa, synthetic construct
MPAAKRVKLDGGDKKYSIGLDIGTNSVGWAVITDEYKVPSKKFKVLGNTDRHSIKKNLIGALLFDSGETAEATRLKRTARRRYTRRKNRICYLQEIFSNEMAKVDDSFFHRLEESFLVEEDKKHERHPIFGNIVDEVAYHEKYPTIYHLRKKLVDSTDKADLRLIYLALAHMIKFRGHFLIEGDLNPDNSDVDKLFIQLVQTYNQLFEENPINASGVDAKAILSARLSKSRRLENLIAQLPGEKKNGLFGNLIALSLGLTPNFKSNFDLAEDAKLQLSKDTYDDDLDNLLAQIGDQYADLFLAAKNLSDAILLSDILRVNTEITKAPLSASMIKRYDEHHQDLTLLKALVRQQLPEKYKEIFFDQSKNGYAGYIDGGASQEEFYKFIKPILEKMDGTEELLVKLNREDLLRKQRTFDNGSIPHQIHLGELHAILRRQEDFYPFLKDNREKIEKILTFRIPYYVGPLARGNSRFAWMTRKSEETITPWNFEEVVDKGASAQSFIERMTNFDKNLPNEKVLPKHSLLYEYFTVYNELTKVKYVTEGMRKPAFLSGEQKKAIVDLLFKTNRKVTVKQLKEDYFKKIECFDSVEISGVEDRFNASLGTYHDLLKIIKDKDFLDNEENEDILEDIVLTLTLFEDREMIEERLKTYAHLFDDKVMKQLKRRRYTGWGRLSRKLINGIRDKQSGKTILDFLKSDGFANRNFMQLIHDDSLTFKEDIQKAQVSGQGDSLHEHIANLAGSPAIKKGILQTVKVVDELVKVMGRHKPENIVIEMARENQTTQKGQKNSRERMKRIEEGIKELGSQILKEHPVENTQLQNEKLYLYYLQNGRDMYVDQELDINRLSDYDVDHIVPQSFLKDDSIDNKVLTRSDKARGKSDNVPSEEVVKKMKNYWRQLLNAKLITQRKFDNLTKAERGGLSELDKAGFIKRQLVETRQITKHVAQILDSRMNTKYDENDKLIREVKVITLKSKLVSDFRKDFQFYKVREINNYHHAHDAYLNAVVGTALIKKYPKLESEFVYGDYKVYDVRKMIAKSEQEIGKATAKYFFYSNIMNFFKTEITLANGEIRKRPLIETNGETGEIVWDKGRDFATVRKVLSMPQVNIVKKTEVQTGGFSKESILPKRNSDKLIARKKDWDPKKYGGFDSPTVAYSVLVVAKVEKGKSKKLKSVKELLGITIMERSSFEKNPIDFLEAKGYKEVKKDLIIKLPKYSLFELENGRKRMLASAGELQKGNELALPSKYVNFLYLASHYEKLKGSPEDNEQKQLFVEQHKHYLDEIIEQISEFSKRVILADANLDKVLSAYNKHRDKPIREQAENIIHLFTLTNLGAPAAFKYFDTTIDRKRYTSTKEVLDATLIHQSITGLYETRIDLSQLGGDGGPAPEAAAKGGTLNIEDEHRLHETSKEPDVSLGSTWLSDFPQAWAETGGMGLAVRQAPLIIPLKATSTPVSIKQYPMSQEARLGIKPHIQRLLDQGILVPCQSPWNTPLLPVKKPGTNDYRPVQDLREVNKRVEDIHPTVPNPYNLLSGLPPSHQWYTVLDLKDAFFCLRLHPTSQPLFAFEWRDPEMGISGQLTWTRLPQGFKNSPTLFNEALHRDLADFRIQHPDLILLQYVDDLLLAATSELDCQQGTRALLQTLGNLGYRASAKKAQICQKQVKYLGYLLKEGQRWLTEARKETVMGQPTPKTPRQLREFLGKAGFCRLFIPGFAEMAAPLYPLTKPGTLFNWGPDQQKAYQEIKQALLTAPALGLPDLTKPFELFVDEKQGYAKGVLTQKLGPWRRPVAYLSKKLDPVAAGWPPCLRMVAAIAVLTKDAGKLTMGQPLVILAPHAVEALVKQPPDRWLSNARMTHYQALLLDTDRVQFGPVVALNPATLLPLPEEGLQHNCLDILAEAHGTRPDLTDQPLPDADHTWYTDGSSLLQEGQRKAGAAVTTETEVIWAKALPAGTSAQRAELIALTQALKMAEGKKLNVYTDSRYAFATAHIHGEIYRRRGWLTSEGKEIKNKDEILALLKALFLPKRLSIIHCPGHQKGHSAEARGNRMADQAARKAAITETPDTSTLLAGKRTADGSEFEKRTADGSEFESPKKKAKVE

SEQ ID NO: 3062 - protein, 2093 aa, synthetic construct; identical to SEQ ID NO: 2828

SEQ ID NO: 3063 - protein, 2105 aa, synthetic construct
MPAAKRVKLDGGDKKYSIGLDIGTNSVGWAVITDEYKVPSKKFKVLGNTDRHSIKKNLIGALLFDSGETAEATRLKRTARRRYTRRKNRICYLQEIFSNEMAKVDDSFFHRLEESFLVEEDKKHERHPIFGNIVDEVAYHEKYPTIYHLRKKLVDSTDKADLRLIYLALAHMIKFRGHFLIEGDLNPDNSDVDKLFIQLVQTYNQLFEENPINASGVDAKAILSARLSKSRRLENLIAQLPGEKKNGLFGNLIALSLGLTPNFKSNFDLAEDAKLQLSKDTYDDDLDNLLAQIGDQYADLFLAAKNLSDAILLSDILRVNTEITKAPLSASMIKRYDEHHQDLTLLKALVRQQLPEKYKEIFFDQSKNGYAGYIDGGASQEEFYKFIKPILEKMDGTEELLVKLNREDLLRKQRTFDNGSIPHQIHLGELHAILRRQEDFYPFLKDNREKIEKILTFRIPYYVGPLARGNSRFAWMTRKSEETITPWNFEEVVDKGASAQSFIERMTNFDKNLPNEKVLPKHSLLYEYFTVYNELTKVKYVTEGMRKPAFLSGEQKKAIVDLLFKTNRKVTVKQLKEDYFKKIECFDSVEISGVEDRFNASLGTYHDLLKIIKDKDFLDNEENEDILEDIVLTLTLFEDREMIEERLKTYAHLFDDKVMKQLKRRRYTGWGRLSRKLINGIRDKQSGKTILDFLKSDGFANRNFMQLIHDDSLTFKEDIQKAQVSGQGDSLHEHIANLAGSPAIKKGILQTVKVVDELVKVMGRHKPENIVIEMARENQTTQKGQKNSRERMKRIEEGIKELGSQILKEHPVENTQLQNEKLYLYYLQNGRDMYVDQELDINRLSDYDVDHIVPQSFLKDDSIDNKVLTRSDKARGKSDNVPSEEVVKKMKNYWRQLLNAKLITQRKFDNLTKAERGGLSELDKAGFIKRQLVETRQITKHVAQILDSRMNTKYDENDKLIREVKVITLKSKLVSDFRKDFQFYKVREINNYHHAHDAYLNAVVGTALIKKYPKLESEFVYGDYKVYDVRKMIAKSEQEIGKATAKYFFYSNIMNFFKTEITLANGEIRKRPLIETNGETGEIVWDKGRDFATVRKVLSMPQVNIVKKTEVQTGGFSKESILPKRNSDKLIARKKDWDPKKYGGFDSPTVAYSVLVVAKVEKGKSKKLKSVKELLGITIMERSSFEKNPIDFLEAKGYKEVKKDLIIKLPKYSLFELENGRKRMLASAGELQKGNELALPSKYVNFLYLASHYEKLKGSPEDNEQKQLFVEQHKHYLDEIIEQISEFSKRVILADANLDKVLSAYNKHRDKPIREQAENIIHLFTLTNLGAPAAFKYFDTTIDRKRYTSTKEVLDATLIHQSITGLYETRIDLSQLGGDGGGGGGSGGGGSGGGGSGGGGSGGTLNIEDEHRLHETSKEPDVSLGSTWLSDFPQAWAETGGMGLAVRQAPLIIPLKATSTPVSIKQYPMSQEARLGIKPHIQRLLDQGILVPCQSPWNTPLLPVKKPGTNDYRPVQDLREVNKRVEDIHPTVPNPYNLLSGLPPSHQWYTVLDLKDAFFCLRLHPTSQPLFAFEWRDPEMGISGQLTWTRLPQGFKNSPTLFNEALHRDLADFRIQHPDLILLQYVDDLLLAATSELDCQQGTRALLQTLGNLGYRASAKKAQICQKQVKYLGYLLKEGQRWLTEARKETVMGQPTPKTPRQLREFLGKAGFCRLFIPGFAEMAAPLYPLTKPGTLFNWGPDQQKAYQEIKQALLTAPALGLPDLTKPFELFVDEKQGYAKGVLTQKLGPWRRPVAYLSKKLDPVAAGWPPCLRMVAAIAVLTKDAGKLTMGQPLVILAPHAVEALVKQPPDRWLSNARMTHYQALLLDTDRVQFGPVVALNPATLLPLPEEGLQHNCLDILAEAHGTRPDLTDQPLPDADHTWYTDGSSLLQEGQRKAGAAVTTETEVIWAKALPAGTSAQRAELIALTQALKMAEGKKLNVYTDSRYAFATAHIHGEIYRRRGWLTSEGKEIKNKDEILALLKALFLPKRLSIIHCPGHQKGHSAEARGNRMADQAARKAAITETPDTSTLLAGKRTADGSEFEKRTADGSEFESPKKKAKVE

SEQ ID NO: 3064 - protein, 2094 aa, synthetic construct
MPAAKRVKLDGGDKKYSIGLDIGTNSVGWAVITDEYKVPSKKFKVLGNTDRHSIKKNLIGALLFDSGETAEATRLKRTARRRYTRRKNRICYLQEIFSNEMAKVDDSFFHRLEESFLVEEDKKHERHPIFGNIVDEVAYHEKYPTIYHLRKKLVDSTDKADLRLIYLALAHMIKFRGHFLIEGDLNPDNSDVDKLFIQLVQTYNQLFEENPINASGVDAKAILSARLSKSRRLENLIAQLPGEKKNGLFGNLIALSLGLTPNFKSNFDLAEDAKLQLSKDTYDDDLDNLLAQIGDQYADLFLAAKNLSDAILLSDILRVNTEITKAPLSASMIKRYDEHHQDLTLLKALVRQQLPEKYKEIFFDQSKNGYAGYIDGGASQEEFYKFIKPILEKMDGTEELLVKLNREDLLRKQRTFDNGSIPHQIHLGELHAILRRQEDFYPFLKDNREKIEKILTFRIPYYVGPLARGNSRFAWMTRKSEETITPWNFEEVVDKGASAQSFIERMTNFDKNLPNEKVLPKHSLLYEYFTVYNELTKVKYVTEGMRKPAFLSGEQKKAIVDLLFKTNRKVTVKQLKEDYFKKIECFDSVEISGVEDRFNASLGTYHDLLKIIKDKDFLDNEENEDILEDIVLTLTLFEDREMIEERLKTYAHLFDDKVMKQLKRRRYTGWGRLSRKLINGIRDKQSGKTILDFLKSDGFANRNFMQLIHDDSLTFKEDIQKAQVSGQGDSLHEHIANLAGSPAIKKGILQTVKVVDELVKVMGRHKPENIVIEMARENQTTQKGQKNSRERMKRIEEGIKELGSQILKEHPVENTQLQNEKLYLYYLQNGRDMYVDQELDINRLSDYDVDHIVPQSFLKDDSIDNKVLTRSDKARGKSDNVPSEEVVKKMKNYWRQLLNAKLITQRKFDNLTKAERGGLSELDKAGFIKRQLVETRQITKHVAQILDSRMNTKYDENDKLIREVKVITLKSKLVSDFRKDFQFYKVREINNYHHAHDAYLNAVVGTALIKKYPKLESEFVYGDYKVYDVRKMIAKSEQEIGKATAKYFFYSNIMNFFKTEITLANGEIRKRPLIETNGETGEIVWDKGRDFATVRKVLSMPQVNIVKKTEVQTGGFSKESILPKRNSDKLIARKKDWDPKKYGGFDSPTVAYSVLVVAKVEKGKSKKLKSVKELLGITIMERSSFEKNPIDFLEAKGYKEVKKDLIIKLPKYSLFELENGRKRMLASAGELQKGNELALPSKYVNFLYLASHYEKLKGSPEDNEQKQLFVEQHKHYLDEIIEQISEFSKRVILADANLDKVLSAYNKHRDKPIREQAENIIHLFTLTNLGAPAAFKYFDTTIDRKRYTSTKEVLDATLIHQSITGLYETRIDLSQLGGDGGPAPGGSGSSGGTLNIEDEHRLHETSKEPDVSLGSTWLSDFPQAWAETGGMGLAVRQAPLIIPLKATSTPVSIKQYPMSQEARLGIKPHIQRLLDQGILVPCQSPWNTPLLPVKKPGTNDYRPVQDLREVNKRVEDIHPTVPNPYNLLSGLPPSHQWYTVLDLKDAFFCLRLHPTSQPLFAFEWRDPEMGISGQLTWTRLPQGFKNSPTLFNEALHRDLADFRIQHPDLILLQYVDDLLLAATSELDCQQGTRALLQTLGNLGYRASAKKAQICQKQVKYLGYLLKEGQRWLTEARKETVMGQPTPKTPRQLREFLGKAGFCRLFIPGFAEMAAPLYPLTKPGTLFNWGPDQQKAYQEIKQALLTAPALGLPDLTKPFELFVDEKQGYAKGVLTQKLGPWRRPVAYLSKKLDPVAAGWPPCLRMVAAIAVLTKDAGKLTMGQPLVILAPHAVEALVKQPPDRWLSNARMTHYQALLLDTDRVQFGPVVALNPATLLPLPEEGLQHNCLDILAEAHGTRPDLTDQPLPDADHTWYTDGSSLLQEGQRKAGAAVTTETEVIWAKALPAGTSAQRAELIALTQALKMAEGKKLNVYTDSRYAFATAHIHGEIYRRRGWLTSEGKEIKNKDEILALLKALFLPKRLSIIHCPGHQKGHSAEARGNRMADQAARKAAITETPDTSTLLAGKRTADGSEFEKRTADGSEFESPKKKAKVE

SEQ ID NO: 3065 - protein, 2090 aa, synthetic construct; identical to SEQ ID NO: 2825

SEQ ID NO: 3066 - protein, 2090 aa, synthetic construct
MPAAKRVKLDGGDKKYSIGLDIGTNSVGWAVITDEYKVPSKKFKVLGNTDRHSIKKNLIGALLFDSGETAEATRLKRTARRRYTRRKNRICYLQEIFSNEMAKVDDSFFHRLEESFLVEEDKKHERHPIFGNIVDEVAYHEKYPTIYHLRKKLVDSTDKADLRLIYLALAHMIKFRGHFLIEGDLNPDNSDVDKLFIQLVQTYNQLFEENPINASGVDAKAILSARLSKSRRLENLIAQLPGEKKNGLFGNLIALSLGLTPNFKSNFDLAEDAKLQLSKDTYDDDLDNLLAQIGDQYADLFLAAKNLSDAILLSDILRVNTEITKAPLSASMIKRYDEHHQDLTLLKALVRQQLPEKYKEIFFDQSKNGYAGYIDGGASQEEFYKFIKPILEKMDGTEELLVKLNREDLLRKQRTFDNGSIPHQIHLGELHAILRRQEDFYPFLKDNREKIEKILTFRIPYYVGPLARGNSRFAWMTRKSEETITPWNFEEVVDKGASAQSFIERMTNFDKNLPNEKVLPKHSLLYEYFTVYNELTKVKYVTEGMRKPAFLSGEQKKAIVDLLFKTNRKVTVKQLKEDYFKKIECFDSVEISGVEDRFNASLGTYHDLLKIIKDKDFLDNEENEDILEDIVLTLTLFEDREMIEERLKTYAHLFDDKVMKQLKRRRYTGWGRLSRKLINGIRDKQSGKTILDFLKSDGFANRNFMQLIHDDSLTFKEDIQKAQVSGQGDSLHEHIANLAGSPAIKKGILQTVKVVDELVKVMGRHKPENIVIEMARENQTTQKGQKNSRERMKRIEEGIKELGSQILKEHPVENTQLQNEKLYLYYLQNGRDMYVDQELDINRLSDYDVDHIVPQSFLKDDSIDNKVLTRSDKARGKSDNVPSEEVVKKMKNYWRQLLNAKLITQRKFDNLTKAERGGLSELDKAGFIKRQLVETRQITKHVAQILDSRMNTKYDENDKLIREVKVITLKSKLVSDFRKDFQFYKVREINNYHHAHDAYLNAVVGTALIKKYPKLESEFVYGDYKVYDVRKMIAKSEQEIGKATAKYFFYSNIMNFFKTEITLANGEIRKRPLIETNGETGEIVWDKGRDFATVRKVLSMPQVNIVKKTEVQTGGFSKESILPKRNSDKLIARKKDWDPKKYGGFDSPTVAYSVLVVAKVEKGKSKKLKSVKELLGITIMERSSFEKNPIDFLEAKGYKEVKKDLIIKLPKYSLFELENGRKRMLASAGELQKGNELALPSKYVNFLYLASHYEKLKGSPEDNEQKQLFVEQHKHYLDEIIEQISEFSKRVILADANLDKVLSAYNKHRDKPIREQAENIIHLFTLTNLGAPAAFKYFDTTIDRKRYTSTKEVLDATLIHQSITGLYETRIDLSQLGGDGGPAPAPGGTLNIEDEHRLHETSKEPDVSLGSTWLSDFPQAWAETGGMGLAVRQAPLIIPLKATSTPVSIKQYPMSQEARLGIKPHIQRLLDQGILVPCQSPWNTPLLPVKKPGTNDYRPVQDLREVNKRVEDIHPTVPNPYNLLSGLPPSHQWYTVLDLKDAFFCLRLHPTSQPLFAFEWRDPEMGISGQLTWTRLPQGFKNSPTLFNEALHRDLADFRIQHPDLILLQYVDDLLLAATSELDCQQGTRALLQTLGNLGYRASAKKAQICQKQVKYLGYLLKEGQRWLTEARKETVMGQPTPKTPRQLREFLGKAGFCRLFIPGFAEMAAPLYPLTKPGTLFNWGPDQQKAYQEIKQALLTAPALGLPDLTKPFELFVDEKQGYAKGVLTQKLGPWRRPVAYLSKKLDPVAAGWPPCLRMVAAIAVLTKDAGKLTMGQPLVILAPHAVEALVKQPPDRWLSNARMTHYQALLLDTDRVQFGPVVALNPATLLPLPEEGLQHNCLDILAEAHGTRPDLTDQPLPDADHTWYTDGSSLLQEGQRKAGAAVTTETEVIWAKALPAGTSAQRAELIALTQALKMAEGKKLNVYTDSRYAFATAHIHGEIYRRRGWLTSEGKEIKNKDEILALLKALFLPKRLSIIHCPGHQKGHSAEARGNRMADQAARKAAITETPDTSTLLAGKRTADGSEFEKRTADGSEFESPKKKAKVE

SEQ ID NO: 3067 - protein, 2096 aa, synthetic construct; identical to SEQ ID NO: 2787

SEQ ID NO: 3068 - protein, 2096 aa, synthetic construct
MPAAKRVKLDGGDKKYSIGLDIGTNSVGWAVITDEYKVPSKKFKVLGNTDRHSIKKNLIGALLFDSGETAEATRLKRTARRRYTRRKNRICYLQEIFSNEMAKVDDSFFHRLEESFLVEEDKKHERHPIFGNIVDEVAYHEKYPTIYHLRKKLVDSTDKADLRLIYLALAHMIKFRGHFLIEGDLNPDNSDVDKLFIQLVQTYNQLFEENPINASGVDAKAILSARLSKSRRLENLIAQLPGEKKNGLFGNLIALSLGLTPNFKSNFDLAEDAKLQLSKDTYDDDLDNLLAQIGDQYADLFLAAKNLSDAILLSDILRVNTEITKAPLSASMIKRYDEHHQDLTLLKALVRQQLPEKYKEIFFDQSKNGYAGYIDGGASQEEFYKFIKPILEKMDGTEELLVKLNREDLLRKQRTFDNGSIPHQIHLGELHAILRRQEDFYPFLKDNREKIEKILTFRIPYYVGPLARGNSRFAWMTRKSEETITPWNFEEVVDKGASAQSFIERMTNFDKNLPNEKVLPKHSLLYEYFTVYNELTKVKYVTEGMRKPAFLSGEQKKAIVDLLFKTNRKVTVKQLKEDYFKKIECFDSVEISGVEDRFNASLGTYHDLLKIIKDKDFLDNEENEDILEDIVLTLTLFEDREMIEERLKTYAHLFDDKVMKQLKRRRYTGWGRLSRKLINGIRDKQSGKTILDFLKSDGFANRNFMQLIHDDSLTFKEDIQKAQVSGQGDSLHEHIANLAGSPAIKKGILQTVKVVDELVKVMGRHKPENIVIEMARENQTTQKGQKNSRERMKRIEEGIKELGSQILKEHPVENTQLQNEKLYLYYLQNGRDMYVDQELDINRLSDYDVDHIVPQSFLKDDSIDNKVLTRSDKARGKSDNVPSEEVVKKMKNYWRQLLNAKLITQRKFDNLTKAERGGLSELDKAGFIKRQLVETRQITKHVAQILDSRMNTKYDENDKLIREVKVITLKSKLVSDFRKDFQFYKVREINNYHHAHDAYLNAVVGTALIKKYPKLESEFVYGDYKVYDVRKMIAKSEQEIGKATAKYFFYSNIMNFFKTEITLANGEIRKRPLIETNGETGEIVWDKGRDFATVRKVLSMPQVNIVKKTEVQTGGFSKESILPKRNSDKLIARKKDWDPKKYGGFDSPTVAYSVLVVAKVEKGKSKKLKSVKELLGITIMERSSFEKNPIDFLEAKGYKEVKKDLIIKLPKYSLFELENGRKRMLASAGELQKGNELALPSKYVNFLYLASHYEKLKGSPEDNEQKQLFVEQHKHYLDEIIEQISEFSKRVILADANLDKVLSAYNKHRDKPIREQAENIIHLFTLTNLGAPAAFKYFDTTIDRKRYTSTKEVLDATLIHQSITGLYETRIDLSQLGGDGGPAPEAAAKGGGGGTLNIEDEHRLHETSKEPDVSLGSTWLSDFPQAWAETGGMGLAVRQAPLIIPLKATSTPVSIKQYPMSQEARLGIKPHIQRLLDQGILVPCQSPWNTPLLPVKKPGTNDYRPVQDLREVNKRVEDIHPTVPNPYNLLSGLPPSHQWYTVLDLKDAFFCLRLHPTSQPLFAFEWRDPEMGISGQLTWTRLPQGFKNSPTLFNEALHRDLADFRIQHPDLILLQYVDDLLLAATSELDCQQGTRALLQTLGNLGYRASAKKAQICQKQVKYLGYLLKEGQRWLTEARKETVMGQPTPKTPRQLREFLGKAGFCRLFIPGFAEMAAPLYPLTKPGTLFNWGPDQQKAYQEIKQALLTAPALGLPDLTKPFELFVDEKQGYAKGVLTQKLGPWRRPVAYLSKKLDPVAAGWPPCLRMVAAIAVLTKDAGKLTMGQPLVILAPHAVEALVKQPPDRWLSNARMTHYQALLLDTDRVQFGPVVALNPATLLPLPEEGLQHNCLDILAEAHGTRPDLTDQPLPDADHTWYTDGSSLLQEGQRKAGAAVTTETEVIWAKALPAGTSAQRAELIALTQALKMAEGKKLNVYTDSRYAFATAHIHGEIYRRRGWLTSEGKEIKNKDEILALLKALFLPKRLSIIHCPGHQKGHSAEARGNRMADQAARKAAITETPDTSTLLAGKRTADGSEFEKRTADGSEFESPKKKAKVE

SEQ ID NO: 3069 - protein, 2088 aa, synthetic construct
MPAAKRVKLDGGDKKYSIGLDIGTNSVGWAVITDEYKVPSKKFKVLGNTDRHSIKKNLIGALLFDSGETAEATRLKRTARRRYTRRKNRICYLQEIFSNEMAKVDDSFFHRLEESFLVEEDKKHERHPIFGNIVDEVAYHEKYPTIYHLRKKLVDSTDKADLRLIYLALAHMIKFRGHFLIEGDLNPDNSDVDKLFIQLVQTYNQLFEENPINASGVDAKAILSARLSKSRRLENLIAQLPGEKKNGLFGNLIALSLGLTPNFKSNFDLAEDAKLQLSKDTYDDDLDNLLAQIGDQYADLFLAAKNLSDAILLSDILRVNTEITKAPLSASMIKRYDEHHQDLTLLKALVRQQLPEKYKEIFFDQSKNGYAGYIDGGASQEEFYKFIKPILEKMDGTEELLVKLNREDLLRKQRTFDNGSIPHQIHLGELHAILRRQEDFYPFLKDNREKIEKILTFRIPYYVGPLARGNSRFAWMTRKSEETITPWNFEEVVDKGASAQSFIERMTNFDKNLPNEKVLPKHSLLYEYFTVYNELTKVKYVTEGMRKPAFLSGEQKKAIVDLLFKTNRKVTVKQLKEDYFKKIECFDSVEISGVEDRFNASLGTYHDLLKIIKDKDFLDNEENEDILEDIVLTLTLFEDREMIEERLKTYAHLFDDKVMKQLKRRRYTGWGRLSRKLINGIRDKQSGKTILDFLKSDGFANRNFMQLIHDDSLTFKEDIQKAQVSGQGDSLHEHIANLAGSPAIKKGILQTVKVVDELVKVMGRHKPENIVIEMARENQTTQKGQKNSRERMKRIEEGIKELGSQILKEHPVENTQLQNEKLYLYYLQNGRDMYVDQELDINRLSDYDVDHIVPQSFLKDDSIDNKVLTRSDKARGKSDNVPSEEVVKKMKNYWRQLLNAKLITQRKFDNLTKAERGGLSELDKAGFIKRQLVETRQITKHVAQILDSRMNTKYDENDKLIREVKVITLKSKLVSDFRKDFQFYKVREINNYHHAHDAYLNAVVGTALIKKYPKLESEFVYGDYKVYDVRKMIAKSEQEIGKATAKYFFYSNIMNFFKTEITLANGEIRKRPLIETNGETGEIVWDKGRDFATVRKVLSMPQVNIVKKTEVQTGGFSKESILPKRNSDKLIARKKDWDPKKYGGFDSPTVAYSVLVVAKVEKGKSKKLKSVKELLGITIMERSSFEKNPIDFLEAKGYKEVKKDLIIKLPKYSLFELENGRKRMLASAGELQKGNELALPSKYVNFLYLASHYEKLKGSPEDNEQKQLFVEQHKHYLDEIIEQISEFSKRVILADANLDKVLSAYNKHRDKPIREQAENIIHLFTLTNLGAPAAFKYFDTTIDRKRYTSTKEVLDATLIHQSITGLYETRIDLSQLGGDGGGSSGGTLNIEDEHRLHETSKEPDVSLGSTWLSDFPQAWAETGGMGLAVRQAPLIIPLKATSTPVSIKQYPMSQEARLGIKPHIQRLLDQGILVPCQSPWNTPLLPVKKPGTNDYRPVQDLREVNKRVEDIHPTVPNPYNLLSGLPPSHQWYTVLDLKDAFFCLRLHPTSQPLFAFEWRDPEMGISGQLTWTRLPQGFKNSPTLFNEALHRDLADFRIQHPDLILLQYVDDLLLAATSELDCQQGTRALLQTLGNLGYRASAKKAQICQKQVKYLGYLLKEGQRWLTEARKETVMGQPTPKTPRQLREFLGKAGFCRLFIPGFAEMAAPLYPLTKPGTLFNWGPDQQKAYQEIKQALLTAPALGLPDLTKPFELFVDEKQGYAKGVLTQKLGPWRRPVAYLSKKLDPVAAGWPPCLRMVAAIAVLTKDAGKLTMGQPLVILAPHAVEALVKQPPDRWLSNARMTHYQALLLDTDRVQFGPVVALNPATLLPLPEEGLQHNCLDILAEAHGTRPDLTDQPLPDADHTWYTDGSSLLQEGQRKAGAAVTTETEVIWAKALPAGTSAQRAELIALTQALKMAEGKKLNVYTDSRYAFATAHIHGEIYRRRGWLTSEGKEIKNKDEILALLKALFLPKRLSIIHCPGHQKGHSAEARGNRMADQAARKAAITETPDTSTLLAGKRTADGSEFEKRTADGSEFESPKKKAKVE

SEQ ID NO: 3070 - protein, 2094 aa, synthetic construct; identical to SEQ ID NO: 2809

SEQ ID NO: 3071 - protein, 2097 aa, synthetic construct; identical to SEQ ID NO: 2806

SEQ ID NO: 3072 - protein, 2096 aa, synthetic construct
MPAAKRVKLDGGDKKYSIGLDIGTNSVGWAVITDEYKVPSKKFKVLGNTDRHSIKKNLIGALLFDSGETAEATRLKRTARRRYTRRKNRICYLQEIFSNEMAKVDDSFFHRLEESFLVEEDKKHERHPIFGNIVDEVAYHEKYPTIYHLRKKLVDSTDKADLRLIYLALAHMIKFRGHFLIEGDLNPDNSDVDKLFIQLVQTYNQLFEENPINASGVDAKAILSARLSKSRRLENLIAQLPGEKKNGLFGNLIALSLGLTPNFKSNFDLAEDAKLQLSKDTYDDDLDNLLAQIGDQYADLFLAAKNLSDAILLSDILRVNTEITKAPLSASMIKRYDEHHQDLTLLKALVRQQLPEKYKEIFFDQSKNGYAGYIDGGASQEEFYKFIKPILEKMDGTEELLVKLNREDLLRKQRTFDNGSIPHQIHLGELHAILRRQEDFYPFLKDNREKIEKILTFRIPYYVGPLARGNSRFAWMTRKSEETITPWNFEEVVDKGASAQSFIERMTNFDKNLPNEKVLPKHSLLYEYFTVYNELTKVKYVTEGMRKPAFLSGEQKKAIVDLLFKTNRKVTVKQLKEDYFKKIECFDSVEISGVEDRFNASLGTYHDLLKIIKDKDFLDNEENEDILEDIVLTLTLFEDREMIEERLKTYAHLFDDKVMKQLKRRRYTGWGRLSRKLINGIRDKQSGKTILDFLKSDGFANRNFMQLIHDDSLTFKEDIQKAQVSGQGDSLHEHIANLAGSPAIKKGILQTVKVVDELVKVMGRHKPENIVIEMARENQTTQKGQKNSRERMKRIEEGIKELGSQILKEHPVENTQLQNEKLYLYYLQNGRDMYVDQELDINRLSDYDVDHIVPQSFLKDDSIDNKVLTRSDKARGKSDNVPSEEVVKKMKNYWRQLLNAKLITQRKFDNLTKAERGGLSELDKAGFIKRQLVETRQITKHVAQILDSRMNTKYDENDKLIREVKVITLKSKLVSDFRKDFQFYKVREINNYHHAHDAYLNAVVGTALIKKYPKLESEFVYGDYKVYDVRKMIAKSEQEIGKATAKYFFYSNIMNFFKTEITLANGEIRKRPLIETNGETGEIVWDKGRDFATVRKVLSMPQVNIVKKTEVQTGGFSKESILPKRNSDKLIARKKDWDPKKYGGFDSPTVAYSVLVVAKVEKGKSKKLKSVKELLGITIMERSSFEKNPIDFLEAKGYKEVKKDLIIKLPKYSLFELENGRKRMLASAGELQKGNELALPSKYVNFLYLASHYEKLKGSPEDNEQKQLFVEQHKHYLDEIIEQISEFSKRVILADANLDKVLSAYNKHRDKPIREQAENIIHLFTLTNLGAPAAFKYFDTTIDRKRYTSTKEVLDATLIHQSITGLYETRIDLSQLGGDGGGSSEAAAKGGGGGTLNIEDEHRLHETSKEPDVSLGSTWLSDFPQAWAETGGMGLAVRQAPLIIPLKATSTPVSIKQYPMSQEARLGIKPHIQRLLDQGILVPCQSPWNTPLLPVKKPGTNDYRPVQDLREVNKRVEDIHPTVPNPYNLLSGLPPSHQWYTVLDLKDAFFCLRLHPTSQPLFAFEWRDPEMGISGQLTWTRLPQGFKNSPTLFNEALHRDLADFRIQHPDLILLQYVDDLLLAATSELDCQQGTRALLQTLGNLGYRASAKKAQICQKQVKYLGYLLKEGQRWLTEARKETVMGQPTPKTPRQLREFLGKAGFCRLFIPGFAEMAAPLYPLTKPGTLFNWGPDQQKAYQEIKQALLTAPALGLPDLTKPFELFVDEKQGYAKGVLTQKLGPWRRPVAYLSKKLDPVAAGWPPCLRMVAAIAVLTKDAGKLTMGQPLVILAPHAVEALVKQPPDRWLSNARMTHYQALLLDTDRVQFGPVVALNPATLLPLPEEGLQHNCLDILAEAHGTRPDLTDQPLPDADHTWYTDGSSLLQEGQRKAGAAVTTETEVIWAKALPAGTSAQRAELIALTQALKMAEGKKLNVYTDSRYAFATAHIHGEIYRRRGWLTSEGKEIKNKDEILALLKALFLPKRLSIIHCPGHQKGHSAEARGNRMADQAARKAAITETPDTSTLLAGKRTADGSEFEKRTADGSEFESPKKKAKVE

SEQ ID NO: 3073 - protein, 2091 aa, synthetic construct
MPAAKRVKLDGGDKKYSIGLDIGTNSVGWAVITDEYKVPSKKFKVLGNTDRHSIKKNLIGALLFDSGETAEATRLKRTARRRYTRRKNRICYLQEIFSNEMAKVDDSFFHRLEESFLVEEDKKHERHPIFGNIVDEVAYHEKYPTIYHLRKKLVDSTDKADLRLIYLALAHMIKFRGHFLIEGDLNPDNSDVDKLFIQLVQTYNQLFEENPINASGVDAKAILSARLSKSRRLENLIAQLPGEKKNGLFGNLIALSLGLTPNFKSNFDLAEDAKLQLSKDTYDDDLDNLLAQIGDQYADLFLAAKNLSDAILLSDILRVNTEITKAPLSASMIKRYDEHHQDLTLLKALVRQQLPEKYKEIFFDQSKNGYAGYIDGGASQEEFYKFIKPILEKMDGTEELLVKLNREDLLRKQRTFDNGSIPHQIHLGELHAILRRQEDFYPFLKDNREKIEKILTFRIPYYVGPLARGNSRFAWMTRKSEETITPWNFEEVVDKGASAQSFIERMTNFDKNLPNEKVLPKHSLLYEYFTVYNELTKVKYVTEGMRKPAFLSGEQKKAIVDLLFKTNRKVTVKQLKEDYFKKIECFDSVEISGVEDRFNASLGTYHDLLKIIKDKDFLDNEENEDILEDIVLTLTLFEDREMIEERLKTYAHLFDDKVMKQLKRRRYTGWGRLSRKLINGIRDKQSGKTILDFLKSDGFANRNFMQLIHDDSLTFKEDIQKAQVSGQGDSLHEHIANLAGSPAIKKGILQTVKVVDELVKVMGRHKPENIVIEMARENQTTQKGQKNSRERMKRIEEGIKELGSQILKEHPVENTQLQNEKLYLYYLQNGRDMYVDQELDINRLSDYDVDHIVPQSFLKDDSIDNKVLTRSDKARGKSDNVPSEEVVKKMKNYWRQLLNAKLITQRKFDNLTKAERGGLSELDKAGFIKRQLVETRQITKHVAQILDSRMNTKYDENDKLIREVKVITLKSKLVSDFRKDFQFYKVREINNYHHAHDAYLNAVVGTALIKKYPKLESEFVYGDYKVYDVRKMIAKSEQEIGKATAKYFFYSNIMNFFKTEITLANGEIRKRPLIETNGETGEIVWDKGRDFATVRKVLSMPQVNIVKKTEVQTGGFSKESILPKRNSDKLIARKKDWDPKKYGGFDSPTVAYSVLVVAKVEKGKSKKLKSVKELLGITIMERSSFEKNPIDFLEAKGYKEVKKDLIIKLPKYSLFELENGRKRMLASAGELQKGNELALPSKYVNFLYLASHYEKLKGSPEDNEQKQLFVEQHKHYLDEIIEQISEFSKRVILADANLDKVLSAYNKHRDKPIREQAENIIHLFTLTNLGAPAAFKYFDTTIDRKRYTSTKEVLDATLIHQSITGLYETRIDLSQLGGDGGGGGPAPGGTLNIEDEHRLHETSKEPDVSLGSTWLSDFPQAWAETGGMGLAVRQAPLIIPLKATSTPVSIKQYPMSQEARLGIKPHIQRLLDQGILVPCQSPWNTPLLPVKKPGTNDYRPVQDLREVNKRVEDIHPTVPNPYNLLSGLPPSHQWYTVLDLKDAFFCLRLHPTSQPLFAFEWRDPEMGISGQLTWTRLPQGFKNSPTLFNEALHRDLADFRIQHPDLILLQYVDDLLLAATSELDCQQGTRALLQTLGNLGYRASAKKAQICQKQVKYLGYLLKEGQRWLTEARKETVMGQPTPKTPRQLREFLGKAGFCRLFIPGFAEMAAPLYPLTKPGTLFNWGPDQQKAYQEIKQALLTAPALGLPDLTKPFELFVDEKQGYAKGVLTQKLGPWRRPVAYLSKKLDPVAAGWPPCLRMVAAIAVLTKDAGKLTMGQPLVILAPHAVEALVKQPPDRWLSNARMTHYQALLLDTDRVQFGPVVALNPATLLPLPEEGLQHNCLDILAEAHGTRPDLTDQPLPDADHTWYTDGSSLLQEGQRKAGAAVTTETEVIWAKALPAGTSAQRAELIALTQALKMAEGKKLNVYTDSRYAFATAHIHGEIYRRRGWLTSEGKEIKNKDEILALLKALFLPKRLSIIHCPGHQKGHSAEARGNRMADQAARKAAITETPDTSTLLAGKRTADGSEFEKRTADGSEFESPKKKAKVE

SEQ ID NO: 3074 - protein, 2091 aa, synthetic construct; identical to SEQ ID NO: 2853

SEQ ID NO: 3075 - protein, 2094 aa, synthetic construct
MPAAKRVKLDGGDKKYSIGLDIGTNSVGWAVITDEYKVPSKKFKVLGNTDRHSIKKNLIGALLFDSGETAEATRLKRTARRRYTRRKNRICYLQEIFSNEMAKVDDSFFHRLEESFLVEEDKKHERHPIFGNIVDEVAYHEKYPTIYHLRKKLVDSTDKADLRLIYLALAHMIKFRGHFLIEGDLNPDNSDVDKLFIQLVQTYNQLFEENPINASGVDAKAILSARLSKSRRLENLIAQLPGEKKNGLFGNLIALSLGLTPNFKSNFDLAEDAKLQLSKDTYDDDLDNLLAQIGDQYADLFLAAKNLSDAILLSDILRVNTEITKAPLSASMIKRYDEHHQDLTLLKALVRQQLPEKYKEIFFDQSKNGYAGYIDGGASQEEFYKFIKPILEKMDGTEELLVKLNREDLLRKQRTFDNGSIPHQIHLGELHAILRRQEDFYPFLKDNREKIEKILTFRIPYYVGPLARGNSRFAWMTRKSEETITPWNFEEVVDKGASAQSFIERMTNFDKNLPNEKVLPKHSLLYEYFTVYNELTKVKYVTEGMRKPAFLSGEQKKAIVDLLFKTNRKVTVKQLKEDYFKKIECFDSVEISGVEDRFNASLGTYHDLLKIIKDKDFLDNEENEDILEDIVLTLTLFEDREMIEERLKTYAHLFDDKVMKQLKRRRYTGWGRLSRKLINGIRDKQSGKTILDFLKSDGFANRNFMQLIHDDSLTFKEDIQKAQVSGQGDSLHEHIANLAGSPAIKKGILQTVKVVDELVKVMGRHKPENIVIEMARENQTTQKGQKNSRERMKRIEEGIKELGSQILKEHPVENTQLQNEKLYLYYLQNGRDMYVDQELDINRLSDYDVDHIVPQSFLKDDSIDNKVLTRSDKARGKSDNVPSEEVVKKMKNYWRQLLNAKLITQRKFDNLTKAERGGLSELDKAGFIKRQLVETRQITKHVAQILDSRMNTKYDENDKLIREVKVITLKSKLVSDFRKDFQFYKVREINNYHHAHDAYLNAVVGTALIKKYPKLESEFVYGDYKVYDVRKMIAKSEQEIGKATAKYFFYSNIMNFFKTEITLANGEIRKRPLIETNGETGEIVWDKGRDFATVRKVLSMPQVNIVKKTEVQTGGFSKESILPKRNSDKLIARKKDWDPKKYGGFDSPTVAYSVLVVAKVEKGKSKKLKSVKELLGITIMERSSFEKNPIDFLEAKGYKEVKKDLIIKLPKYSLFELENGRKRMLASAGELQKGNELALPSKYVNFLYLASHYEKLKGSPEDNEQKQLFVEQHKHYLDEIIEQISEFSKRVILADANLDKVLSAYNKHRDKPIREQAENIIHLFTLTNLGAPAAFKYFDTTIDRKRYTSTKEVLDATLIHQSITGLYETRIDLSQLGGDGGGSSGGSPAPGGTLNIEDEHRLHETSKEPDVSLGSTWLSDFPQAWAETGGMGLAVRQAPLIIPLKATSTPVSIKQYPMSQEARLGIKPHIQRLLDQGILVPCQSPWNTPLLPVKKPGTNDYRPVQDLREVNKRVEDIHPTVPNPYNLLSGLPPSHQWYTVLDLKDAFFCLRLHPTSQPLFAFEWRDPEMGISGQLTWTRLPQGFKNSPTLFNEALHRDLADFRIQHPDLILLQYVDDLLLAATSELDCQQGTRALLQTLGNLGYRASAKKAQICQKQVKYLGYLLKEGQRWLTEARKETVMGQPTPKTPRQLREFLGKAGFCRLFIPGFAEMAAPLYPLTKPGTLFNWGPDQQKAYQEIKQALLTAPALGLPDLTKPFELFVDEKQGYAKGVLTQKLGPWRRPVAYLSKKLDPVAAGWPPCLRMVAAIAVLTKDAGKLTMGQPLVILAPHAVEALVKQPPDRWLSNARMTHYQALLLDTDRVQFGPVVALNPATLLPLPEEGLQHNCLDILAEAHGTRPDLTDQPLPDADHTWYTDGSSLLQEGQRKAGAAVTTETEVIWAKALPAGTSAQRAELIALTQALKMAEGKKLNVYTDSRYAFATAHIHGEIYRRRGWLTSEGKEIKNKDEILALLKALFLPKRLSIIHCPGHQKGHSAEARGNRMADQAARKAAITETPDTSTLLAGKRTADGSEFEKRTADGSEFESPKKKAKVE

SEQ ID NO: 3076 - protein, 2091 aa, synthetic construct; identical to SEQ ID NO: 2780

SEQ ID NO: 3077 - protein, 2101 aa, synthetic construct; identical to SEQ ID NO: 2858

SEQ ID NO: 3078 - protein, 2093 aa, synthetic construct; identical to SEQ ID NO: 2821

SEQ ID NO: 3079 - protein, 2100 aa, synthetic construct; identical to SEQ ID NO: 2788

SEQ ID NO: 3080 - protein, 2096 aa, synthetic construct
MPAAKRVKLDGGDKKYSIGLDIGTNSVGWAVITDEYKVPSKKFKVLGNTDRHSIKKNLIGALLFDSGETAEATRLKRTARRRYTRRKNRICYLQEIFSNEMAKVDDSFFHRLEESFLVEEDKKHERHPIFGNIVDEVAYHEKYPTIYHLRKKLVDSTDKADLRLIYLALAHMIKFRGHFLIEGDLNPDNSDVDKLFIQLVQTYNQLFEENPINASGVDAKAILSARLSKSRRLENLIAQLPGEKKNGLFGNLIALSLGLTPNFKSNFDLAEDAKLQLSKDTYDDDLDNLLAQIGDQYADLFLAAKNLSDAILLSDILRVNTEITKAPLSASMIKRYDEHHQDLTLLKALVRQQLPEKYKEIFFDQSKNGYAGYIDGGASQEEFYKFIKPILEKMDGTEELLVKLNREDLLRKQRTFDNGSIPHQIHLGELHAILRRQEDFYPFLKDNREKIEKILTFRIPYYVGPLARGNSRFAWMTRKSEETITPWNFEEVVDKGASAQSFIERMTNFDKNLPNEKVLPKHSLLYEYFTVYNELTKVKYVTEGMRKPAFLSGEQKKAIVDLLFKTNRKVTVKQLKEDYFKKIECFDSVEISGVEDRFNASLGTYHDLLKIIKDKDFLDNEENEDILEDIVLTLTLFEDREMIEERLKTYAHLFDDKVMKQLKRRRYTGWGRLSRKLINGIRDKQSGKTILDFLKSDGFANRNFMQLIHDDSLTFKEDIQKAQVSGQGDSLHEHIANLAGSPAIKKGILQTVKVVDELVKVMGRHKPENIVIEMARENQTTQKGQKNSRERMKRIEEGIKELGSQILKEHPVENTQLQNEKLYLYYLQNGRDMYVDQELDINRLSDYDVDHIVPQSFLKDDSIDNKVLTRSDKARGKSDNVPSEEVVKKMKNYWRQLLNAKLITQRKFDNLTKAERGGLSELDKAGFIKRQLVETRQITKHVAQILDSRMNTKYDENDKLIREVKVITLKSKLVSDFRKDFQFYKVREINNYHHAHDAYLNAVVGTALIKKYPKLESEFVYGDYKVYDVRKMIAKSEQEIGKATAKYFFYSNIMNFFKTEITLANGEIRKRPLIETNGETGEIVWDKGRDFATVRKVLSMPQVNIVKKTEVQTGGFSKESILPKRNSDKLIARKKDWDPKKYGGFDSPTVAYSVLVVAKVEKGKSKKLKSVKELLGITIMERSSFEKNPIDFLEAKGYKEVKKDLIIKLPKYSLFELENGRKRMLASAGELQKGNELALPSKYVNFLYLASHYEKLKGSPEDNEQKQLFVEQHKHYLDEIIEQISEFSKRVILADANLDKVLSAYNKHRDKPIREQAENIIHLFTLTNLGAPAAFKYFDTTIDRKRYTSTKEVLDATLIHQSITGLYETRIDLSQLGGDGGEAAAKPAPGGSGGTLNIEDEHRLHETSKEPDVSLGSTWLSDFPQAWAETGGMGLAVRQAPLIIPLKATSTPVSIKQYPMSQEARLGIKPHIQRLLDQGILVPCQSPWNTPLLPVKKPGTNDYRPVQDLREVNKRVEDIHPTVPNPYNLLSGLPPSHQWYTVLDLKDAFFCLRLHPTSQPLFAFEWRDPEMGISGQLTWTRLPQGFKNSPTLFNEALHRDLADFRIQHPDLILLQYVDDLLLAATSELDCQQGTRALLQTLGNLGYRASAKKAQICQKQVKYLGYLLKEGQRWLTEARKETVMGQPTPKTPRQLREFLGKAGFCRLFIPGFAEMAAPLYPLTKPGTLFNWGPDQQKAYQEIKQALLTAPALGLPDLTKPFELFVDEKQGYAKGVLTQKLGPWRRPVAYLSKKLDPVAAGWPPCLRMVAAIAVLTKDAGKLTMGQPLVILAPHAVEALVKQPPDRWLSNARMTHYQALLLDTDRVQFGPVVALNPATLLPLPEEGLQHNCLDILAEAHGTRPDLTDQPLPDADHTWYTDGSSLLQEGQRKAGAAVTTETEVIWAKALPAGTSAQRAELIALTQALKMAEGKKLNVYTDSRYAFATAHIHGEIYRRRGWLTSEGKEIKNKDEILALLKALFLPKRLSIIHCPGHQKGHSAEARGNRMADQAARKAAITETPDTSTLLAGKRTADGSEFEKRTADGSEFESPKKKAKVE

SEQ ID NO: 3081 - protein, 2115 aa, synthetic construct; identical to SEQ ID NO: 2827

SEQ ID NO: 3082 - protein, 2093 aa, synthetic construct; identical to SEQ ID NO: 2856

SEQ ID NO: 3083 - protein, 2096 aa, synthetic construct; identical to SEQ ID NO: 2786

SEQ ID NO: 3084 - protein, 2098 aa, synthetic construct; identical to SEQ ID NO: 2797

SEQ ID NO: 3085 - protein, 2096 aa, synthetic construct; identical to SEQ ID NO: 2830

SEQ ID NO: 3086 - protein, 2094 aa, synthetic construct
MPAAKRVKLDGGDKKYSIGLDIGTNSVGWAVITDEYKVPSKKFKVLGNTDRHSIKKNLIGALLFDSGETAEATRLKRTARRRYTRRKNRICYLQEIFSNEMAKVDDSFFHRLEESFLVEEDKKHERHPIFGNIVDEVAYHEKYPTIYHLRKKLVDSTDKADLRLIYLALAHMIKFRGHFLIEGDLNPDNSDVDKLFIQLVQTYNQLFEENPINASGVDAKAILSARLSKSRRLENLIAQLPGEKKNGLFGNLIALSLGLTPNFKSNFDLAEDAKLQLSKDTYDDDLDNLLAQIGDQYADLFLAAKNLSDAILLSDILRVNTEITKAPLSASMIKRYDEHHQDLTLLKALVRQQLPEKYKEIFFDQSKNGYAGYIDGGASQEEFYKFIKPILEKMDGTEELLVKLNREDLLRKQRTFDNGSIPHQIHLGELHAILRRQEDFYPFLKDNREKIEKILTFRIPYYVGPLARGNSRFAWMTRKSEETITPWNFEEVVDKGASAQSFIERMTNFDKNLPNEKVLPKHSLLYEYFTVYNELTKVKYVTEGMRKPAFLSGEQKKAIVDLLFKTNRKVTVKQLKEDYFKKIECFDSVEISGVEDRFNASLGTYHDLLKIIKDKDFLDNEENEDILEDIVLTLTLFEDREMIEERLKTYAHLFDDKVMKQLKRRRYTGWGRLSRKLINGIRDKQSGKTILDFLKSDGFANRNFMQLIHDDSLTFKEDIQKAQVSGQGDSLHEHIANLAGSPAIKKGILQTVKVVDELVKVMGRHKPENIVIEMARENQTTQKGQKNSRERMKRIEEGIKELGSQILKEHPVENTQLQNEKLYLYYLQNGRDMYVDQELDINRLSDYDVDHIVPQSFLKDDSIDNKVLTRSDKARGKSDNVPSEEVVKKMKNYWRQLLNAKLITQRKFDNLTKAERGGLSELDKAGFIKRQLVETRQITKHVAQILDSRMNTKYDENDKLIREVKVITLKSKLVSDFRKDFQFYKVREINNYHHAHDAYLNAVVGTALIKKYPKLESEFVYGDYKVYDVRKMIAKSEQEIGKATAKYFFYSNIMNFFKTEITLANGEIRKRPLIETNGETGEIVWDKGRDFATVRKVLSMPQVNIVKKTEVQTGGFSKESILPKRNSDKLIARKKDWDPKKYGGFDSPTVAYSVLVVAKVEKGKSKKLKSVKELLGITIMERSSFEKNPIDFLEAKGYKEVKKDLIIKLPKYSLFELENGRKRMLASAGELQKGNELALPSKYVNFLYLASHYEKLKGSPEDNEQKQLFVEQHKHYLDEIIEQISEFSKRVILADANLDKVLSAYNKHRDKPIREQAENIIHLFTLTNLGAPAAFKYFDTTIDRKRYTSTKEVLDATLIHQSITGLYETRIDLSQLGGDGGPAPAPAPAPGGTLNIEDEHRLHETSKEPDVSLGSTWLSDFPQAWAETGGMGLAVRQAPLIIPLKATSTPVSIKQYPMSQEARLGIKPHIQRLLDQGILVPCQSPWNTPLLPVKKPGTNDYRPVQDLREVNKRVEDIHPTVPNPYNLLSGLPPSHQWYTVLDLKDAFFCLRLHPTSQPLFAFEWRDPEMGISGQLTWTRLPQGFKNSPTLFNEALHRDLADFRIQHPDLILLQYVDDLLLAATSELDCQQGTRALLQTLGNLGYRASAKKAQICQKQVKYLGYLLKEGQRWLTEARKETVMGQPTPKTPRQLREFLGKAGFCRLFIPGFAEMAAPLYPLTKPGTLFNWGPDQQKAYQEIKQALLTAPALGLPDLTKPFELFVDEKQGYAKGVLTQKLGPWRRPVAYLSKKLDPVAAGWPPCLRMVAAIAVLTKDAGKLTMGQPLVILAPHAVEALVKQPPDRWLSNARMTHYQALLLDTDRVQFGPVVALNPATLLPLPEEGLQHNCLDILAEAHGTRPDLTDQPLPDADHTWYTDGSSLLQEGQRKAGAAVTTETEVIWAKALPAGTSAQRAELIALTQALKMAEGKKLNVYTDSRYAFATAHIHGEIYRRRGWLTSEGKEIKNKDEILALLKALFLPKRLSIIHCPGHQKGHSAEARGNRMADQAARKAAITETPDTSTLLAGKRTADGSEFEKRTADGSEFESPKKKAKVE

SEQ ID NO: 3087 - protein, 2091 aa, synthetic construct; identical to SEQ ID NO: 2808

SEQ ID NO: 3088 - protein, 2096 aa, synthetic construct; identical to SEQ ID NO: 2857

SEQ ID NO: 3089 - protein, 2091 aa, synthetic construct; identical to SEQ ID NO: 2855

SEQ ID NO: 3090 - protein, 2094 aa, synthetic construct; identical to SEQ ID NO: 2847

SEQ ID NO: 3091 - protein, 2096 aa, synthetic construct; identical to SEQ ID NO: 2798

SEQ ID NO: 3092 - protein, 2100 aa, synthetic construct; identical to SEQ ID NO: 2819

SEQ ID NO: 3093 - protein, 2094 aa, synthetic construct; identical to SEQ ID NO: 2835

SEQ ID NO: 3094 - protein, 2089 aa, synthetic construct
MPAAKRVKLDGGDKKYSIGLDIGTNSVGWAVITDEYKVPSKKFKVLGNTDRHSIKKNLIGALLFDSGETAEATRLKRTARRRYTRRKNRICYLQEIFSNEMAKVDDSFFHRLEESFLVEEDKKHERHPIFGNIVDEVAYHEKYPTIYHLRKKLVDSTDKADLRLIYLALAHMIKFRGHFLIEGDLNPDNSDVDKLFIQLVQTYNQLFEENPINASGVDAKAILSARLSKSRRLENLIAQLPGEKKNGLFGNLIALSLGLTPNFKSNFDLAEDAKLQLSKDTYDDDLDNLLAQIGDQYADLFLAAKNLSDAILLSDILRVNTEITKAPLSASMIKRYDEHHQDLTLLKALVRQQLPEKYKEIFFDQSKNGYAGYIDGGASQEEFYKFIKPILEKMDGTEELLVKLNREDLLRKQRTFDNGSIPHQIHLGELHAILRRQEDFYPFLKDNREKIEKILTFRIPYYVGPLARGNSRFAWMTRKSEETITPWNFEEVVDKGASAQSFIERMTNFDKNLPNEKVLPKHSLLYEYFTVYNELTKVKYVTEGMRKPAFLSGEQKKAIVDLLFKTNRKVTVKQLKEDYFKKIECFDSVEISGVEDRFNASLGTYHDLLKIIKDKDFLDNEENEDILEDIVLTLTLFEDREMIEERLKTYAHLFDDKVMKQLKRRRYTGWGRLSRKLINGIRDKQSGKTILDFLKSDGFANRNFMQLIHDDSLTFKEDIQKAQVSGQGDSLHEHIANLAGSPAIKKGILQTVKVVDELVKVMGRHKPENIVIEMARENQTTQKGQKNSRERMKRIEEGIKELGSQILKEHPVENTQLQNEKLYLYYLQNGRDMYVDQELDINRLSDYDVDHIVPQSFLKDDSIDNKVLTRSDKARGKSDNVPSEEVVKKMKNYWRQLLNAKLITQRKFDNLTKAERGGLSELDKAGFIKRQLVETRQITKHVAQILDSRMNTKYDENDKLIREVKVITLKSKLVSDFRKDFQFYKVREINNYHHAHDAYLNAVVGTALIKKYPKLESEFVYGDYKVYDVRKMIAKSEQEIGKATAKYFFYSNIMNFFKTEITLANGEIRKRPLIETNGETGEIVWDKGRDFATVRKVLSMPQVNIVKKTEVQTGGFSKESILPKRNSDKLIARKKDWDPKKYGGFDSPTVAYSVLVVAKVEKGKSKKLKSVKELLGITIMERSSFEKNPIDFLEAKGYKEVKKDLIIKLPKYSLFELENGRKRMLASAGELQKGNELALPSKYVNFLYLASHYEKLKGSPEDNEQKQLFVEQHKHYLDEIIEQISEFSKRVILADANLDKVLSAYNKHRDKPIREQAENIIHLFTLTNLGAPAAFKYFDTTIDRKRYTSTKEVLDATLIHQSITGLYETRIDLSQLGGDGGGGGGGGTLNIEDEHRLHETSKEPDVSLGSTWLSDFPQAWAETGGMGLAVRQAPLIIPLKATSTPVSIKQYPMSQEARLGIKPHIQRLLDQGILVPCQSPWNTPLLPVKKPGTNDYRPVQDLREVNKRVEDIHPTVPNPYNLLSGLPPSHQWYTVLDLKDAFFCLRLHPTSQPLFAFEWRDPEMGISGQLTWTRLPQGFKNSPTLFNEALHRDLADFRIQHPDLILLQYVDDLLLAATSELDCQQGTRALLQTLGNLGYRASAKKAQICQKQVKYLGYLLKEGQRWLTEARKETVMGQPTPKTPRQLREFLGKAGFCRLFIPGFAEMAAPLYPLTKPGTLFNWGPDQQKAYQEIKQALLTAPALGLPDLTKPFELFVDEKQGYAKGVLTQKLGPWRRPVAYLSKKLDPVAAGWPPCLRMVAAIAVLTKDAGKLTMGQPLVILAPHAVEALVKQPPDRWLSNARMTHYQALLLDTDRVQFGPVVALNPATLLPLPEEGLQHNCLDILAEAHGTRPDLTDQPLPDADHTWYTDGSSLLQEGQRKAGAAVTTETEVIWAKALPAGTSAQRAELIALTQALKMAEGKKLNVYTDSRYAFATAHIHGEIYRRRGWLTSEGKEIKNKDEILALLKALFLPKRLSIIHCPGHQKGHSAEARGNRMADQAARKAAITETPDTSTLLAGKRTADGSEFEKRTADGSEFESPKKKAKVE

SEQ ID NO: 3095 - protein, 2088 aa, synthetic construct
MPAAKRVKLDGGDKKYSIGLDIGTNSVGWAVITDEYKVPSKKFKVLGNTDRHSIKKNLIGALLFDSGETAEATRLKRTARRRYTRRKNRICYLQEIFSNEMAKVDDSFFHRLEESFLVEEDKKHERHPIFGNIVDEVAYHEKYPTIYHLRKKLVDSTDKADLRLIYLALAHMIKFRGHFLIEGDLNPDNSDVDKLFIQLVQTYNQLFEENPINASGVDAKAILSARLSKSRRLENLIAQLPGEKKNGLFGNLIALSLGLTPNFKSNFDLAEDAKLQLSKDTYDDDLDNLLAQIGDQYADLFLAAKNLSDAILLSDILRVNTEITKAPLSASMIKRYDEHHQDLTLLKALVRQQLPEKYKEIFFDQSKNGYAGYIDGGASQEEFYKFIKPILEKMDGTEELLVKLNREDLLRKQRTFDNGSIPHQIHLGELHAILRRQEDFYPFLKDNREKIEKILTFRIPYYVGPLARGNSRFAWMTRKSEETITPWNFEEVVDKGASAQSFIERMTNFDKNLPNEKVLPKHSLLYEYFTVYNELTKVKYVTEGMRKPAFLSGEQKKAIVDLLFKTNRKVTVKQLKEDYFKKIECFDSVEISGVEDRFNASLGTYHDLLKIIKDKDFLDNEENEDILEDIVLTLTLFEDREMIEERLKTYAHLFDDKVMKQLKRRRYTGWGRLSRKLINGIRDKQSGKTILDFLKSDGFANRNFMQLIHDDSLTFKEDIQKAQVSGQGDSLHEHIANLAGSPAIKKGILQTVKVVDELVKVMGRHKPENIVIEMARENQTTQKGQKNSRERMKRIEEGIKELGSQILKEHPVENTQLQNEKLYLYYLQNGRDMYVDQELDINRLSDYDVDHIVPQSFLKDDSIDNKVLTRSDKARGKSDNVPSEEVVKKMKNYWRQLLNAKLITQRKFDNLTKAERGGLSELDKAGFIKRQLVETRQITKHVAQILDSRMNTKYDENDKLIREVKVITLKSKLVSDFRKDFQFYKVREINNYHHAHDAYLNAVVGTALIKKYPKLESEFVYGDYKVYDVRKMIAKSEQEIGKATAKYFFYSNIMNFFKTEITLANGEIRKRPLIETNGETGEIVWDKGRDFATVRKVLSMPQVNIVKKTEVQTGGFSKESILPKRNSDKLIARKKDWDPKKYGGFDSPTVAYSVLVVAKVEKGKSKKLKSVKELLGITIMERSSFEKNPIDFLEAKGYKEVKKDLIIKLPKYSLFELENGRKRMLASAGELQKGNELALPSKYVNFLYLASHYEKLKGSPEDNEQKQLFVEQHKHYLDEIIEQISEFSKRVILADANLDKVLSAYNKHRDKPIREQAENIIHLFTLTNLGAPAAFKYFDTTIDRKRYTSTKEVLDATLIHQSITGLYETRIDLSQLGGDGGGGSGGTLNIEDEHRLHETSKEPDVSLGSTWLSDFPQAWAETGGMGLAVRQAPLIIPLKATSTPVSIKQYPMSQEARLGIKPHIQRLLDQGILVPCQSPWNTPLLPVKKPGTNDYRPVQDLREVNKRVEDIHPTVPNPYNLLSGLPPSHQWYTVLDLKDAFFCLRLHPTSQPLFAFEWRDPEMGISGQLTWTRLPQGFKNSPTLFNEALHRDLADFRIQHPDLILLQYVDDLLLAATSELDCQQGTRALLQTLGNLGYRASAKKAQICQKQVKYLGYLLKEGQRWLTEARKETVMGQPTPKTPRQLREFLGKAGFCRLFIPGFAEMAAPLYPLTKPGTLFNWGPDQQKAYQEIKQALLTAPALGLPDLTKPFELFVDEKQGYAKGVLTQKLGPWRRPVAYLSKKLDPVAAGWPPCLRMVAAIAVLTKDAGKLTMGQPLVILAPHAVEALVKQPPDRWLSNARMTHYQALLLDTDRVQFGPVVALNPATLLPLPEEGLQHNCLDILAEAHGTRPDLTDQPLPDADHTWYTDGSSLLQEGQRKAGAAVTTETEVIWAKALPAGTSAQRAELIALTQALKMAEGKKLNVYTDSRYAFATAHIHGEIYRRRGWLTSEGKEIKNKDEILALLKALFLPKRLSIIHCPGHQKGHSAEARGNRMADQAARKAAITETPDTSTLLAGKRTADGSEFEKRTADGSEFESPKKKAKVE

SEQ ID NO: 3096 - protein, 2092 aa, synthetic construct; identical to SEQ ID NO: 2790

SEQ ID NO: 3097 - protein, 2093 aa, synthetic construct; identical to SEQ ID NO: 2849

SEQ ID NO: 3098 - protein, 2094 aa, synthetic construct; identical to SEQ ID NO: 2793

SEQ ID NO: 3099 - protein, 2100 aa, synthetic construct; identical to SEQ ID NO: 2836

SEQ ID NO: 3100 - protein, 2092 aa, synthetic construct
MPAAKRVKLDGGDKKYSIGLDIGTNSVGWAVITDEYKVPSKKFKVLGNTDRHSIKKNLIGALLFDSGETAEATRLKRTARRRYTRRKNRICYLQEIFSNEMAKVDDSFFHRLEESFLVEEDKKHERHPIFGNIVDEVAYHEKYPTIYHLRKKLVDSTDKADLRLIYLALAHMIKFRGHFLIEGDLNPDNSDVDKLFIQLVQTYNQLFEENPINASGVDAKAILSARLSKSRRLENLIAQLPGEKKNGLFGNLIALSLGLTPNFKSNFDLAEDAKLQLSKDTYDDDLDNLLAQIGDQYADLFLAAKNLSDAILLSDILRVNTEITKAPLSASMIKRYDEHHQDLTLLKALVRQQLPEKYKEIFFDQSKNGYAGYIDGGASQEEFYKFIKPILEKMDGTEELLVKLNREDLLRKQRTFDNGSIPHQIHLGELHAILRRQEDFYPFLKDNREKIEKILTFRIPYYVGPLARGNSRFAWMTRKSEETITPWNFEEVVDKGASAQSFIERMTNFDKNLPNEKVLPKHSLLYEYFTVYNELTKVKYVTEGMRKPAFLSGEQKKAIVDLLFKTNRKVTVKQLKEDYFKKIECFDSVEISGVEDRFNASLGTYHDLLKIIKDKDFLDNEENEDILEDIVLTLTLFEDREMIEERLKTYAHLFDDKVMKQLKRRRYTGWGRLSRKLINGIRDKQSGKTILDFLKSDGFANRNFMQLIHDDSLTFKEDIQKAQVSGQGDSLHEHIANLAGSPAIKKGILQTVKVVDELVKVMGRHKPENIVIEMARENQTTQKGQKNSRERMKRIEEGIKELGSQILKEHPVENTQLQNEKLYLYYLQNGRDMYVDQELDINRLSDYDVDHIVPQSFLKDDSIDNKVLTRSDKARGKSDNVPSEEVVKKMKNYWRQLLNAKLITQRKFDNLTKAERGGLSELDKAGFIKRQLVETRQITKHVAQILDSRMNTKYDENDKLIREVKVITLKSKLVSDFRKDFQFYKVREINNYHHAHDAYLNAVVGTALIKKYPKLESEFVYGDYKVYDVRKMIAKSEQEIGKATAKYFFYSNIMNFFKTEITLANGEIRKRPLIETNGETGEIVWDKGRDFATVRKVLSMPQVNIVKKTEVQTGGFSKESILPKRNSDKLIARKKDWDPKKYGGFDSPTVAYSVLVVAKVEKGKSKKLKSVKELLGITIMERSSFEKNPIDFLEAKGYKEVKKDLIIKLPKYSLFELENGRKRMLASAGELQKGNELALPSKYVNFLYLASHYEKLKGSPEDNEQKQLFVEQHKHYLDEIIEQISEFSKRVILADANLDKVLSAYNKHRDKPIREQAENIIHLFTLTNLGAPAAFKYFDTTIDRKRYTSTKEVLDATLIHQSITGLYETRIDLSQLGGDGGPAPAPAPGGTLNIEDEHRLHETSKEPDVSLGSTWLSDFPQAWAETGGMGLAVRQAPLIIPLKATSTPVSIKQYPMSQEARLGIKPHIQRLLDQGILVPCQSPWNTPLLPVKKPGTNDYRPVQDLREVNKRVEDIHPTVPNPYNLLSGLPPSHQWYTVLDLKDAFFCLRLHPTSQPLFAFEWRDPEMGISGQLTWTRLPQGFKNSPTLFNEALHRDLADFRIQHPDLILLQYVDDLLLAATSELDCQQGTRALLQTLGNLGYRASAKKAQICQKQVKYLGYLLKEGQRWLTEARKETVMGQPTPKTPRQLREFLGKAGFCRLFIPGFAEMAAPLYPLTKPGTLFNWGPDQQKAYQEIKQALLTAPALGLPDLTKPFELFVDEKQGYAKGVLTQKLGPWRRPVAYLSKKLDPVAAGWPPCLRMVAAIAVLTKDAGKLTMGQPLVILAPHAVEALVKQPPDRWLSNARMTHYQALLLDTDRVQFGPVVALNPATLLPLPEEGLQHNCLDILAEAHGTRPDLTDQPLPDADHTWYTDGSSLLQEGQRKAGAAVTTETEVIWAKALPAGTSAQRAELIALTQALKMAEGKKLNVYTDSRYAFATAHIHGEIYRRRGWLTSEGKEIKNKDEILALLKALFLPKRLSIIHCPGHQKGHSAEARGNRMADQAARKAAITETPDTSTLLAGKRTADGSEFEKRTADGSEFESPKKKAKVE

SEQ ID NO: 3101 - protein, 2094 aa, synthetic construct; identical to SEQ ID NO: 2846

SEQ ID NO: 3102 - protein, 2096 aa, synthetic construct; identical to SEQ ID NO: 2842

SEQ ID NO: 3103 - protein, 2096 aa, synthetic construct; identical to SEQ ID NO: 2815

SEQ ID NO: 3104 - protein, 2096 aa, synthetic construct
MPAAKRVKLDGGDKKYSIGLDIGTNSVGWAVITDEYKVPSKKFKVLGNTDRHSIKKNLIGALLFDSGETAEATRLKRTARRRYTRRKNRICYLQEIFSNEMAKVDDSFFHRLEESFLVEEDKKHERHPIFGNIVDEVAYHEKYPTIYHLRKKLVDSTDKADLRLIYLALAHMIKFRGHFLIEGDLNPDNSDVDKLFIQLVQTYNQLFEENPINASGVDAKAILSARLSKSRRLENLIAQLPGEKKNGLFGNLIALSLGLTPNFKSNFDLAEDAKLQLSKDTYDDDLDNLLAQIGDQYADLFLAAKNLSDAILLSDILRVNTEITKAPLSASMIKRYDEHHQDLTLLKALVRQQLPEKYKEIFFDQSKNGYAGYIDGGASQEEFYKFIKPILEKMDGTEELLVKLNREDLLRKQRTFDNGSIPHQIHLGELHAILRRQEDFYPFLKDNREKIEKILTFRIPYYVGPLARGNSRFAWMTRKSEETITPWNFEEVVDKGASAQSFIERMTNFDKNLPNEKVLPKHSLLYEYFTVYNELTKVKYVTEGMRKPAFLSGEQKKAIVDLLFKTNRKVTVKQLKEDYFKKIECFDSVEISGVEDRFNASLGTYHDLLKIIKDKDFLDNEENEDILEDIVLTLTLFEDREMIEERLKTYAHLFDDKVMKQLKRRRYTGWGRLSRKLINGIRDKQSGKTILDFLKSDGFANRNFMQLIHDDSLTFKEDIQKAQVSGQGDSLHEHIANLAGSPAIKKGILQTVKVVDELVKVMGRHKPENIVIEMARENQTTQKGQKNSRERMKRIEEGIKELGSQILKEHPVENTQLQNEKLYLYYLQNGRDMYVDQELDINRLSDYDVDHIVPQSFLKDDSIDNKVLTRSDKARGKSDNVPSEEVVKKMKNYWRQLLNAKLITQRKFDNLTKAERGGLSELDKAGFIKRQLVETRQITKHVAQILDSRMNTKYDENDKLIREVKVITLKSKLVSDFRKDFQFYKVREINNYHHAHDAYLNAVVGTALIKKYPKLESEFVYGDYKVYDVRKMIAKSEQEIGKATAKYFFYSNIMNFFKTEITLANGEIRKRPLIETNGETGEIVWDKGRDFATVRKVLSMPQVNIVKKTEVQTGGFSKESILPKRNSDKLIARKKDWDPKKYGGFDSPTVAYSVLVVAKVEKGKSKKLKSVKELLGITIMERSSFEKNPIDFLEAKGYKEVKKDLIIKLPKYSLFELENGRKRMLASAGELQKGNELALPSKYVNFLYLASHYEKLKGSPEDNEQKQLFVEQHKHYLDEIIEQISEFSKRVILADANLDKVLSAYNKHRDKPIREQAENIIHLFTLTNLGAPAAFKYFDTTIDRKRYTSTKEVLDATLIHQSITGLYETRIDLSQLGGDGGPAPEAAAKGSSGGTLNIEDEHRLHETSKEPDVSLGSTWLSDFPQAWAETGGMGLAVRQAPLIIPLKATSTPVSIKQYPMSQEARLGIKPHIQRLLDQGILVPCQSPWNTPLLPVKKPGTNDYRPVQDLREVNKRVEDIHPTVPNPYNLLSGLPPSHQWYTVLDLKDAFFCLRLHPTSQPLFAFEWRDPEMGISGQLTWTRLPQGFKNSPTLFNEALHRDLADFRIQHPDLILLQYVDDLLLAATSELDCQQGTRALLQTLGNLGYRASAKKAQICQKQVKYLGYLLKEGQRWLTEARKETVMGQPTPKTPRQLREFLGKAGFCRLFIPGFAEMAAPLYPLTKPGTLFNWGPDQQKAYQEIKQALLTAPALGLPDLTKPFELFVDEKQGYAKGVLTQKLGPWRRPVAYLSKKLDPVAAGWPPCLRMVAAIAVLTKDAGKLTMGQPLVILAPHAVEALVKQPPDRWLSNARMTHYQALLLDTDRVQFGPVVALNPATLLPLPEEGLQHNCLDILAEAHGTRPDLTDQPLPDADHTWYTDGSSLLQEGQRKAGAAVTTETEVIWAKALPAGTSAQRAELIALTQALKMAEGKKLNVYTDSRYAFATAHIHGEIYRRRGWLTSEGKEIKNKDEILALLKALFLPKRLSIIHCPGHQKGHSAEARGNRMADQAARKAAITETPDTSTLLAGKRTADGSEFEKRTADGSEFESPKKKAKVE

SEQ ID NO: 3105 - protein, 2096 aa, synthetic construct
MPAAKRVKLDGGDKKYSIGLDIGTNSVGWAVITDEYKVPSKKFKVLGNTDRHSIKKNLIGALLFDSGETAEATRLKRTARRRYTRRKNRICYLQEIFSNEMAKVDDSFFHRLEESFLVEEDKKHERHPIFGNIVDEVAYHEKYPTIYHLRKKLVDSTDKADLRLIYLALAHMIKFRGHFLIEGDLNPDNSDVDKLFIQLVQTYNQLFEENPINASGVDAKAILSARLSKSRRLENLIAQLPGEKKNGLFGNLIALSLGLTPNFKSNFDLAEDAKLQLSKDTYDDDLDNLLAQIGDQYADLFLAAKNLSDAILLSDILRVNTEITKAPLSASMIKRYDEHHQDLTLLKALVRQQLPEKYKEIFFDQSKNGYAGYIDGGASQEEFYKFIKPILEKMDGTEELLVKLNREDLLRKQRTFDNGSIPHQIHLGELHAILRRQEDFYPFLKDNREKIEKILTFRIPYYVGPLARGNSRFAWMTRKSEETITPWNFEEVVDKGASAQSFIERMTNFDKNLPNEKVLPKHSLLYEYFTVYNELTKVKYVTEGMRKPAFLSGEQKKAIVDLLFKTNRKVTVKQLKEDYFKKIECFDSVEISGVEDRFNASLGTYHDLLKIIKDKDFLDNEENEDILEDIVLTLTLFEDREMIEERLKTYAHLFDDKVMKQLKRRRYTGWGRLSRKLINGIRDKQSGKTILDFLKSDGFANRNFMQLIHDDSLTFKEDIQKAQVSGQGDSLHEHIANLAGSPAIKKGILQTVKVVDELVKVMGRHKPENIVIEMARENQTTQKGQKNSRERMKRIEEGIKELGSQILKEHPVENTQLQNEKLYLYYLQNGRDMYVDQELDINRLSDYDVDHIVPQSFLKDDSIDNKVLTRSDKARGKSDNVPSEEVVKKMKNYWRQLLNAKLITQRKFDNLTKAERGGLSELDKAGFIKRQLVETRQITKHVAQILDSRMNTKYDENDKLIREVKVITLKSKLVSDFRKDFQFYKVREINNYHHAHDAYLNAVVGTALIKKYPKLESEFVYGDYKVYDVRKMIAKSEQEIGKATAKYFFYSNIMNFFKTEITLANGEIRKRPLIETNGETGEIVWDKGRDFATVRKVLSMPQVNIVKKTEVQTGGFSKESILPKRNSDKLIARKKDWDPKKYGGFDSPTVAYSVLVVAKVEKGKSKKLKSVKELLGITIMERSSFEKNPIDFLEAKGYKEVKKDLIIKLPKYSLFELENGRKRMLASAGELQKGNELALPSKYVNFLYLASHYEKLKGSPEDNEQKQLFVEQHKHYLDEIIEQISEFSKRVILADANLDKVLSAYNKHRDKPIREQAENIIHLFTLTNLGAPAAFKYFDTTIDRKRYTSTKEVLDATLIHQSITGLYETRIDLSQLGGDGGGSSEAAAKPAPGGTLNIEDEHRLHETSKEPDVSLGSTWLSDFPQAWAETGGMGLAVRQAPLIIPLKATSTPVSIKQYPMSQEARLGIKPHIQRLLDQGILVPCQSPWNTPLLPVKKPGTNDYRPVQDLREVNKRVEDIHPTVPNPYNLLSGLPPSHQWYTVLDLKDAFFCLRLHPTSQPLFAFEWRDPEMGISGQLTWTRLPQGFKNSPTLFNEALHRDLADFRIQHPDLILLQYVDDLLLAATSELDCQQGTRALLQTLGNLGYRASAKKAQICQKQVKYLGYLLKEGQRWLTEARKETVMGQPTPKTPRQLREFLGKAGFCRLFIPGFAEMAAPLYPLTKPGTLFNWGPDQQKAYQEIKQALLTAPALGLPDLTKPFELFVDEKQGYAKGVLTQKLGPWRRPVAYLSKKLDPVAAGWPPCLRMVAAIAVLTKDAGKLTMGQPLVILAPHAVEALVKQPPDRWLSNARMTHYQALLLDTDRVQFGPVVALNPATLLPLPEEGLQHNCLDILAEAHGTRPDLTDQPLPDADHTWYTDGSSLLQEGQRKAGAAVTTETEVIWAKALPAGTSAQRAELIALTQALKMAEGKKLNVYTDSRYAFATAHIHGEIYRRRGWLTSEGKEIKNKDEILALLKALFLPKRLSIIHCPGHQKGHSAEARGNRMADQAARKAAITETPDTSTLLAGKRTADGSEFEKRTADGSEFESPKKKAKVE

SEQ ID NO: 3106 - protein, 2094 aa, synthetic construct
MPAAKRVKLDGGDKKYSIGLDIGTNSVGWAVITDEYKVPSKKFKVLGNTDRHSIKKNLIGALLFDSGETAEATRLKRTARRRYTRRKNRICYLQEIFSNEMAKVDDSFFHRLEESFLVEEDKKHERHPIFGNIVDEVAYHEKYPTIYHLRKKLVDSTDKADLRLIYLALAHMIKFRGHFLIEGDLNPDNSDVDKLFIQLVQTYNQLFEENPINASGVDAKAILSARLSKSRRLENLIAQLPGEKKNGLFGNLIALSLGLTPNFKSNFDLAEDAKLQLSKDTYDDDLDNLLAQIGDQYADLFLAAKNLSDAILLSDILRVNTEITKAPLSASMIKRYDEHHQDLTLLKALVRQQLPEKYKEIFFDQSKNGYAGYIDGGASQEEFYKFIKPILEKMDGTEELLVKLNREDLLRKQRTFDNGSIPHQIHLGELHAILRRQEDFYPFLKDNREKIEKILTFRIPYYVGPLARGNSRFAWMTRKSEETITPWNFEEVVDKGASAQSFIERMTNFDKNLPNEKVLPKHSLLYEYFTVYNELTKVKYVTEGMRKPAFLSGEQKKAIVDLLFKTNRKVTVKQLKEDYFKKIECFDSVEISGVEDRFNASLGTYHDLLKIIKDKDFLDNEENEDILEDIVLTLTLFEDREMIEERLKTYAHLFDDKVMKQLKRRRYTGWGRLSRKLINGIRDKQSGKTILDFLKSDGFANRNFMQLIHDDSLTFKEDIQKAQVSGQGDSLHEHIANLAGSPAIKKGILQTVKVVDELVKVMGRHKPENIVIEMARENQTTQKGQKNSRERMKRIEEGIKELGSQILKEHPVENTQLQNEKLYLYYLQNGRDMYVDQELDINRLSDYDVDHIVPQSFLKDDSIDNKVLTRSDKARGKSDNVPSEEVVKKMKNYWRQLLNAKLITQRKFDNLTKAERGGLSELDKAGFIKRQLVETRQITKHVAQILDSRMNTKYDENDKLIREVKVITLKSKLVSDFRKDFQFYKVREINNYHHAHDAYLNAVVGTALIKKYPKLESEFVYGDYKVYDVRKMIAKSEQEIGKATAKYFFYSNIMNFFKTEITLANGEIRKRPLIETNGETGEIVWDKGRDFATVRKVLSMPQVNIVKKTEVQTGGFSKESILPKRNSDKLIARKKDWDPKKYGGFDSPTVAYSVLVVAKVEKGKSKKLKSVKELLGITIMERSSFEKNPIDFLEAKGYKEVKKDLIIKLPKYSLFELENGRKRMLASAGELQKGNELALPSKYVNFLYLASHYEKLKGSPEDNEQKQLFVEQHKHYLDEIIEQISEFSKRVILADANLDKVLSAYNKHRDKPIREQAENIIHLFTLTNLGAPAAFKYFDTTIDRKRYTSTKEVLDATLIHQSITGLYETRIDLSQLGGDGGPAPGSSGGSGGTLNIEDEHRLHETSKEPDVSLGSTWLSDFPQAWAETGGMGLAVRQAPLIIPLKATSTPVSIKQYPMSQEARLGIKPHIQRLLDQGILVPCQSPWNTPLLPVKKPGTNDYRPVQDLREVNKRVEDIHPTVPNPYNLLSGLPPSHQWYTVLDLKDAFFCLRLHPTSQPLFAFEWRDPEMGISGQLTWTRLPQGFKNSPTLFNEALHRDLADFRIQHPDLILLQYVDDLLLAATSELDCQQGTRALLQTLGNLGYRASAKKAQICQKQVKYLGYLLKEGQRWLTEARKETVMGQPTPKTPRQLREFLGKAGFCRLFIPGFAEMAAPLYPLTKPGTLFNWGPDQQKAYQEIKQALLTAPALGLPDLTKPFELFVDEKQGYAKGVLTQKLGPWRRPVAYLSKKLDPVAAGWPPCLRMVAAIAVLTKDAGKLTMGQPLVILAPHAVEALVKQPPDRWLSNARMTHYQALLLDTDRVQFGPVVALNPATLLPLPEEGLQHNCLDILAEAHGTRPDLTDQPLPDADHTWYTDGSSLLQEGQRKAGAAVTTETEVIWAKALPAGTSAQRAELIALTQALKMAEGKKLNVYTDSRYAFATAHIHGEIYRRRGWLTSEGKEIKNKDEILALLKALFLPKRLSIIHCPGHQKGHSAEARGNRMADQAARKAAITETPDTSTLLAGKRTADGSEFEKRTADGSEFESPKKKAKVE

SEQ ID NO: 3107 - protein, 2091 aa, synthetic construct; identical to SEQ ID NO: 2820

SEQ ID NO: 3108 - protein, 2096 aa, synthetic construct; identical to SEQ ID NO: 2782

SEQ ID NO: 3109 - protein, 2096 aa, synthetic construct; identical to SEQ ID NO: 2860

SEQ ID NO: 3110 - protein, 2095 aa, synthetic construct
MPAAKRVKLDGGDKKYSIGLDIGTNSVGWAVITDEYKVPSKKFKVLGNTDRHSIKKNLIGALLFDSGETAEATRLKRTARRRYTRRKNRICYLQEIFSNEMAKVDDSFFHRLEESFLVEEDKKHERHPIFGNIVDEVAYHEKYPTIYHLRKKLVDSTDKADLRLIYLALAHMIKFRGHFLIEGDLNPDNSDVDKLFIQLVQTYNQLFEENPINASGVDAKAILSARLSKSRRLENLIAQLPGEKKNGLFGNLIALSLGLTPNFKSNFDLAEDAKLQLSKDTYDDDLDNLLAQIGDQYADLFLAAKNLSDAILLSDILRVNTEITKAPLSASMIKRYDEHHQDLTLLKALVRQQLPEKYKEIFFDQSKNGYAGYIDGGASQEEFYKFIKPILEKMDGTEELLVKLNREDLLRKQRTFDNGSIPHQIHLGELHAILRRQEDFYPFLKDNREKIEKILTFRIPYYVGPLARGNSRFAWMTRKSEETITPWNFEEVVDKGASAQSFIERMTNFDKNLPNEKVLPKHSLLYEYFTVYNELTKVKYVTEGMRKPAFLSGEQKKAIVDLLFKTNRKVTVKQLKEDYFKKIECFDSVEISGVEDRFNASLGTYHDLLKIIKDKDFLDNEENEDILEDIVLTLTLFEDREMIEERLKTYAHLFDDKVMKQLKRRRYTGWGRLSRKLINGIRDKQSGKTILDFLKSDGFANRNFMQLIHDDSLTFKEDIQKAQVSGQGDSLHEHIANLAGSPAIKKGILQTVKVVDELVKVMGRHKPENIVIEMARENQTTQKGQKNSRERMKRIEEGIKELGSQILKEHPVENTQLQNEKLYLYYLQNGRDMYVDQELDINRLSDYDVDHIVPQSFLKDDSIDNKVLTRSDKARGKSDNVPSEEVVKKMKNYWRQLLNAKLITQRKFDNLTKAERGGLSELDKAGFIKRQLVETRQITKHVAQILDSRMNTKYDENDKLIREVKVITLKSKLVSDFRKDFQFYKVREINNYHHAHDAYLNAVVGTALIKKYPKLESEFVYGDYKVYDVRKMIAKSEQEIGKATAKYFFYSNIMNFFKTEITLANGEIRKRPLIETNGETGEIVWDKGRDFATVRKVLSMPQVNIVKKTEVQTGGFSKESILPKRNSDKLIARKKDWDPKKYGGFDSPTVAYSVLVVAKVEKGKSKKLKSVKELLGITIMERSSFEKNPIDFLEAKGYKEVKKDLIIKLPKYSLFELENGRKRMLASAGELQKGNELALPSKYVNFLYLASHYEKLKGSPEDNEQKQLFVEQHKHYLDEIIEQISEFSKRVILADANLDKVLSAYNKHRDKPIREQAENIIHLFTLTNLGAPAAFKYFDTTIDRKRYTSTKEVLDATLIHQSITGLYETRIDLSQLGGDGGGGGGSGGGGSGGTLNIEDEHRLHETSKEPDVSLGSTWLSDFPQAWAETGGMGLAVRQAPLIIPLKATSTPVSIKQYPMSQEARLGIKPHIQRLLDQGILVPCQSPWNTPLLPVKKPGTNDYRPVQDLREVNKRVEDIHPTVPNPYNLLSGLPPSHQWYTVLDLKDAFFCLRLHPTSQPLFAFEWRDPEMGISGQLTWTRLPQGFKNSPTLFNEALHRDLADFRIQHPDLILLQYVDDLLLAATSELDCQQGTRALLQTLGNLGYRASAKKAQICQKQVKYLGYLLKEGQRWLTEARKETVMGQPTPKTPRQLREFLGKAGFCRLFIPGFAEMAAPLYPLTKPGTLFNWGPDQQKAYQEIKQALLTAPALGLPDLTKPFELFVDEKQGYAKGVLTQKLGPWRRPVAYLSKKLDPVAAGWPPCLRMVAAIAVLTKDAGKLTMGQPLVILAPHAVEALVKQPPDRWLSNARMTHYQALLLDTDRVQFGPVVALNPATLLPLPEEGLQHNCLDILAEAHGTRPDLTDQPLPDADHTWYTDGSSLLQEGQRKAGAAVTTETEVIWAKALPAGTSAQRAELIALTQALKMAEGKKLNVYTDSRYAFATAHIHGEIYRRRGWLTSEGKEIKNKDEILALLKALFLPKRLSIIHCPGHQKGHSAEARGNRMADQAARKAAITETPDTSTLLAGKRTADGSEFEKRTADGSEFESPKKKAKVE

SEQ ID NO: 3111 - protein, 2094 aa, synthetic construct; identical to SEQ ID NO: 2800

SEQ ID NO: 3112 - protein, 2096 aa, synthetic construct; identical to SEQ ID NO: 2792

SEQ ID NO: 3113 - protein, 2091 aa, synthetic construct
MPAAKRVKLDGGDKKYSIGLDIGTNSVGWAVITDEYKVPSKKFKVLGNTDRHSIKKNLIGALLFDSGETAEATRLKRTARRRYTRRKNRICYLQEIFSNEMAKVDDSFFHRLEESFLVEEDKKHERHPIFGNIVDEVAYHEKYPTIYHLRKKLVDSTDKADLRLIYLALAHMIKFRGHFLIEGDLNPDNSDVDKLFIQLVQTYNQLFEENPINASGVDAKAILSARLSKSRRLENLIAQLPGEKKNGLFGNLIALSLGLTPNFKSNFDLAEDAKLQLSKDTYDDDLDNLLAQIGDQYADLFLAAKNLSDAILLSDILRVNTEITKAPLSASMIKRYDEHHQDLTLLKALVRQQLPEKYKEIFFDQSKNGYAGYIDGGASQEEFYKFIKPILEKMDGTEELLVKLNREDLLRKQRTFDNGSIPHQIHLGELHAILRRQEDFYPFLKDNREKIEKILTFRIPYYVGPLARGNSRFAWMTRKSEETITPWNFEEVVDKGASAQSFIERMTNFDKNLPNEKVLPKHSLLYEYFTVYNELTKVKYVTEGMRKPAFLSGEQKKAIVDLLFKTNRKVTVKQLKEDYFKKIECFDSVEISGVEDRFNASLGTYHDLLKIIKDKDFLDNEENEDILEDIVLTLTLFEDREMIEERLKTYAHLFDDKVMKQLKRRRYTGWGRLSRKLINGIRDKQSGKTILDFLKSDGFANRNFMQLIHDDSLTFKEDIQKAQVSGQGDSLHEHIANLAGSPAIKKGILQTVKVVDELVKVMGRHKPENIVIEMARENQTTQKGQKNSRERMKRIEEGIKELGSQILKEHPVENTQLQNEKLYLYYLQNGRDMYVDQELDINRLSDYDVDHIVPQSFLKDDSIDNKVLTRSDKARGKSDNVPSEEVVKKMKNYWRQLLNAKLITQRKFDNLTKAERGGLSELDKAGFIKRQLVETRQITKHVAQILDSRMNTKYDENDKLIREVKVITLKSKLVSDFRKDFQFYKVREINNYHHAHDAYLNAVVGTALIKKYPKLESEFVYGDYKVYDVRKMIAKSEQEIGKATAKYFFYSNIMNFFKTEITLANGEIRKRPLIETNGETGEIVWDKGRDFATVRKVLSMPQVNIVKKTEVQTGGFSKESILPKRNSDKLIARKKDWDPKKYGGFDSPTVAYSVLVVAKVEKGKSKKLKSVKELLGITIMERSSFEKNPIDFLEAKGYKEVKKDLIIKLPKYSLFELENGRKRMLASAGELQKGNELALPSKYVNFLYLASHYEKLKGSPEDNEQKQLFVEQHKHYLDEIIEQISEFSKRVILADANLDKVLSAYNKHRDKPIREQAENIIHLFTLTNLGAPAAFKYFDTTIDRKRYTSTKEVLDATLIHQSITGLYETRIDLSQLGGDGGGGSGSSGGTLNIEDEHRLHETSKEPDVSLGSTWLSDFPQAWAETGGMGLAVRQAPLIIPLKATSTPVSIKQYPMSQEARLGIKPHIQRLLDQGILVPCQSPWNTPLLPVKKPGTNDYRPVQDLREVNKRVEDIHPTVPNPYNLLSGLPPSHQWYTVLDLKDAFFCLRLHPTSQPLFAFEWRDPEMGISGQLTWTRLPQGFKNSPTLFNEALHRDLADFRIQHPDLILLQYVDDLLLAATSELDCQQGTRALLQTLGNLGYRASAKKAQICQKQVKYLGYLLKEGQRWLTEARKETVMGQPTPKTPRQLREFLGKAGFCRLFIPGFAEMAAPLYPLTKPGTLFNWGPDQQKAYQEIKQALLTAPALGLPDLTKPFELFVDEKQGYAKGVLTQKLGPWRRPVAYLSKKLDPVAAGWPPCLRMVAAIAVLTKDAGKLTMGQPLVILAPHAVEALVKQPPDRWLSNARMTHYQALLLDTDRVQFGPVVALNPATLLPLPEEGLQHNCLDILAEAHGTRPDLTDQPLPDADHTWYTDGSSLLQEGQRKAGAAVTTETEVIWAKALPAGTSAQRAELIALTQALKMAEGKKLNVYTDSRYAFATAHIHGEIYRRRGWLTSEGKEIKNKDEILALLKALFLPKRLSIIHCPGHQKGHSAEARGNRMADQAARKAAITETPDTSTLLAGKRTADGSEFEKRTADGSEFESPKKKAKVE

SEQ ID NO: 3114 - protein, 2090 aa, synthetic construct; identical to SEQ ID NO: 2834

SEQ ID NO: 3115 - protein, 2096 aa, synthetic construct
MPAAKRVKLDGGDKKYSIGLDIGTNSVGWAVITDEYKVPSKKFKVLGNTDRHSIKKNLIGALLFDSGETAEATRLKRTARRRYTRRKNRICYLQEIFSNEMAKVDDSFFHRLEESFLVEEDKKHERHPIFGNIVDEVAYHEKYPTIYHLRKKLVDSTDKADLRLIYLALAHMIKFRGHFLIEGDLNPDNSDVDKLFIQLVQTYNQLFEENPINASGVDAKAILSARLSKSRRLENLIAQLPGEKKNGLFGNLIALSLGLTPNFKSNFDLAEDAKLQLSKDTYDDDLDNLLAQIGDQYADLFLAAKNLSDAILLSDILRVNTEITKAPLSASMIKRYDEHHQDLTLLKALVRQQLPEKYKEIFFDQSKNGYAGYIDGGASQEEFYKFIKPILEKMDGTEELLVKLNREDLLRKQRTFDNGSIPHQIHLGELHAILRRQEDFYPFLKDNREKIEKILTFRIPYYVGPLARGNSRFAWMTRKSEETITPWNFEEVVDKGASAQSFIERMTNFDKNLPNEKVLPKHSLLYEYFTVYNELTKVKYVTEGMRKPAFLSGEQKKAIVDLLFKTNRKVTVKQLKEDYFKKIECFDSVEISGVEDRFNASLGTYHDLLKIIKDKDFLDNEENEDILEDIVLTLTLFEDREMIEERLKTYAHLFDDKVMKQLKRRRYTGWGRLSRKLINGIRDKQSGKTILDFLKSDGFANRNFMQLIHDDSLTFKEDIQKAQVSGQGDSLHEHIANLAGSPAIKKGILQTVKVVDELVKVMGRHKPENIVIEMARENQTTQKGQKNSRERMKRIEEGIKELGSQILKEHPVENTQLQNEKLYLYYLQNGRDMYVDQELDINRLSDYDVDHIVPQSFLKDDSIDNKVLTRSDKARGKSDNVPSEEVVKKMKNYWRQLLNAKLITQRKFDNLTKAERGGLSELDKAGFIKRQLVETRQITKHVAQILDSRMNTKYDENDKLIREVKVITLKSKLVSDFRKDFQFYKVREINNYHHAHDAYLNAVVGTALIKKYPKLESEFVYGDYKVYDVRKMIAKSEQEIGKATAKYFFYSNIMNFFKTEITLANGEIRKRPLIETNGETGEIVWDKGRDFATVRKVLSMPQVNIVKKTEVQTGGFSKESILPKRNSDKLIARKKDWDPKKYGGFDSPTVAYSVLVVAKVEKGKSKKLKSVKELLGITIMERSSFEKNPIDFLEAKGYKEVKKDLIIKLPKYSLFELENGRKRMLASAGELQKGNELALPSKYVNFLYLASHYEKLKGSPEDNEQKQLFVEQHKHYLDEIIEQISEFSKRVILADANLDKVLSAYNKHRDKPIREQAENIIHLFTLTNLGAPAAFKYFDTTIDRKRYTSTKEVLDATLIHQSITGLYETRIDLSQLGGDGGGGGGGSEAAAKGGTLNIEDEHRLHETSKEPDVSLGSTWLSDFPQAWAETGGMGLAVRQAPLIIPLKATSTPVSIKQYPMSQEARLGIKPHIQRLLDQGILVPCQSPWNTPLLPVKKPGTNDYRPVQDLREVNKRVEDIHPTVPNPYNLLSGLPPSHQWYTVLDLKDAFFCLRLHPTSQPLFAFEWRDPEMGISGQLTWTRLPQGFKNSPTLFNEALHRDLADFRIQHPDLILLQYVDDLLLAATSELDCQQGTRALLQTLGNLGYRASAKKAQICQKQVKYLGYLLKEGQRWLTEARKETVMGQPTPKTPRQLREFLGKAGFCRLFIPGFAEMAAPLYPLTKPGTLFNWGPDQQKAYQEIKQALLTAPALGLPDLTKPFELFVDEKQGYAKGVLTQKLGPWRRPVAYLSKKLDPVAAGWPPCLRMVAAIAVLTKDAGKLTMGQPLVILAPHAVEALVKQPPDRWLSNARMTHYQALLLDTDRVQFGPVVALNPATLLPLPEEGLQHNCLDILAEAHGTRPDLTDQPLPDADHTWYTDGSSLLQEGQRKAGAAVTTETEVIWAKALPAGTSAQRAELIALTQALKMAEGKKLNVYTDSRYAFATAHIHGEIYRRRGWLTSEGKEIKNKDEILALLKALFLPKRLSIIHCPGHQKGHSAEARGNRMADQAARKAAITETPDTSTLLAGKRTADGSEFEKRTADGSEFESPKKKAKVE

SEQ ID NO: 3116 - protein, 2096 aa, synthetic construct; identical to SEQ ID NO: 2789

SEQ ID NO: 3117 - protein, 2094 aa, synthetic construct; identical to SEQ ID NO: 2848

SEQ ID NO: 3118 - protein, 2096 aa, synthetic construct; identical to SEQ ID NO: 2805

SEQ ID NO: 3119 - protein, 2091 aa, synthetic construct; identical to SEQ ID NO: 2861

SEQ ID NO: 3120 - protein, 2115 aa, synthetic construct; identical to SEQ ID NO: 2813

SEQ ID NO: 3121 - protein, 2094 aa, synthetic construct
MPAAKRVKLDGGDKKYSIGLDIGTNSVGWAVITDEYKVPSKKFKVLGNTDRHSIKKNLIGALLFDSGETAEATRLKRTARRRYTRRKNRICYLQEIFSNEMAKVDDSFFHRLEESFLVEEDKKHERHPIFGNIVDEVAYHEKYPTIYHLRKKLVDSTDKADLRLIYLALAHMIKFRGHFLIEGDLNPDNSDVDKLFIQLVQTYNQLFEENPINASGVDAKAILSARLSKSRRLENLIAQLPGEKKNGLFGNLIALSLGLTPNFKSNFDLAEDAKLQLSKDTYDDDLDNLLAQIGDQYADLFLAAKNLSDAILLSDILRVNTEITKAPLSASMIKRYDEHHQDLTLLKALVRQQLPEKYKEIFFDQSKNGYAGYIDGGASQEEFYKFIKPILEKMDGTEELLVKLNREDLLRKQRTFDNGSIPHQIHLGELHAILRRQEDFYPFLKDNREKIEKILTFRIPYYVGPLARGNSRFAWMTRKSEETITPWNFEEVVDKGASAQSFIERMTNFDKNLPNEKVLPKHSLLYEYFTVYNELTKVKYVTEGMRKPAFLSGEQKKAIVDLLFKTNRKVTVKQLKEDYFKKIECFDSVEISGVEDRFNASLGTYHDLLKIIKDKDFLDNEENEDILEDIVLTLTLFEDREMIEERLKTYAHLFDDKVMKQLKRRRYTGWGRLSRKLINGIRDKQSGKTILDFLKSDGFANRNFMQLIHDDSLTFKEDIQKAQVSGQGDSLHEHIANLAGSPAIKKGILQTVKVVDELVKVMGRHKPENIVIEMARENQTTQKGQKNSRERMKRIEEGIKELGSQILKEHPVENTQLQNEKLYLYYLQNGRDMYVDQELDINRLSDYDVDHIVPQSFLKDDSIDNKVLTRSDKARGKSDNVPSEEVVKKMKNYWRQLLNAKLITQRKFDNLTKAERGGLSELDKAGFIKRQLVETRQITKHVAQILDSRMNTKYDENDKLIREVKVITLKSKLVSDFRKDFQFYKVREINNYHHAHDAYLNAVVGTALIKKYPKLESEFVYGDYKVYDVRKMIAKSEQEIGKATAKYFFYSNIMNFFKTEITLANGEIRKRPLIETNGETGEIVWDKGRDFATVRKVLSMPQVNIVKKTEVQTGGFSKESILPKRNSDKLIARKKDWDPKKYGGFDSPTVAYSVLVVAKVEKGKSKKLKSVKELLGITIMERSSFEKNPIDFLEAKGYKEVKKDLIIKLPKYSLFELENGRKRMLASAGELQKGNELALPSKYVNFLYLASHYEKLKGSPEDNEQKQLFVEQHKHYLDEIIEQISEFSKRVILADANLDKVLSAYNKHRDKPIREQAENIIHLFTLTNLGAPAAFKYFDTTIDRKRYTSTKEVLDATLIHQSITGLYETRIDLSQLGGDGGGGSGGGGSSGGTLNIEDEHRLHETSKEPDVSLGSTWLSDFPQAWAETGGMGLAVRQAPLIIPLKATSTPVSIKQYPMSQEARLGIKPHIQRLLDQGILVPCQSPWNTPLLPVKKPGTNDYRPVQDLREVNKRVEDIHPTVPNPYNLLSGLPPSHQWYTVLDLKDAFFCLRLHPTSQPLFAFEWRDPEMGISGQLTWTRLPQGFKNSPTLFNEALHRDLADFRIQHPDLILLQYVDDLLLAATSELDCQQGTRALLQTLGNLGYRASAKKAQICQKQVKYLGYLLKEGQRWLTEARKETVMGQPTPKTPRQLREFLGKAGFCRLFIPGFAEMAAPLYPLTKPGTLFNWGPDQQKAYQEIKQALLTAPALGLPDLTKPFELFVDEKQGYAKGVLTQKLGPWRRPVAYLSKKLDPVAAGWPPCLRMVAAIAVLTKDAGKLTMGQPLVILAPHAVEALVKQPPDRWLSNARMTHYQALLLDTDRVQFGPVVALNPATLLPLPEEGLQHNCLDILAEAHGTRPDLTDQPLPDADHTWYTDGSSLLQEGQRKAGAAVTTETEVIWAKALPAGTSAQRAELIALTQALKMAEGKKLNVYTDSRYAFATAHIHGEIYRRRGWLTSEGKEIKNKDEILALLKALFLPKRLSIIHCPGHQKGHSAEARGNRMADQAARKAAITETPDTSTLLAGKRTADGSEFEKRTADGSEFESPKKKAKVE

SEQ ID NO: 3122 - protein, 2094 aa, synthetic construct
MPAAKRVKLDGGDKKYSIGLDIGTNSVGWAVITDEYKVPSKKFKVLGNTDRHSIKKNLIGALLFDSGETAEATRLKRTARRRYTRRKNRICYLQEIFSNEMAKVDDSFFHRLEESFLVEEDKKHERHPIFGNIVDEVAYHEKYPTIYHLRKKLVDSTDKADLRLIYLALAHMIKFRGHFLIEGDLNPDNSDVDKLFIQLVQTYNQLFEENPINASGVDAKAILSARLSKSRRLENLIAQLPGEKKNGLFGNLIALSLGLTPNFKSNFDLAEDAKLQLSKDTYDDDLDNLLAQIGDQYADLFLAAKNLSDAILLSDILRVNTEITKAPLSASMIKRYDEHHQDLTLLKALVRQQLPEKYKEIFFDQSKNGYAGYIDGGASQEEFYKFIKPILEKMDGTEELLVKLNREDLLRKQRTFDNGSIPHQIHLGELHAILRRQEDFYPFLKDNREKIEKILTFRIPYYVGPLARGNSRFAWMTRKSEETITPWNFEEVVDKGASAQSFIERMTNFDKNLPNEKVLPKHSLLYEYFTVYNELTKVKYVTEGMRKPAFLSGEQKKAIVDLLFKTNRKVTVKQLKEDYFKKIECFDSVEISGVEDRFNASLGTYHDLLKIIKDKDFLDNEENEDILEDIVLTLTLFEDREMIEERLKTYAHLFDDKVMKQLKRRRYTGWGRLSRKLINGIRDKQSGKTILDFLKSDGFANRNFMQLIHDDSLTFKEDIQKAQVSGQGDSLHEHIANLAGSPAIKKGILQTVKVVDELVKVMGRHKPENIVIEMARENQTTQKGQKNSRERMKRIEEGIKELGSQILKEHPVENTQLQNEKLYLYYLQNGRDMYVDQELDINRLSDYDVDHIVPQSFLKDDSIDNKVLTRSDKARGKSDNVPSEEVVKKMKNYWRQLLNAKLITQRKFDNLTKAERGGLSELDKAGFIKRQLVETRQITKHVAQILDSRMNTKYDENDKLIREVKVITLKSKLVSDFRKDFQFYKVREINNYHHAHDAYLNAVVGTALIKKYPKLESEFVYGDYKVYDVRKMIAKSEQEIGKATAKYFFYSNIMNFFKTEITLANGEIRKRPLIETNGETGEIVWDKGRDFATVRKVLSMPQVNIVKKTEVQTGGFSKESILPKRNSDKLIARKKDWDPKKYGGFDSPTVAYSVLVVAKVEKGKSKKLKSVKELLGITIMERSSFEKNPIDFLEAKGYKEVKKDLIIKLPKYSLFELENGRKRMLASAGELQKGNELALPSKYVNFLYLASHYEKLKGSPEDNEQKQLFVEQHKHYLDEIIEQISEFSKRVILADANLDKVLSAYNKHRDKPIREQAENIIHLFTLTNLGAPAAFKYFDTTIDRKRYTSTKEVLDATLIHQSITGLYETRIDLSQLGGDGGGGSGSSPAPGGTLNIEDEHRLHETSKEPDVSLGSTWLSDFPQAWAETGGMGLAVRQAPLIIPLKATSTPVSIKQYPMSQEARLGIKPHIQRLLDQGILVPCQSPWNTPLLPVKKPGTNDYRPVQDLREVNKRVEDIHPTVPNPYNLLSGLPPSHQWYTVLDLKDAFFCLRLHPTSQPLFAFEWRDPEMGISGQLTWTRLPQGFKNSPTLFNEALHRDLADFRIQHPDLILLQYVDDLLLAATSELDCQQGTRALLQTLGNLGYRASAKKAQICQKQVKYLGYLLKEGQRWLTEARKETVMGQPTPKTPRQLREFLGKAGFCRLFIPGFAEMAAPLYPLTKPGTLFNWGPDQQKAYQEIKQALLTAPALGLPDLTKPFELFVDEKQGYAKGVLTQKLGPWRRPVAYLSKKLDPVAAGWPPCLRMVAAIAVLTKDAGKLTMGQPLVILAPHAVEALVKQPPDRWLSNARMTHYQALLLDTDRVQFGPVVALNPATLLPLPEEGLQHNCLDILAEAHGTRPDLTDQPLPDADHTWYTDGSSLLQEGQRKAGAAVTTETEVIWAKALPAGTSAQRAELIALTQALKMAEGKKLNVYTDSRYAFATAHIHGEIYRRRGWLTSEGKEIKNKDEILALLKALFLPKRLSIIHCPGHQKGHSAEARGNRMADQAARKAAITETPDTSTLLAGKRTADGSEFEKRTADGSEFESPKKKAKVE

SEQ ID NO: 3123 - protein, 2090 aa, synthetic construct; identical to SEQ ID NO: 2823

SEQ ID NO: 3124 - protein, 2094 aa, synthetic construct; identical to SEQ ID NO: 2833

SEQ ID NO: 3125 - protein, 2096 aa, synthetic construct; identical to SEQ ID NO: 2794

SEQ ID NO: 3126 - protein, 2100 aa, synthetic construct; identical to SEQ ID NO: 2802

SEQ ID NO: 3127 - protein, 2096 aa, synthetic construct; identical to SEQ ID NO: 2839

SEQ ID NO: 3128 - protein, 2094 aa, synthetic construct; identical to SEQ ID NO: 2841

SEQ ID NO: 3129 - protein, 2096 aa, synthetic construct
MPAAKRVKLDGGDKKYSIGLDIGTNSVGWAVITDEYKVPSKKFKVLGNTDRHSIKKNLIGALLFDSGETAEATRLKRTARRRYTRRKNRICYLQEIFSNEMAKVDDSFFHRLEESFLVEEDKKHERHPIFGNIVDEVAYHEKYPTIYHLRKKLVDSTDKADLRLIYLALAHMIKFRGHFLIEGDLNPDNSDVDKLFIQLVQTYNQLFEENPINASGVDAKAILSARLSKSRRLENLIAQLPGEKKNGLFGNLIALSLGLTPNFKSNFDLAEDAKLQLSKDTYDDDLDNLLAQIGDQYADLFLAAKNLSDAILLSDILRVNTEITKAPLSASMIKRYDEHHQDLTLLKALVRQQLPEKYKEIFFDQSKNGYAGYIDGGASQEEFYKFIKPILEKMDGTEELLVKLNREDLLRKQRTFDNGSIPHQIHLGELHAILRRQEDFYPFLKDNREKIEKILTFRIPYYVGPLARGNSRFAWMTRKSEETITPWNFEEVVDKGASAQSFIERMTNFDKNLPNEKVLPKHSLLYEYFTVYNELTKVKYVTEGMRKPAFLSGEQKKAIVDLLFKTNRKVTVKQLKEDYFKKIECFDSVEISGVEDRFNASLGTYHDLLKIIKDKDFLDNEENEDILEDIVLTLTLFEDREMIEERLKTYAHLFDDKVMKQLKRRRYTGWGRLSRKLINGIRDKQSGKTILDFLKSDGFANRNFMQLIHDDSLTFKEDIQKAQVSGQGDSLHEHIANLAGSPAIKKGILQTVKVVDELVKVMGRHKPENIVIEMARENQTTQKGQKNSRERMKRIEEGIKELGSQILKEHPVENTQLQNEKLYLYYLQNGRDMYVDQELDINRLSDYDVDHIVPQSFLKDDSIDNKVLTRSDKARGKSDNVPSEEVVKKMKNYWRQLLNAKLITQRKFDNLTKAERGGLSELDKAGFIKRQLVETRQITKHVAQILDSRMNTKYDENDKLIREVKVITLKSKLVSDFRKDFQFYKVREINNYHHAHDAYLNAVVGTALIKKYPKLESEFVYGDYKVYDVRKMIAKSEQEIGKATAKYFFYSNIMNFFKTEITLANGEIRKRPLIETNGETGEIVWDKGRDFATVRKVLSMPQVNIVKKTEVQTGGFSKESILPKRNSDKLIARKKDWDPKKYGGFDSPTVAYSVLVVAKVEKGKSKKLKSVKELLGITIMERSSFEKNPIDFLEAKGYKEVKKDLIIKLPKYSLFELENGRKRMLASAGELQKGNELALPSKYVNFLYLASHYEKLKGSPEDNEQKQLFVEQHKHYLDEIIEQISEFSKRVILADANLDKVLSAYNKHRDKPIREQAENIIHLFTLTNLGAPAAFKYFDTTIDRKRYTSTKEVLDATLIHQSITGLYETRIDLSQLGGDGGGGSGGGEAAAKGGTLNIEDEHRLHETSKEPDVSLGSTWLSDFPQAWAETGGMGLAVRQAPLIIPLKATSTPVSIKQYPMSQEARLGIKPHIQRLLDQGILVPCQSPWNTPLLPVKKPGTNDYRPVQDLREVNKRVEDIHPTVPNPYNLLSGLPPSHQWYTVLDLKDAFFCLRLHPTSQPLFAFEWRDPEMGISGQLTWTRLPQGFKNSPTLFNEALHRDLADFRIQHPDLILLQYVDDLLLAATSELDCQQGTRALLQTLGNLGYRASAKKAQICQKQVKYLGYLLKEGQRWLTEARKETVMGQPTPKTPRQLREFLGKAGFCRLFIPGFAEMAAPLYPLTKPGTLFNWGPDQQKAYQEIKQALLTAPALGLPDLTKPFELFVDEKQGYAKGVLTQKLGPWRRPVAYLSKKLDPVAAGWPPCLRMVAAIAVLTKDAGKLTMGQPLVILAPHAVEALVKQPPDRWLSNARMTHYQALLLDTDRVQFGPVVALNPATLLPLPEEGLQHNCLDILAEAHGTRPDLTDQPLPDADHTWYTDGSSLLQEGQRKAGAAVTTETEVIWAKALPAGTSAQRAELIALTQALKMAEGKKLNVYTDSRYAFATAHIHGEIYRRRGWLTSEGKEIKNKDEILALLKALFLPKRLSIIHCPGHQKGHSAEARGNRMADQAARKAAITETPDTSTLLAGKRTADGSEFEKRTADGSEFESPKKKAKVE

SEQ ID NO: 3130 - protein, 2094 aa, synthetic construct; identical to SEQ ID NO: 2801

SEQ ID NO: 3131 - protein, 2096 aa, synthetic construct
MPAAKRVKLDGGDKKYSIGLDIGTNSVGWAVITDEYKVPSKKFKVLGNTDRHSIKKNLIGALLFDSGETAEATRLKRTARRRYTRRKNRICYLQEIFSNEMAKVDDSFFHRLEESFLVEEDKKHERHPIFGNIVDEVAYHEKYPTIYHLRKKLVDSTDKADLRLIYLALAHMIKFRGHFLIEGDLNPDNSDVDKLFIQLVQTYNQLFEENPINASGVDAKAILSARLSKSRRLENLIAQLPGEKKNGLFGNLIALSLGLTPNFKSNFDLAEDAKLQLSKDTYDDDLDNLLAQIGDQYADLFLAAKNLSDAILLSDILRVNTEITKAPLSASMIKRYDEHHQDLTLLKALVRQQLPEKYKEIFFDQSKNGYAGYIDGGASQEEFYKFIKPILEKMDGTEELLVKLNREDLLRKQRTFDNGSIPHQIHLGELHAILRRQEDFYPFLKDNREKIEKILTFRIPYYVGPLARGNSRFAWMTRKSEETITPWNFEEVVDKGASAQSFIERMTNFDKNLPNEKVLPKHSLLYEYFTVYNELTKVKYVTEGMRKPAFLSGEQKKAIVDLLFKTNRKVTVKQLKEDYFKKIECFDSVEISGVEDRFNASLGTYHDLLKIIKDKDFLDNEENEDILEDIVLTLTLFEDREMIEERLKTYAHLFDDKVMKQLKRRRYTGWGRLSRKLINGIRDKQSGKTILDFLKSDGFANRNFMQLIHDDSLTFKEDIQKAQVSGQGDSLHEHIANLAGSPAIKKGILQTVKVVDELVKVMGRHKPENIVIEMARENQTTQKGQKNSRERMKRIEEGIKELGSQILKEHPVENTQLQNEKLYLYYLQNGRDMYVDQELDINRLSDYDVDHIVPQSFLKDDSIDNKVLTRSDKARGKSDNVPSEEVVKKMKNYWRQLLNAKLITQRKFDNLTKAERGGLSELDKAGFIKRQLVETRQITKHVAQILDSRMNTKYDENDKLIREVKVITLKSKLVSDFRKDFQFYKVREINNYHHAHDAYLNAVVGTALIKKYPKLESEFVYGDYKVYDVRKMIAKSEQEIGKATAKYFFYSNIMNFFKTEITLANGEIRKRPLIETNGETGEIVWDKGRDFATVRKVLSMPQVNIVKKTEVQTGGFSKESILPKRNSDKLIARKKDWDPKKYGGFDSPTVAYSVLVVAKVEKGKSKKLKSVKELLGITIMERSSFEKNPIDFLEAKGYKEVKKDLIIKLPKYSLFELENGRKRMLASAGELQKGNELALPSKYVNFLYLASHYEKLKGSPEDNEQKQLFVEQHKHYLDEIIEQISEFSKRVILADANLDKVLSAYNKHRDKPIREQAENIIHLFTLTNLGAPAAFKYFDTTIDRKRYTSTKEVLDATLIHQSITGLYETRIDLSQLGGDGGGSSEAAAKGGSGGTLNIEDEHRLHETSKEPDVSLGSTWLSDFPQAWAETGGMGLAVRQAPLIIPLKATSTPVSIKQYPMSQEARLGIKPHIQRLLDQGILVPCQSPWNTPLLPVKKPGTNDYRPVQDLREVNKRVEDIHPTVPNPYNLLSGLPPSHQWYTVLDLKDAFFCLRLHPTSQPLFAFEWRDPEMGISGQLTWTRLPQGFKNSPTLFNEALHRDLADFRIQHPDLILLQYVDDLLLAATSELDCQQGTRALLQTLGNLGYRASAKKAQICQKQVKYLGYLLKEGQRWLTEARKETVMGQPTPKTPRQLREFLGKAGFCRLFIPGFAEMAAPLYPLTKPGTLFNWGPDQQKAYQEIKQALLTAPALGLPDLTKPFELFVDEKQGYAKGVLTQKLGPWRRPVAYLSKKLDPVAAGWPPCLRMVAAIAVLTKDAGKLTMGQPLVILAPHAVEALVKQPPDRWLSNARMTHYQALLLDTDRVQFGPVVALNPATLLPLPEEGLQHNCLDILAEAHGTRPDLTDQPLPDADHTWYTDGSSLLQEGQRKAGAAVTTETEVIWAKALPAGTSAQRAELIALTQALKMAEGKKLNVYTDSRYAFATAHIHGEIYRRRGWLTSEGKEIKNKDEILALLKALFLPKRLSIIHCPGHQKGHSAEARGNRMADQAARKAAITETPDTSTLLAGKRTADGSEFEKRTADGSEFESPKKKAKVE

SEQ ID NO: 3132 - protein, 2118 aa, synthetic construct
MPAAKRVKLDGGDKKYSIGLDIGTNSVGWAVITDEYKVPSKKFKVLGNTDRHSIKKNLIGALLFDSGETAEATRLKRTARRRYTRRKNRICYLQEIFSNEMAKVDDSFFHRLEESFLVEEDKKHERHPIFGNIVDEVAYHEKYPTIYHLRKKLVDSTDKADLRLIYLALAHMIKFRGHFLIEGDLNPDNSDVDKLFIQLVQTYNQLFEENPINASGVDAKAILSARLSKSRRLENLIAQLPGEKKNGLFGNLIALSLGLTPNFKSNFDLAEDAKLQLSKDTYDDDLDNLLAQIGDQYADLFLAAKNLSDAILLSDILRVNTEITKAPLSASMIKRYDEHHQDLTLLKALVRQQLPEKYKEIFFDQSKNGYAGYIDGGASQEEFYKFIKPILEKMDGTEELLVKLNREDLLRKQRTFDNGSIPHQIHLGELHAILRRQEDFYPFLKDNREKIEKILTFRIPYYVGPLARGNSRFAWMTRKSEETITPWNFEEVVDKGASAQSFIERMTNFDKNLPNEKVLPKHSLLYEYFTVYNELTKVKYVTEGMRKPAFLSGEQKKAIVDLLFKTNRKVTVKQLKEDYFKKIECFDSVEISGVEDRFNASLGTYHDLLKIIKDKDFLDNEENEDILEDIVLTLTLFEDREMIEERLKTYAHLFDDKVMKQLKRRRYTGWGRLSRKLINGIRDKQSGKTILDFLKSDGFANRNFMQLIHDDSLTFKEDIQKAQVSGQGDSLHEHIANLAGSPAIKKGILQTVKVVDELVKVMGRHKPENIVIEMARENQTTQKGQKNSRERMKRIEEGIKELGSQILKEHPVENTQLQNEKLYLYYLQNGRDMYVDQELDINRLSDYDVDHIVPQSFLKDDSIDNKVLTRSDKARGKSDNVPSEEVVKKMKNYWRQLLNAKLITQRKFDNLTKAERGGLSELDKAGFIKRQLVETRQITKHVAQILDSRMNTKYDENDKLIREVKVITLKSKLVSDFRKDFQFYKVREINNYHHAHDAYLNAVVGTALIKKYPKLESEFVYGDYKVYDVRKMIAKSEQEIGKATAKYFFYSNIMNFFKTEITLANGEIRKRPLIETNGETGEIVWDKGRDFATVRKVLSMPQVNIVKKTEVQTGGFSKESILPKRNSDKLIARKKDWDPKKYGGFDSPTVAYSVLVVAKVEKGKSKKLKSVKELLGITIMERSSFEKNPIDFLEAKGYKEVKKDLIIKLPKYSLFELENGRKRMLASAGELQKGNELALPSKYVNFLYLASHYEKLKGSPEDNEQKQLFVEQHKHYLDEIIEQISEFSKRVILADANLDKVLSAYNKHRDKPIREQAENIIHLFTLTNLGAPAAFKYFDTTIDRKRYTSTKEVLDATLIHQSITGLYETRIDLSQLGGDGGSGGSSGGSSGSETPGTSESATPESSGGSSGGSSGGTLNIEDEHRLHETSKEPDVSLGSTWLSDFPQAWAETGGMGLAVRQAPLIIPLKATSTPVSIKQYPMSQEARLGIKPHIQRLLDQGILVPCQSPWNTPLLPVKKPGTNDYRPVQDLREVNKRVEDIHPTVPNPYNLLSGLPPSHQWYTVLDLKDAFFCLRLHPTSQPLFAFEWRDPEMGISGQLTWTRLPQGFKNSPTLFNEALHRDLADFRIQHPDLILLQYVDDLLLAATSELDCQQGTRALLQTLGNLGYRASAKKAQICQKQVKYLGYLLKEGQRWLTEARKETVMGQPTPKTPRQLREFLGKAGFCRLFIPGFAEMAAPLYPLTKPGTLFNWGPDQQKAYQEIKQALLTAPALGLPDLTKPFELFVDEKQGYAKGVLTQKLGPWRRPVAYLSKKLDPVAAGWPPCLRMVAAIAVLTKDAGKLTMGQPLVILAPHAVEALVKQPPDRWLSNARMTHYQALLLDTDRVQFGPVVALNPATLLPLPEEGLQHNCLDILAEAHGTRPDLTDQPLPDADHTWYTDGSSLLQEGQRKAGAAVTTETEVIWAKALPAGTSAQRAELIALTQALKMAEGKKLNVYTDSRYAFATAHIHGEIYRRRGWLTSEGKEIKNKDEILALLKALFLPKRLSIIHCPGHQKGHSAEARGNRMADQAARKAAITETPDTSTLLAGKRTADGSEFEKRTADGSEFESPKKKAKVE

SEQ ID NO: 3133 - protein, 2094 aa, synthetic construct; identical to SEQ ID NO: 2859

SEQ ID NO: 3134 - protein, 2094 aa, synthetic construct; identical to SEQ ID NO: 2854

SEQ ID NO: 3135 - protein, 2091 aa, synthetic construct; identical to SEQ ID NO: 2832

SEQ ID NO: 3136 - protein, 2096 aa, synthetic construct
MPAAKRVKLDGGDKKYSIGLDIGTNSVGWAVITDEYKVPSKKFKVLGNTDRHSIKKNLIGALLFDSGETAEATRLKRTARRRYTRRKNRICYLQEIFSNEMAKVDDSFFHRLEESFLVEEDKKHERHPIFGNIVDEVAYHEKYPTIYHLRKKLVDSTDKADLRLIYLALAHMIKFRGHFLIEGDLNPDNSDVDKLFIQLVQTYNQLFEENPINASGVDAKAILSARLSKSRRLENLIAQLPGEKKNGLFGNLIALSLGLTPNFKSNFDLAEDAKLQLSKDTYDDDLDNLLAQIGDQYADLFLAAKNLSDAILLSDILRVNTEITKAPLSASMIKRYDEHHQDLTLLKALVRQQLPEKYKEIFFDQSKNGYAGYIDGGASQEEFYKFIKPILEKMDGTEELLVKLNREDLLRKQRTFDNGSIPHQIHLGELHAILRRQEDFYPFLKDNREKIEKILTFRIPYYVGPLARGNSRFAWMTRKSEETITPWNFEEVVDKGASAQSFIERMTNFDKNLPNEKVLPKHSLLYEYFTVYNELTKVKYVTEGMRKPAFLSGEQKKAIVDLLFKTNRKVTVKQLKEDYFKKIECFDSVEISGVEDRFNASLGTYHDLLKIIKDKDFLDNEENEDILEDIVLTLTLFEDREMIEERLKTYAHLFDDKVMKQLKRRRYTGWGRLSRKLINGIRDKQSGKTILDFLKSDGFANRNFMQLIHDDSLTFKEDIQKAQVSGQGDSLHEHIANLAGSPAIKKGILQTVKVVDELVKVMGRHKPENIVIEMARENQTTQKGQKNSRERMKRIEEGIKELGSQILKEHPVENTQLQNEKLYLYYLQNGRDMYVDQELDINRLSDYDVDHIVPQSFLKDDSIDNKVLTRSDKARGKSDNVPSEEVVKKMKNYWRQLLNAKLITQRKFDNLTKAERGGLSELDKAGFIKRQLVETRQITKHVAQILDSRMNTKYDENDKLIREVKVITLKSKLVSDFRKDFQFYKVREINNYHHAHDAYLNAVVGTALIKKYPKLESEFVYGDYKVYDVRKMIAKSEQEIGKATAKYFFYSNIMNFFKTEITLANGEIRKRPLIETNGETGEIVWDKGRDFATVRKVLSMPQVNIVKKTEVQTGGFSKESILPKRNSDKLIARKKDWDPKKYGGFDSPTVAYSVLVVAKVEKGKSKKLKSVKELLGITIMERSSFEKNPIDFLEAKGYKEVKKDLIIKLPKYSLFELENGRKRMLASAGELQKGNELALPSKYVNFLYLASHYEKLKGSPEDNEQKQLFVEQHKHYLDEIIEQISEFSKRVILADANLDKVLSAYNKHRDKPIREQAENIIHLFTLTNLGAPAAFKYFDTTIDRKRYTSTKEVLDATLIHQSITGLYETRIDLSQLGGDGGGGGPAPEAAAKGGTLNIEDEHRLHETSKEPDVSLGSTWLSDFPQAWAETGGMGLAVRQAPLIIPLKATSTPVSIKQYPMSQEARLGIKPHIQRLLDQGILVPCQSPWNTPLLPVKKPGTNDYRPVQDLREVNKRVEDIHPTVPNPYNLLSGLPPSHQWYTVLDLKDAFFCLRLHPTSQPLFAFEWRDPEMGISGQLTWTRLPQGFKNSPTLFNEALHRDLADFRIQHPDLILLQYVDDLLLAATSELDCQQGTRALLQTLGNLGYRASAKKAQICQKQVKYLGYLLKEGQRWLTEARKETVMGQPTPKTPRQLREFLGKAGFCRLFIPGFAEMAAPLYPLTKPGTLFNWGPDQQKAYQEIKQALLTAPALGLPDLTKPFELFVDEKQGYAKGVLTQKLGPWRRPVAYLSKKLDPVAAGWPPCLRMVAAIAVLTKDAGKLTMGQPLVILAPHAVEALVKQPPDRWLSNARMTHYQALLLDTDRVQFGPVVALNPATLLPLPEEGLQHNCLDILAEAHGTRPDLTDQPLPDADHTWYTDGSSLLQEGQRKAGAAVTTETEVIWAKALPAGTSAQRAELIALTQALKMAEGKKLNVYTDSRYAFATAHIHGEIYRRRGWLTSEGKEIKNKDEILALLKALFLPKRLSIIHCPGHQKGHSAEARGNRMADQAARKAAITETPDTSTLLAGKRTADGSEFEKRTADGSEFESPKKKAKVE

SEQ ID NO: 3137 - protein, 2091 aa, synthetic construct
MPAAKRVKLDGGDKKYSIGLDIGTNSVGWAVITDEYKVPSKKFKVLGNTDRHSIKKNLIGALLFDSGETAEATRLKRTARRRYTRRKNRICYLQEIFSNEMAKVDDSFFHRLEESFLVEEDKKHERHPIFGNIVDEVAYHEKYPTIYHLRKKLVDSTDKADLRLIYLALAHMIKFRGHFLIEGDLNPDNSDVDKLFIQLVQTYNQLFEENPINASGVDAKAILSARLSKSRRLENLIAQLPGEKKNGLFGNLIALSLGLTPNFKSNFDLAEDAKLQLSKDTYDDDLDNLLAQIGDQYADLFLAAKNLSDAILLSDILRVNTEITKAPLSASMIKRYDEHHQDLTLLKALVRQQLPEKYKEIFFDQSKNGYAGYIDGGASQEEFYKFIKPILEKMDGTEELLVKLNREDLLRKQRTFDNGSIPHQIHLGELHAILRRQEDFYPFLKDNREKIEKILTFRIPYYVGPLARGNSRFAWMTRKSEETITPWNFEEVVDKGASAQSFIERMTNFDKNLPNEKVLPKHSLLYEYFTVYNELTKVKYVTEGMRKPAFLSGEQKKAIVDLLFKTNRKVTVKQLKEDYFKKIECFDSVEISGVEDRFNASLGTYHDLLKIIKDKDFLDNEENEDILEDIVLTLTLFEDREMIEERLKTYAHLFDDKVMKQLKRRRYTGWGRLSRKLINGIRDKQSGKTILDFLKSDGFANRNFMQLIHDDSLTFKEDIQKAQVSGQGDSLHEHIANLAGSPAIKKGILQTVKVVDELVKVMGRHKPENIVIEMARENQTTQKGQKNSRERMKRIEEGIKELGSQILKEHPVENTQLQNEKLYLYYLQNGRDMYVDQELDINRLSDYDVDHIVPQSFLKDDSIDNKVLTRSDKARGKSDNVPSEEVVKKMKNYWRQLLNAKLITQRKFDNLTKAERGGLSELDKAGFIKRQLVETRQITKHVAQILDSRMNTKYDENDKLIREVKVITLKSKLVSDFRKDFQFYKVREINNYHHAHDAYLNAVVGTALIKKYPKLESEFVYGDYKVYDVRKMIAKSEQEIGKATAKYFFYSNIMNFFKTEITLANGEIRKRPLIETNGETGEIVWDKGRDFATVRKVLSMPQVNIVKKTEVQTGGFSKESILPKRNSDKLIARKKDWDPKKYGGFDSPTVAYSVLVVAKVEKGKSKKLKSVKELLGITIMERSSFEKNPIDFLEAKGYKEVKKDLIIKLPKYSLFELENGRKRMLASAGELQKGNELALPSKYVNFLYLASHYEKLKGSPEDNEQKQLFVEQHKHYLDEIIEQISEFSKRVILADANLDKVLSAYNKHRDKPIREQAENIIHLFTLTNLGAPAAFKYFDTTIDRKRYTSTKEVLDATLIHQSITGLYETRIDLSQLGGDGGPAPGGGGGTLNIEDEYRLHEISTEPDVSPGSTWLSDFPQAWAETGGMGLAVRQAPLIIPLKATSTPVSIKQYPMSQEAKLGIKPHIQRLLDQGILVPCQSPWNTPLLPVKKPGTNDYRPVQGLREVNKRVEDIHPTVPNPYNLLSGLPTSHRWYTVLDLKDAFFCLRLHPTSQPLFASEWRDPGMGISGQLTWTRLPQGFKNSPTLFDEALHRGLADFRIQHPDLILLQYVDDLLLAATSELDCQQGTRALLKTLGNLGYRASAKKAQICQKQVKYLGYLLREGQRWLTEARKETVMGQPTPKTPRQLREFLGTAGFCRLWIPRFAEMAAPLYPLTKTGTLFNWGPDQQKAYHEIKQALLTAPALGLPDLTKPFELFVDEKQGYAKGVLTQKLGPWRRPVAYLSKKLDPVAAGWPPCLRMVAAIAVLTKDAGKLTMGQPLVILAPHAVEALVKQPPDRWLSNARMTHYQAMLLDTDRVQFGPVVALNPATLLPLPEEGAPHDCLEILAETHGTEPDLTDQPIPDADHTWYTDGSSFLQEGQRKAGAAVTTETEVIWARALPAGTSAQRAELIALTQALKMAEGKRLNVYTDSRYAFATAHIHGEIYKRRGLLTSEGREIKNKSEILALLKALFLPKRLSIIHCLGHQKGDSAEARGNRLADQAAREAAIKTPPDTSTLLAGKRTADGSEFEKRTADGSEFESPKKKAKVE

SEQ ID NO: 3138 - protein, 2088 aa, synthetic construct
MPAAKRVKLDGGDKKYSIGLDIGTNSVGWAVITDEYKVPSKKFKVLGNTDRHSIKKNLIGALLFDSGETAEATRLKRTARRRYTRRKNRICYLQEIFSNEMAKVDDSFFHRLEESFLVEEDKKHERHPIFGNIVDEVAYHEKYPTIYHLRKKLVDSTDKADLRLIYLALAHMIKFRGHFLIEGDLNPDNSDVDKLFIQLVQTYNQLFEENPINASGVDAKAILSARLSKSRRLENLIAQLPGEKKNGLFGNLIALSLGLTPNFKSNFDLAEDAKLQLSKDTYDDDLDNLLAQIGDQYADLFLAAKNLSDAILLSDILRVNTEITKAPLSASMIKRYDEHHQDLTLLKALVRQQLPEKYKEIFFDQSKNGYAGYIDGGASQEEFYKFIKPILEKMDGTEELLVKLNREDLLRKQRTFDNGSIPHQIHLGELHAILRRQEDFYPFLKDNREKIEKILTFRIPYYVGPLARGNSRFAWMTRKSEETITPWNFEEVVDKGASAQSFIERMTNFDKNLPNEKVLPKHSLLYEYFTVYNELTKVKYVTEGMRKPAFLSGEQKKAIVDLLFKTNRKVTVKQLKEDYFKKIECFDSVEISGVEDRFNASLGTYHDLLKIIKDKDFLDNEENEDILEDIVLTLTLFEDREMIEERLKTYAHLFDDKVMKQLKRRRYTGWGRLSRKLINGIRDKQSGKTILDFLKSDGFANRNFMQLIHDDSLTFKEDIQKAQVSGQGDSLHEHIANLAGSPAIKKGILQTVKVVDELVKVMGRHKPENIVIEMARENQTTQKGQKNSRERMKRIEEGIKELGSQILKEHPVENTQLQNEKLYLYYLQNGRDMYVDQELDINRLSDYDVDHIVPQSFLKDDSIDNKVLTRSDKARGKSDNVPSEEVVKKMKNYWRQLLNAKLITQRKFDNLTKAERGGLSELDKAGFIKRQLVETRQITKHVAQILDSRMNTKYDENDKLIREVKVITLKSKLVSDFRKDFQFYKVREINNYHHAHDAYLNAVVGTALIKKYPKLESEFVYGDYKVYDVRKMIAKSEQEIGKATAKYFFYSNIMNFFKTEITLANGEIRKRPLIETNGETGEIVWDKGRDFATVRKVLSMPQVNIVKKTEVQTGGFSKESILPKRNSDKLIARKKDWDPKKYGGFDSPTVAYSVLVVAKVEKGKSKKLKSVKELLGITIMERSSFEKNPIDFLEAKGYKEVKKDLIIKLPKYSLFELENGRKRMLASAGELQKGNELALPSKYVNFLYLASHYEKLKGSPEDNEQKQLFVEQHKHYLDEIIEQISEFSKRVILADANLDKVLSAYNKHRDKPIREQAENIIHLFTLTNLGAPAAFKYFDTTIDRKRYTSTKEVLDATLIHQSITGLYETRIDLSQLGGDGGGGSGGTLNIEDEYRLHEISTEPDVSPGSTWLSDFPQAWAETGGMGLAVRQAPLIIPLKATSTPVSIKQYPMSQEAKLGIKPHIQRLLDQGILVPCQSPWNTPLLPVKKPGTNDYRPVQGLREVNKRVEDIHPTVPNPYNLLSGLPTSHRWYTVLDLKDAFFCLRLHPTSQPLFASEWRDPGMGISGQLTWTRLPQGFKNSPTLFNEALHRGLADFRIQHPDLILLQYVDDLLLAATSELDCQQGTRALLKTLGNLGYRASAKKAQICQKQVKYLGYLLREGQRWLTEARKETVMGQPTPKTPRQLREFLGTAGFCRLWIPRFAEMAAPLYPLTKPGTLFNWGPDQQKAYHEIKQALLTAPALGLPDLTKPFELFVDEKQGYAKGVLTQKLGPWRRPVAYLSKKLDPVAAGWPPCLRMVAAIAVLTKDAGKLTMGQPLVILAPHAVEALVKQPPDRWLSNARMTHYQAMLLDTDRVQFGPVVALNPATLLPLPEEGAPHDCLEILAETHGTEPDLTDQPIPDADHTWYTDGSSFLQEGQRKAGAAVTTETEVIWARALPAGTSAQRAELIALTQALKMAEGKRLNVYTDSRYAFATAHIHGEIYKRRGWLTSEGREIKNKSEILALLKALFLPKRLSIIHCLGHQKGDSAEARGNRLADQAAREAAIKTPPDTSTLLAGKRTADGSEFEKRTADGSEFESPKKKAKVE

SEQ ID NO: 3139 - protein, 2091 aa, synthetic construct
MPAAKRVKLDGGDKKYSIGLDIGTNSVGWAVITDEYKVPSKKFKVLGNTDRHSIKKNLIGALLFDSGETAEATRLKRTARRRYTRRKNRICYLQEIFSNEMAKVDDSFFHRLEESFLVEEDKKHERHPIFGNIVDEVAYHEKYPTIYHLRKKLVDSTDKADLRLIYLALAHMIKFRGHFLIEGDLNPDNSDVDKLFIQLVQTYNQLFEENPINASGVDAKAILSARLSKSRRLENLIAQLPGEKKNGLFGNLIALSLGLTPNFKSNFDLAEDAKLQLSKDTYDDDLDNLLAQIGDQYADLFLAAKNLSDAILLSDILRVNTEITKAPLSASMIKRYDEHHQDLTLLKALVRQQLPEKYKEIFFDQSKNGYAGYIDGGASQEEFYKFIKPILEKMDGTEELLVKLNREDLLRKQRTFDNGSIPHQIHLGELHAILRRQEDFYPFLKDNREKIEKILTFRIPYYVGPLARGNSRFAWMTRKSEETITPWNFEEVVDKGASAQSFIERMTNFDKNLPNEKVLPKHSLLYEYFTVYNELTKVKYVTEGMRKPAFLSGEQKKAIVDLLFKTNRKVTVKQLKEDYFKKIECFDSVEISGVEDRFNASLGTYHDLLKIIKDKDFLDNEENEDILEDIVLTLTLFEDREMIEERLKTYAHLFDDKVMKQLKRRRYTGWGRLSRKLINGIRDKQSGKTILDFLKSDGFANRNFMQLIHDDSLTFKEDIQKAQVSGQGDSLHEHIANLAGSPAIKKGILQTVKVVDELVKVMGRHKPENIVIEMARENQTTQKGQKNSRERMKRIEEGIKELGSQILKEHPVENTQLQNEKLYLYYLQNGRDMYVDQELDINRLSDYDVDHIVPQSFLKDDSIDNKVLTRSDKARGKSDNVPSEEVVKKMKNYWRQLLNAKLITQRKFDNLTKAERGGLSELDKAGFIKRQLVETRQITKHVAQILDSRMNTKYDENDKLIREVKVITLKSKLVSDFRKDFQFYKVREINNYHHAHDAYLNAVVGTALIKKYPKLESEFVYGDYKVYDVRKMIAKSEQEIGKATAKYFFYSNIMNFFKTEITLANGEIRKRPLIETNGETGEIVWDKGRDFATVRKVLSMPQVNIVKKTEVQTGGFSKESILPKRNSDKLIARKKDWDPKKYGGFDSPTVAYSVLVVAKVEKGKSKKLKSVKELLGITIMERSSFEKNPIDFLEAKGYKEVKKDLIIKLPKYSLFELENGRKRMLASAGELQKGNELALPSKYVNFLYLASHYEKLKGSPEDNEQKQLFVEQHKHYLDEIIEQISEFSKRVILADANLDKVLSAYNKHRDKPIREQAENIIHLFTLTNLGAPAAFKYFDTTIDRKRYTSTKEVLDATLIHQSITGLYETRIDLSQLGGDGGPAPGGSGGTLNIEDEYRLHEISTEPDVSPGSTWLSDFPQAWAETGGMGLAVRQAPLIIPLKATSTPVSIKQYPMSQEAKLGIKPHIQRLLDQGILVPCQSPWNTPLLPVKKPGTNDYRPVQGLREVNKRVEDIHPTVPNPYNLLSGLPTSHRWYTVLDLKDAFFCLRLHPTSQPLFASEWRDPGMGISGQLTWTRLPQGFKNSPTLFNEALHRGLADFRIQHPDLILLQYVDDLLLAATSELDCQQGTRALLKTLGNLGYRASAKKAQICQKQVKYLGYLLREGQRWLTEARKETVMGQPTPKTPRQLREFLGTAGFCRLWIPRFAEMAAPLYPLTKPGTLFNWGPDQQKAYHEIKQALLTAPALGLPDLTKPFELFVDEKQGYAKGVLTQKLGPWRRPVAYLSKKLDPVAAGWPPCLRMVAAIAVLTKDAGKLTMGQPLVILAPHAVEALVKQPPDRWLSNARMTHYQAMLLDTDRVQFGPVVALNPATLLPLPEEGAPHDCLEILAETHGTEPDLTDQPIPDADHTWYTDGSSFLQEGQRKAGAAVTTETEVIWARALPAGTSAQRAELIALTQALKMAEGKRLNVYTDSRYAFATAHIHGEIYKRRGWLTSEGREIKNKSEILALLKALFLPKRLSIIHCLGHQKGDSAEARGNRLADQAAREAAIKTPPDTSTLLAGKRTADGSEFEKRTADGSEFESPKKKAKVE

SEQ ID NO: 3140 - protein, 2105 aa, synthetic construct
MPAAKRVKLDGGDKKYSIGLDIGTNSVGWAVITDEYKVPSKKFKVLGNTDRHSIKKNLIGALLFDSGETAEATRLKRTARRRYTRRKNRICYLQEIFSNEMAKVDDSFFHRLEESFLVEEDKKHERHPIFGNIVDEVAYHEKYPTIYHLRKKLVDSTDKADLRLIYLALAHMIKFRGHFLIEGDLNPDNSDVDKLFIQLVQTYNQLFEENPINASGVDAKAILSARLSKSRRLENLIAQLPGEKKNGLFGNLIALSLGLTPNFKSNFDLAEDAKLQLSKDTYDDDLDNLLAQIGDQYADLFLAAKNLSDAILLSDILRVNTEITKAPLSASMIKRYDEHHQDLTLLKALVRQQLPEKYKEIFFDQSKNGYAGYIDGGASQEEFYKFIKPILEKMDGTEELLVKLNREDLLRKQRTFDNGSIPHQIHLGELHAILRRQEDFYPFLKDNREKIEKILTFRIPYYVGPLARGNSRFAWMTRKSEETITPWNFEEVVDKGASAQSFIERMTNFDKNLPNEKVLPKHSLLYEYFTVYNELTKVKYVTEGMRKPAFLSGEQKKAIVDLLFKTNRKVTVKQLKEDYFKKIECFDSVEISGVEDRFNASLGTYHDLLKIIKDKDFLDNEENEDILEDIVLTLTLFEDREMIEERLKTYAHLFDDKVMKQLKRRRYTGWGRLSRKLINGIRDKQSGKTILDFLKSDGFANRNFMQLIHDDSLTFKEDIQKAQVSGQGDSLHEHIANLAGSPAIKKGILQTVKVVDELVKVMGRHKPENIVIEMARENQTTQKGQKNSRERMKRIEEGIKELGSQILKEHPVENTQLQNEKLYLYYLQNGRDMYVDQELDINRLSDYDVDHIVPQSFLKDDSIDNKVLTRSDKARGKSDNVPSEEVVKKMKNYWRQLLNAKLITQRKFDNLTKAERGGLSELDKAGFIKRQLVETRQITKHVAQILDSRMNTKYDENDKLIREVKVITLKSKLVSDFRKDFQFYKVREINNYHHAHDAYLNAVVGTALIKKYPKLESEFVYGDYKVYDVRKMIAKSEQEIGKATAKYFFYSNIMNFFKTEITLANGEIRKRPLIETNGETGEIVWDKGRDFATVRKVLSMPQVNIVKKTEVQTGGFSKESILPKRNSDKLIARKKDWDPKKYGGFDSPTVAYSVLVVAKVEKGKSKKLKSVKELLGITIMERSSFEKNPIDFLEAKGYKEVKKDLIIKLPKYSLFELENGRKRMLASAGELQKGNELALPSKYVNFLYLASHYEKLKGSPEDNEQKQLFVEQHKHYLDEIIEQISEFSKRVILADANLDKVLSAYNKHRDKPIREQAENIIHLFTLTNLGAPAAFKYFDTTIDRKRYTSTKEVLDATLIHQSITGLYETRIDLSQLGGDGGEAAAKEAAAKEAAAKEAAAKGGTLNIEDEYRLHEISTEPDVSPGSTWLSDFPQAWAETGGMGLAVRQAPLIIPLKATSTPVSIKQYPMSQEAKLGIKPHIQRLLDQGILVPCQSPWNTPLLPVKKPGTNDYRPVQGLREVNKRVEDIHPTVPNPYNLLSGLPTSHRWYTVLDLKDAFFCLRLHPTSQPLFASEWRDPGMGISGQLTWTRLPQGFKNSPTLFNEALHRGLADFRIQHPDLILLQYVDDLLLAATSELDCQQGTRALLKTLGNLGYRASAKKAQICQKQVKYLGYLLREGQRWLTEARKETVMGQPTPKTPRQLREFLGTAGFCRLWIPRFAEMAAPLYPLTKPGTLFNWGPDQQKAYHEIKQALLTAPALGLPDLTKPFELFVDEKQGYAKGVLTQKLGPWRRPVAYLSKKLDPVAAGWPPCLRMVAAIAVLTKDAGKLTMGQPLVILAPHAVEALVKQPPDRWLSNARMTHYQAMLLDTDRVQFGPVVALNPATLLPLPEEGAPHDCLEILAETHGTEPDLTDQPIPDADHTWYTDGSSFLQEGQRKAGAAVTTETEVIWARALPAGTSAQRAELIALTQALKMAEGKRLNVYTDSRYAFATAHIHGEIYKRRGWLTSEGREIKNKSEILALLKALFLPKRLSIIHCLGHQKGDSAEARGNRLADQAAREAAIKTPPDTSTLLAGKRTADGSEFEKRTADGSEFESPKKKAKVE

SEQ ID NO: 3141 - protein, 2151 aa, synthetic construct
MPAAKRVKLDGGDKKYSIGLDIGTNSVGWAVITDEYKVPSKKFKVLGNTDRHSIKKNLIGALLFDSGETAEATRLKRTARRRYTRRKNRICYLQEIFSNEMAKVDDSFFHRLEESFLVEEDKKHERHPIFGNIVDEVAYHEKYPTIYHLRKKLVDSTDKADLRLIYLALAHMIKFRGHFLIEGDLNPDNSDVDKLFIQLVQTYNQLFEENPINASGVDAKAILSARLSKSRRLENLIAQLPGEKKNGLFGNLIALSLGLTPNFKSNFDLAEDAKLQLSKDTYDDDLDNLLAQIGDQYADLFLAAKNLSDAILLSDILRVNTEITKAPLSASMIKRYDEHHQDLTLLKALVRQQLPEKYKEIFFDQSKNGYAGYIDGGASQEEFYKFIKPILEKMDGTEELLVKLNREDLLRKQRTFDNGSIPHQIHLGELHAILRRQEDFYPFLKDNREKIEKILTFRIPYYVGPLARGNSRFAWMTRKSEETITPWNFEEVVDKGASAQSFIERMTNFDKNLPNEKVLPKHSLLYEYFTVYNELTKVKYVTEGMRKPAFLSGEQKKAIVDLLFKTNRKVTVKQLKEDYFKKIECFDSVEISGVEDRFNASLGTYHDLLKIIKDKDFLDNEENEDILEDIVLTLTLFEDREMIEERLKTYAHLFDDKVMKQLKRRRYTGWGRLSRKLINGIRDKQSGKTILDFLKSDGFANRNFMQLIHDDSLTFKEDIQKAQVSGQGDSLHEHIANLAGSPAIKKGILQTVKVVDELVKVMGRHKPENIVIEMARENQTTQKGQKNSRERMKRIEEGIKELGSQILKEHPVENTQLQNEKLYLYYLQNGRDMYVDQELDINRLSDYDVDHIVPQSFLKDDSIDNKVLTRSDKARGKSDNVPSEEVVKKMKNYWRQLLNAKLITQRKFDNLTKAERGGLSELDKAGFIKRQLVETRQITKHVAQILDSRMNTKYDENDKLIREVKVITLKSKLVSDFRKDFQFYKVREINNYHHAHDAYLNAVVGTALIKKYPKLESEFVYGDYKVYDVRKMIAKSEQEIGKATAKYFFYSNIMNFFKTEITLANGEIRKRPLIETNGETGEIVWDKGRDFATVRKVLSMPQVNIVKKTEVQTGGFSKESILPKRNSDKLIARKKDWDPKKYGGFDSPTVAYSVLVVAKVEKGKSKKLKSVKELLGITIMERSSFEKNPIDFLEAKGYKEVKKDLIIKLPKYSLFELENGRKRMLASAGELQKGNELALPSKYVNFLYLASHYEKLKGSPEDNEQKQLFVEQHKHYLDEIIEQISEFSKRVILADANLDKVLSAYNKHRDKPIREQAENIIHLFTLTNLGAPAAFKYFDTTIDRKRYTSTKEVLDATLIHQSITGLYETRIDLSQLGGDGGAEAAAKEAAAKEAAAKEAAAKALEAEAAAKEAAAKEAAAKEAAAKAGGVQEISDSRPMLHIYLNGRRFLGLLDTGADKTCIAGRDWPANWPIHQTESSLQGLGMACGVARSSQPLRWQHEDKSGIIHPFVIPTLPFTLWGRDIMKDIKVRLMTDSPDDSQDLMIGAIESNLFADQISWKSDQPVWLNQWPLKQEKLQALQQLVTEQLQLGHLEESNSPWNTPVFVIKKKSGKWRLLQDLRAVNATMHDMGALQPGLPSPVAVPKGWEIIIIDLQDCFFNIKLHPEDCKRFAFSVPSPNFKRPYQRFQWKVLPQGMKNSPTLCQKFVDKAILTVRDKYQDSYIVHYMDDILLAHPSRSIVDEILTSMIQALNKHGLVVSTEKIQKYDNLKYLGTHIQGDSVSYQKLQIRTDKLRTLNDFQKLLGNINWIRPFLKLTTGELKPLFEILNGDSNPISTRKLTPEACKALQLMNERLSTARVKRLDLSQPWSLCILKTEYTPTACLWQDGVVEWIHLPHISPKVITPYDIFCTQLIIKGRHRSKELFSKDPDYIVVPYTKVQFDLLLQEKEDWPISLLGFLGEVHFHLPKDPLLTFTLQTAIIFPHMTSTTPLEKGIVIFTDGSANGRSVTYIQGREPIIKENTQNTAQQAEIVAVITAFEEVSQPFNLYTDSKYVTGLFPEIETATLSPRTKIYTELKHLQRLIHKRQEKFYIGHIRGHTGLPGPLAQGNAYADSLTRILTAAGKRTADGSEFEKRTADGSEFESPKKKAKVE

SEQ ID NO: 3142 - protein, 2130 aa, synthetic construct
MPAAKRVKLDGGDKKYSIGLDIGTNSVGWAVITDEYKVPSKKFKVLGNTDRHSIKKNLIGALLFDSGETAEATRLKRTARRRYTRRKNRICYLQEIFSNEMAKVDDSFFHRLEESFLVEEDKKHERHPIFGNIVDEVAYHEKYPTIYHLRKKLVDSTDKADLRLIYLALAHMIKFRGHFLIEGDLNPDNSDVDKLFIQLVQTYNQLFEENPINASGVDAKAILSARLSKSRRLENLIAQLPGEKKNGLFGNLIALSLGLTPNFKSNFDLAEDAKLQLSKDTYDDDLDNLLAQIGDQYADLFLAAKNLSDAILLSDILRVNTEITKAPLSASMIKRYDEHHQDLTLLKALVRQQLPEKYKEIFFDQSKNGYAGYIDGGASQEEFYKFIKPILEKMDGTEELLVKLNREDLLRKQRTFDNGSIPHQIHLGELHAILRRQEDFYPFLKDNREKIEKILTFRIPYYVGPLARGNSRFAWMTRKSEETITPWNFEEVVDKGASAQSFIERMTNFDKNLPNEKVLPKHSLLYEYFTVYNELTKVKYVTEGMRKPAFLSGEQKKAIVDLLFKTNRKVTVKQLKEDYFKKIECFDSVEISGVEDRFNASLGTYHDLLKIIKDKDFLDNEENEDILEDIVLTLTLFEDREMIEERLKTYAHLFDDKVMKQLKRRRYTGWGRLSRKLINGIRDKQSGKTILDFLKSDGFANRNFMQLIHDDSLTFKEDIQKAQVSGQGDSLHEHIANLAGSPAIKKGILQTVKVVDELVKVMGRHKPENIVIEMARENQTTQKGQKNSRERMKRIEEGIKELGSQILKEHPVENTQLQNEKLYLYYLQNGRDMYVDQELDINRLSDYDVDHIVPQSFLKDDSIDNKVLTRSDKARGKSDNVPSEEVVKKMKNYWRQLLNAKLITQRKFDNLTKAERGGLSELDKAGFIKRQLVETRQITKHVAQILDSRMNTKYDENDKLIREVKVITLKSKLVSDFRKDFQFYKVREINNYHHAHDAYLNAVVGTALIKKYPKLESEFVYGDYKVYDVRKMIAKSEQEIGKATAKYFFYSNIMNFFKTEITLANGEIRKRPLIETNGETGEIVWDKGRDFATVRKVLSMPQVNIVKKTEVQTGGFSKESILPKRNSDKLIARKKDWDPKKYGGFDSPTVAYSVLVVAKVEKGKSKKLKSVKELLGITIMERSSFEKNPIDFLEAKGYKEVKKDLIIKLPKYSLFELENGRKRMLASAGELQKGNELALPSKYVNFLYLASHYEKLKGSPEDNEQKQLFVEQHKHYLDEIIEQISEFSKRVILADANLDKVLSAYNKHRDKPIREQAENIIHLFTLTNLGAPAAFKYFDTTIDRKRYTSTKEVLDATLIHQSITGLYETRIDLSQLGGDGGEAAAKEAAAKEAAAKEAAAKEAAAKGGVQEISDSRPMLHIYLNGRRFLGLLDTGADKTCIAGRDWPANWPIHQTESSLQGLGMACGVARSSQPLRWQHEDKSGIIHPFVIPTLPFTLWGRDIMKDIKVRLMTDSPDDSQDLMIGAIESNLFADQISWKSDQPVWLNQWPLKQEKLQALQQLVTEQLQLGHLEESNSPWNTPVFVIKKKSGKWRLLQDLRAVNATMHDMGALQPGLPSPVAVPKGWEIIIIDLQDCFFNIKLHPEDCKRFAFSVPSPNFKRPYQRFQWKVLPQGMKNSPTLCQKFVDKAILTVRDKYQDSYIVHYMDDILLAHPSRSIVDEILTSMIQALNKHGLVVSTEKIQKYDNLKYLGTHIQGDSVSYQKLQIRTDKLRTLNDFQKLLGNINWIRPFLKLTTGELKPLFEILNGDSNPISTRKLTPEACKALQLMNERLSTARVKRLDLSQPWSLCILKTEYTPTACLWQDGVVEWIHLPHISPKVITPYDIFCTQLIIKGRHRSKELFSKDPDYIVVPYTKVQFDLLLQEKEDWPISLLGFLGEVHFHLPKDPLLTFTLQTAIIFPHMTSTTPLEKGIVIFTDGSANGRSVTYIQGREPIIKENTQNTAQQAEIVAVITAFEEVSQPFNLYTDSKYVTGLFPEIETATLSPRTKIYTELKHLQRLIHKRQEKFYIGHIRGHTGLPGPLAQGNAYADSLTRILTAAGKRTADGSEFEKRTADGSEFESPKKKAKVE

SEQ ID NO: 3143 - protein, 2138 aa, synthetic construct
MPAAKRVKLDGGDKKYSIGLDIGTNSVGWAVITDEYKVPSKKFKVLGNTDRHSIKKNLIGALLFDSGETAEATRLKRTARRRYTRRKNRICYLQEIFSNEMAKVDDSFFHRLEESFLVEEDKKHERHPIFGNIVDEVAYHEKYPTIYHLRKKLVDSTDKADLRLIYLALAHMIKFRGHFLIEGDLNPDNSDVDKLFIQLVQTYNQLFEENPINASGVDAKAILSARLSKSRRLENLIAQLPGEKKNGLFGNLIALSLGLTPNFKSNFDLAEDAKLQLSKDTYDDDLDNLLAQIGDQYADLFLAAKNLSDAILLSDILRVNTEITKAPLSASMIKRYDEHHQDLTLLKALVRQQLPEKYKEIFFDQSKNGYAGYIDGGASQEEFYKFIKPILEKMDGTEELLVKLNREDLLRKQRTFDNGSIPHQIHLGELHAILRRQEDFYPFLKDNREKIEKILTFRIPYYVGPLARGNSRFAWMTRKSEETITPWNFEEVVDKGASAQSFIERMTNFDKNLPNEKVLPKHSLLYEYFTVYNELTKVKYVTEGMRKPAFLSGEQKKAIVDLLFKTNRKVTVKQLKEDYFKKIECFDSVEISGVEDRFNASLGTYHDLLKIIKDKDFLDNEENEDILEDIVLTLTLFEDREMIEERLKTYAHLFDDKVMKQLKRRRYTGWGRLSRKLINGIRDKQSGKTILDFLKSDGFANRNFMQLIHDDSLTFKEDIQKAQVSGQGDSLHEHIANLAGSPAIKKGILQTVKVVDELVKVMGRHKPENIVIEMARENQTTQKGQKNSRERMKRIEEGIKELGSQILKEHPVENTQLQNEKLYLYYLQNGRDMYVDQELDINRLSDYDVDHIVPQSFLKDDSIDNKVLTRSDKARGKSDNVPSEEVVKKMKNYWRQLLNAKLITQRKFDNLTKAERGGLSELDKAGFIKRQLVETRQITKHVAQILDSRMNTKYDENDKLIREVKVITLKSKLVSDFRKDFQFYKVREINNYHHAHDAYLNAVVGTALIKKYPKLESEFVYGDYKVYDVRKMIAKSEQEIGKATAKYFFYSNIMNFFKTEITLANGEIRKRPLIETNGETGEIVWDKGRDFATVRKVLSMPQVNIVKKTEVQTGGFSKESILPKRNSDKLIARKKDWDPKKYGGFDSPTVAYSVLVVAKVEKGKSKKLKSVKELLGITIMERSSFEKNPIDFLEAKGYKEVKKDLIIKLPKYSLFELENGRKRMLASAGELQKGNELALPSKYVNFLYLASHYEKLKGSPEDNEQKQLFVEQHKHYLDEIIEQISEFSKRVILADANLDKVLSAYNKHRDKPIREQAENIIHLFTLTNLGAPAAFKYFDTTIDRKRYTSTKEVLDATLIHQSITGLYETRIDLSQLGGDGGSGGSSGGSSGSETPGTSESATPESSGGSSGGSSGGVQEISDSRPMLHIYLNGRRFLGLLDTGADKTCIAGRDWPANWPIHQTESSLQGLGMACGVARSSQPLRWQHEDKSGIIHPFVIPTLPFTLWGRDIMKDIKVRLMTDSPDDSQDLMIGAIESNLFADQISWKSDQPVWLNQWPLKQEKLQALQQLVTEQLQLGHLEESNSPWNTPVFVIKKKSGKWRLLQDLRAVNATMHDMGALQPGLPSPVAVPKGWEIIIIDLQDCFFNIKLHPEDCKRFAFSVPSPNFKRPYQRFQWKVLPQGMKNSPTLCQKFVDKAILTVRDKYQDSYIVHYMDDILLAHPSRSIVDEILTSMIQALNKHGLVVSTEKIQKYDNLKYLGTHIQGDSVSYQKLQIRTDKLRTLNDFQKLLGNINWIRPFLKLTTGELKPLFEILNGDSNPISTRKLTPEACKALQLMNERLSTARVKRLDLSQPWSLCILKTEYTPTACLWQDGVVEWIHLPHISPKVITPYDIFCTQLIIKGRHRSKELFSKDPDYIVVPYTKVQFDLLLQEKEDWPISLLGFLGEVHFHLPKDPLLTFTLQTAIIFPHMTSTTPLEKGIVIFTDGSANGRSVTYIQGREPIIKENTQNTAQQAEIVAVITAFEEVSQPFNLYTDSKYVTGLFPEIETATLSPRTKIYTELKHLQRLIHKRQEKFYIGHIRGHTGLPGPLAQGNAYADSLTRILTAAGKRTADGSEFEKRTADGSEFESPKKKAKVE

SEQ ID NO: 3144 - protein, 2116 aa, synthetic construct
MPAAKRVKLDGGDKKYSIGLDIGTNSVGWAVITDEYKVPSKKFKVLGNTDRHSIKKNLIGALLFDSGETAEATRLKRTARRRYTRRKNRICYLQEIFSNEMAKVDDSFFHRLEESFLVEEDKKHERHPIFGNIVDEVAYHEKYPTIYHLRKKLVDSTDKADLRLIYLALAHMIKFRGHFLIEGDLNPDNSDVDKLFIQLVQTYNQLFEENPINASGVDAKAILSARLSKSRRLENLIAQLPGEKKNGLFGNLIALSLGLTPNFKSNFDLAEDAKLQLSKDTYDDDLDNLLAQIGDQYADLFLAAKNLSDAILLSDILRVNTEITKAPLSASMIKRYDEHHQDLTLLKALVRQQLPEKYKEIFFDQSKNGYAGYIDGGASQEEFYKFIKPILEKMDGTEELLVKLNREDLLRKQRTFDNGSIPHQIHLGELHAILRRQEDFYPFLKDNREKIEKILTFRIPYYVGPLARGNSRFAWMTRKSEETITPWNFEEVVDKGASAQSFIERMTNFDKNLPNEKVLPKHSLLYEYFTVYNELTKVKYVTEGMRKPAFLSGEQKKAIVDLLFKTNRKVTVKQLKEDYFKKIECFDSVEISGVEDRFNASLGTYHDLLKIIKDKDFLDNEENEDILEDIVLTLTLFEDREMIEERLKTYAHLFDDKVMKQLKRRRYTGWGRLSRKLINGIRDKQSGKTILDFLKSDGFANRNFMQLIHDDSLTFKEDIQKAQVSGQGDSLHEHIANLAGSPAIKKGILQTVKVVDELVKVMGRHKPENIVIEMARENQTTQKGQKNSRERMKRIEEGIKELGSQILKEHPVENTQLQNEKLYLYYLQNGRDMYVDQELDINRLSDYDVDHIVPQSFLKDDSIDNKVLTRSDKARGKSDNVPSEEVVKKMKNYWRQLLNAKLITQRKFDNLTKAERGGLSELDKAGFIKRQLVETRQITKHVAQILDSRMNTKYDENDKLIREVKVITLKSKLVSDFRKDFQFYKVREINNYHHAHDAYLNAVVGTALIKKYPKLESEFVYGDYKVYDVRKMIAKSEQEIGKATAKYFFYSNIMNFFKTEITLANGEIRKRPLIETNGETGEIVWDKGRDFATVRKVLSMPQVNIVKKTEVQTGGFSKESILPKRNSDKLIARKKDWDPKKYGGFDSPTVAYSVLVVAKVEKGKSKKLKSVKELLGITIMERSSFEKNPIDFLEAKGYKEVKKDLIIKLPKYSLFELENGRKRMLASAGELQKGNELALPSKYVNFLYLASHYEKLKGSPEDNEQKQLFVEQHKHYLDEIIEQISEFSKRVILADANLDKVLSAYNKHRDKPIREQAENIIHLFTLTNLGAPAAFKYFDTTIDRKRYTSTKEVLDATLIHQSITGLYETRIDLSQLGGDGGGGGEAAAKGGSGGVQEISDSRPMLHIYLNGRRFLGLLDTGADKTCIAGRDWPANWPIHQTESSLQGLGMACGVARSSQPLRWQHEDKSGIIHPFVIPTLPFTLWGRDIMKDIKVRLMTDSPDDSQDLMIGAIESNLFADQISWKSDQPVWLNQWPLKQEKLQALQQLVTEQLQLGHLEESNSPWNTPVFVIKKKSGKWRLLQDLRAVNATMHDMGALQPGLPSPVAVPKGWEIIIIDLQDCFFNIKLHPEDCKRFAFSVPSPNFKRPYQRFQWKVLPQGMKNSPTLCQKFVDKAILTVRDKYQDSYIVHYMDDILLAHPSRSIVDEILTSMIQALNKHGLVVSTEKIQKYDNLKYLGTHIQGDSVSYQKLQIRTDKLRTLNDFQKLLGNINWIRPFLKLTTGELKPLFEILNGDSNPISTRKLTPEACKALQLMNERLSTARVKRLDLSQPWSLCILKTEYTPTACLWQDGVVEWIHLPHISPKVITPYDIFCTQLIIKGRHRSKELFSKDPDYIVVPYTKVQFDLLLQEKEDWPISLLGFLGEVHFHLPKDPLLTFTLQTAIIFPHMTSTTPLEKGIVIFTDGSANGRSVTYIQGREPIIKENTQNTAQQAEIVAVITAFEEVSQPFNLYTDSKYVTGLFPEIETATLSPRTKIYTELKHLQRLIHKRQEKFYIGHIRGHTGLPGPLAQGNAYADSLTRILTAAGKRTADGSEFEKRTADGSEFESPKKKAKVE

SEQ ID NO: 3145 - protein, 2113 aa, synthetic construct
MPAAKRVKLDGGDKKYSIGLDIGTNSVGWAVITDEYKVPSKKFKVLGNTDRHSIKKNLIGALLFDSGETAEATRLKRTARRRYTRRKNRICYLQEIFSNEMAKVDDSFFHRLEESFLVEEDKKHERHPIFGNIVDEVAYHEKYPTIYHLRKKLVDSTDKADLRLIYLALAHMIKFRGHFLIEGDLNPDNSDVDKLFIQLVQTYNQLFEENPINASGVDAKAILSARLSKSRRLENLIAQLPGEKKNGLFGNLIALSLGLTPNFKSNFDLAEDAKLQLSKDTYDDDLDNLLAQIGDQYADLFLAAKNLSDAILLSDILRVNTEITKAPLSASMIKRYDEHHQDLTLLKALVRQQLPEKYKEIFFDQSKNGYAGYIDGGASQEEFYKFIKPILEKMDGTEELLVKLNREDLLRKQRTFDNGSIPHQIHLGELHAILRRQEDFYPFLKDNREKIEKILTFRIPYYVGPLARGNSRFAWMTRKSEETITPWNFEEVVDKGASAQSFIERMTNFDKNLPNEKVLPKHSLLYEYFTVYNELTKVKYVTEGMRKPAFLSGEQKKAIVDLLFKTNRKVTVKQLKEDYFKKIECFDSVEISGVEDRFNASLGTYHDLLKIIKDKDFLDNEENEDILEDIVLTLTLFEDREMIEERLKTYAHLFDDKVMKQLKRRRYTGWGRLSRKLINGIRDKQSGKTILDFLKSDGFANRNFMQLIHDDSLTFKEDIQKAQVSGQGDSLHEHIANLAGSPAIKKGILQTVKVVDELVKVMGRHKPENIVIEMARENQTTQKGQKNSRERMKRIEEGIKELGSQILKEHPVENTQLQNEKLYLYYLQNGRDMYVDQELDINRLSDYDVDHIVPQSFLKDDSIDNKVLTRSDKARGKSDNVPSEEVVKKMKNYWRQLLNAKLITQRKFDNLTKAERGGLSELDKAGFIKRQLVETRQITKHVAQILDSRMNTKYDENDKLIREVKVITLKSKLVSDFRKDFQFYKVREINNYHHAHDAYLNAVVGTALIKKYPKLESEFVYGDYKVYDVRKMIAKSEQEIGKATAKYFFYSNIMNFFKTEITLANGEIRKRPLIETNGETGEIVWDKGRDFATVRKVLSMPQVNIVKKTEVQTGGFSKESILPKRNSDKLIARKKDWDPKKYGGFDSPTVAYSVLVVAKVEKGKSKKLKSVKELLGITIMERSSFEKNPIDFLEAKGYKEVKKDLIIKLPKYSLFELENGRKRMLASAGELQKGNELALPSKYVNFLYLASHYEKLKGSPEDNEQKQLFVEQHKHYLDEIIEQISEFSKRVILADANLDKVLSAYNKHRDKPIREQAENIIHLFTLTNLGAPAAFKYFDTTIDRKRYTSTKEVLDATLIHQSITGLYETRIDLSQLGGDGGPAPEAAAKGGVQEISDSRPMLHIYLNGRRFLGLLDTGADKTCIAGRDWPANWPIHQTESSLQGLGMACGVARSSQPLRWQHEDKSGIIHPFVIPTLPFTLWGRDIMKDIKVRLMTDSPDDSQDLMIGAIESNLFADQISWKSDQPVWLNQWPLKQEKLQALQQLVTEQLQLGHLEESNSPWNTPVFVIKKKSGKWRLLQDLRAVNATMHDMGALQPGLPSPVAVPKGWEIIIIDLQDCFFNIKLHPEDCKRFAFSVPSPNFKRPYQRFQWKVLPQGMKNSPTLCQKFVDKAILTVRDKYQDSYIVHYMDDILLAHPSRSIVDEILTSMIQALNKHGLVVSTEKIQKYDNLKYLGTHIQGDSVSYQKLQIRTDKLRTLNDFQKLLGNINWIRPFLKLTTGELKPLFEILNGDSNPISTRKLTPEACKALQLMNERLSTARVKRLDLSQPWSLCILKTEYTPTACLWQDGVVEWIHLPHISPKVITPYDIFCTQLIIKGRHRSKELFSKDPDYIVVPYTKVQFDLLLQEKEDWPISLLGFLGEVHFHLPKDPLLTFTLQTAIIFPHMTSTTPLEKGIVIFTDGSANGRSVTYIQGREPIIKENTQNTAQQAEIVAVITAFEEVSQPFNLYTDSKYVTGLFPEIETATLSPRTKIYTELKHLQRLIHKRQEKFYIGHIRGHTGLPGPLAQGNAYADSLTRILTAAGKRTADGSEFEKRTADGSEFESPKKKAKVE

SEQ ID NO: 3146 - protein, 2116 aa, synthetic construct
MPAAKRVKLDGGDKKYSIGLDIGTNSVGWAVITDEYKVPSKKFKVLGNTDRHSIKKNLIGALLFDSGETAEATRLKRTARRRYTRRKNRICYLQEIFSNEMAKVDDSFFHRLEESFLVEEDKKHERHPIFGNIVDEVAYHEKYPTIYHLRKKLVDSTDKADLRLIYLALAHMIKFRGHFLIEGDLNPDNSDVDKLFIQLVQTYNQLFEENPINASGVDAKAILSARLSKSRRLENLIAQLPGEKKNGLFGNLIALSLGLTPNFKSNFDLAEDAKLQLSKDTYDDDLDNLLAQIGDQYADLFLAAKNLSDAILLSDILRVNTEITKAPLSASMIKRYDEHHQDLTLLKALVRQQLPEKYKEIFFDQSKNGYAGYIDGGASQEEFYKFIKPILEKMDGTEELLVKLNREDLLRKQRTFDNGSIPHQIHLGELHAILRRQEDFYPFLKDNREKIEKILTFRIPYYVGPLARGNSRFAWMTRKSEETITPWNFEEVVDKGASAQSFIERMTNFDKNLPNEKVLPKHSLLYEYFTVYNELTKVKYVTEGMRKPAFLSGEQKKAIVDLLFKTNRKVTVKQLKEDYFKKIECFDSVEISGVEDRFNASLGTYHDLLKIIKDKDFLDNEENEDILEDIVLTLTLFEDREMIEERLKTYAHLFDDKVMKQLKRRRYTGWGRLSRKLINGIRDKQSGKTILDFLKSDGFANRNFMQLIHDDSLTFKEDIQKAQVSGQGDSLHEHIANLAGSPAIKKGILQTVKVVDELVKVMGRHKPENIVIEMARENQTTQKGQKNSRERMKRIEEGIKELGSQILKEHPVENTQLQNEKLYLYYLQNGRDMYVDQELDINRLSDYDVDHIVPQSFLKDDSIDNKVLTRSDKARGKSDNVPSEEVVKKMKNYWRQLLNAKLITQRKFDNLTKAERGGLSELDKAGFIKRQLVETRQITKHVAQILDSRMNTKYDENDKLIREVKVITLKSKLVSDFRKDFQFYKVREINNYHHAHDAYLNAVVGTALIKKYPKLESEFVYGDYKVYDVRKMIAKSEQEIGKATAKYFFYSNIMNFFKTEITLANGEIRKRPLIETNGETGEIVWDKGRDFATVRKVLSMPQVNIVKKTEVQTGGFSKESILPKRNSDKLIARKKDWDPKKYGGFDSPTVAYSVLVVAKVEKGKSKKLKSVKELLGITIMERSSFEKNPIDFLEAKGYKEVKKDLIIKLPKYSLFELENGRKRMLASAGELQKGNELALPSKYVNFLYLASHYEKLKGSPEDNEQKQLFVEQHKHYLDEIIEQISEFSKRVILADANLDKVLSAYNKHRDKPIREQAENIIHLFTLTNLGAPAAFKYFDTTIDRKRYTSTKEVLDATLIHQSITGLYETRIDLSQLGGDGGPAPGGGEAAAKGGVQEISDSRPMLHIYLNGRRFLGLLDTGADKTCIAGRDWPANWPIHQTESSLQGLGMACGVARSSQPLRWQHEDKSGIIHPFVIPTLPFTLWGRDIMKDIKVRLMTDSPDDSQDLMIGAIESNLFADQISWKSDQPVWLNQWPLKQEKLQALQQLVTEQLQLGHLEESNSPWNTPVFVIKKKSGKWRLLQDLRAVNATMHDMGALQPGLPSPVAVPKGWEIIIIDLQDCFFNIKLHPEDCKRFAFSVPSPNFKRPYQRFQWKVLPQGMKNSPTLCQKFVDKAILTVRDKYQDSYIVHYMDDILLAHPSRSIVDEILTSMIQALNKHGLVVSTEKIQKYDNLKYLGTHIQGDSVSYQKLQIRTDKLRTLNDFQKLLGNINWIRPFLKLTTGELKPLFEILNGDSNPISTRKLTPEACKALQLMNERLSTARVKRLDLSQPWSLCILKTEYTPTACLWQDGVVEWIHLPHISPKVITPYDIFCTQLIIKGRHRSKELFSKDPDYIVVPYTKVQFDLLLQEKEDWPISLLGFLGEVHFHLPKDPLLTFTLQTAIIFPHMTSTTPLEKGIVIFTDGSANGRSVTYIQGREPIIKENTQNTAQQAEIVAVITAFEEVSQPFNLYTDSKYVTGLFPEIETATLSPRTKIYTELKHLQRLIHKRQEKFYIGHIRGHTGLPGPLAQGNAYADSLTRILTAAGKRTADGSEFEKRTADGSEFESPKKKAKVE

SEQ ID NO: 3147 - protein, 2116 aa, synthetic construct
MPAAKRVKLDGGDKKYSIGLDIGTNSVGWAVITDEYKVPSKKFKVLGNTDRHSIKKNLIGALLFDSGETAEATRLKRTARRRYTRRKNRICYLQEIFSNEMAKVDDSFFHRLEESFLVEEDKKHERHPIFGNIVDEVAYHEKYPTIYHLRKKLVDSTDKADLRLIYLALAHMIKFRGHFLIEGDLNPDNSDVDKLFIQLVQTYNQLFEENPINASGVDAKAILSARLSKSRRLENLIAQLPGEKKNGLFGNLIALSLGLTPNFKSNFDLAEDAKLQLSKDTYDDDLDNLLAQIGDQYADLFLAAKNLSDAILLSDILRVNTEITKAPLSASMIKRYDEHHQDLTLLKALVRQQLPEKYKEIFFDQSKNGYAGYIDGGASQEEFYKFIKPILEKMDGTEELLVKLNREDLLRKQRTFDNGSIPHQIHLGELHAILRRQEDFYPFLKDNREKIEKILTFRIPYYVGPLARGNSRFAWMTRKSEETITPWNFEEVVDKGASAQSFIERMTNFDKNLPNEKVLPKHSLLYEYFTVYNELTKVKYVTEGMRKPAFLSGEQKKAIVDLLFKTNRKVTVKQLKEDYFKKIECFDSVEISGVEDRFNASLGTYHDLLKIIKDKDFLDNEENEDILEDIVLTLTLFEDREMIEERLKTYAHLFDDKVMKQLKRRRYTGWGRLSRKLINGIRDKQSGKTILDFLKSDGFANRNFMQLIHDDSLTFKEDIQKAQVSGQGDSLHEHIANLAGSPAIKKGILQTVKVVDELVKVMGRHKPENIVIEMARENQTTQKGQKNSRERMKRIEEGIKELGSQILKEHPVENTQLQNEKLYLYYLQNGRDMYVDQELDINRLSDYDVDHIVPQSFLKDDSIDNKVLTRSDKARGKSDNVPSEEVVKKMKNYWRQLLNAKLITQRKFDNLTKAERGGLSELDKAGFIKRQLVETRQITKHVAQILDSRMNTKYDENDKLIREVKVITLKSKLVSDFRKDFQFYKVREINNYHHAHDAYLNAVVGTALIKKYPKLESEFVYGDYKVYDVRKMIAKSEQEIGKATAKYFFYSNIMNFFKTEITLANGEIRKRPLIETNGETGEIVWDKGRDFATVRKVLSMPQVNIVKKTEVQTGGFSKESILPKRNSDKLIARKKDWDPKKYGGFDSPTVAYSVLVVAKVEKGKSKKLKSVKELLGITIMERSSFEKNPIDFLEAKGYKEVKKDLIIKLPKYSLFELENGRKRMLASAGELQKGNELALPSKYVNFLYLASHYEKLKGSPEDNEQKQLFVEQHKHYLDEIIEQISEFSKRVILADANLDKVLSAYNKHRDKPIREQAENIIHLFTLTNLGAPAAFKYFDTTIDRKRYTSTKEVLDATLIHQSITGLYETRIDLSQLGGDGGGSSEAAAKGGGGGVQEISDSRPMLHIYLNGRRFLGLLDTGADKTCIAGRDWPANWPIHQTESSLQGLGMACGVARSSQPLRWQHEDKSGIIHPFVIPTLPFTLWGRDIMKDIKVRLMTDSPDDSQDLMIGAIESNLFADQISWKSDQPVWLNQWPLKQEKLQALQQLVTEQLQLGHLEESNSPWNTPVFVIKKKSGKWRLLQDLRAVNATMHDMGALQPGLPSPVAVPKGWEIIIIDLQDCFFNIKLHPEDCKRFAFSVPSPNFKRPYQRFQWKVLPQGMKNSPTLCQKFVDKAILTVRDKYQDSYIVHYMDDILLAHPSRSIVDEILTSMIQALNKHGLVVSTEKIQKYDNLKYLGTHIQGDSVSYQKLQIRTDKLRTLNDFQKLLGNINWIRPFLKLTTGELKPLFEILNGDSNPISTRKLTPEACKALQLMNERLSTARVKRLDLSQPWSLCILKTEYTPTACLWQDGVVEWIHLPHISPKVITPYDIFCTQLIIKGRHRSKELFSKDPDYIVVPYTKVQFDLLLQEKEDWPISLLGFLGEVHFHLPKDPLLTFTLQTAIIFPHMTSTTPLEKGIVIFTDGSANGRSVTYIQGREPIIKENTQNTAQQAEIVAVITAFEEVSQPFNLYTDSKYVTGLFPEIETATLSPRTKIYTELKHLQRLIHKRQEKFYIGHIRGHTGLPGPLAQGNAYADSLTRILTAAGKRTADGSEFEKRTADGSEFESPKKKAKVE

SEQ ID NO: 3148 - protein, 2116 aa, synthetic construct
MPAAKRVKLDGGDKKYSIGLDIGTNSVGWAVITDEYKVPSKKFKVLGNTDRHSIKKNLIGALLFDSGETAEATRLKRTARRRYTRRKNRICYLQEIFSNEMAKVDDSFFHRLEESFLVEEDKKHERHPIFGNIVDEVAYHEKYPTIYHLRKKLVDSTDKADLRLIYLALAHMIKFRGHFLIEGDLNPDNSDVDKLFIQLVQTYNQLFEENPINASGVDAKAILSARLSKSRRLENLIAQLPGEKKNGLFGNLIALSLGLTPNFKSNFDLAEDAKLQLSKDTYDDDLDNLLAQIGDQYADLFLAAKNLSDAILLSDILRVNTEITKAPLSASMIKRYDEHHQDLTLLKALVRQQLPEKYKEIFFDQSKNGYAGYIDGGASQEEFYKFIKPILEKMDGTEELLVKLNREDLLRKQRTFDNGSIPHQIHLGELHAILRRQEDFYPFLKDNREKIEKILTFRIPYYVGPLARGNSRFAWMTRKSEETITPWNFEEVVDKGASAQSFIERMTNFDKNLPNEKVLPKHSLLYEYFTVYNELTKVKYVTEGMRKPAFLSGEQKKAIVDLLFKTNRKVTVKQLKEDYFKKIECFDSVEISGVEDRFNASLGTYHDLLKIIKDKDFLDNEENEDILEDIVLTLTLFEDREMIEERLKTYAHLFDDKVMKQLKRRRYTGWGRLSRKLINGIRDKQSGKTILDFLKSDGFANRNFMQLIHDDSLTFKEDIQKAQVSGQGDSLHEHIANLAGSPAIKKGILQTVKVVDELVKVMGRHKPENIVIEMARENQTTQKGQKNSRERMKRIEEGIKELGSQILKEHPVENTQLQNEKLYLYYLQNGRDMYVDQELDINRLSDYDVDHIVPQSFLKDDSIDNKVLTRSDKARGKSDNVPSEEVVKKMKNYWRQLLNAKLITQRKFDNLTKAERGGLSELDKAGFIKRQLVETRQITKHVAQILDSRMNTKYDENDKLIREVKVITLKSKLVSDFRKDFQFYKVREINNYHHAHDAYLNAVVGTALIKKYPKLESEFVYGDYKVYDVRKMIAKSEQEIGKATAKYFFYSNIMNFFKTEITLANGEIRKRPLIETNGETGEIVWDKGRDFATVRKVLSMPQVNIVKKTEVQTGGFSKESILPKRNSDKLIARKKDWDPKKYGGFDSPTVAYSVLVVAKVEKGKSKKLKSVKELLGITIMERSSFEKNPIDFLEAKGYKEVKKDLIIKLPKYSLFELENGRKRMLASAGELQKGNELALPSKYVNFLYLASHYEKLKGSPEDNEQKQLFVEQHKHYLDEIIEQISEFSKRVILADANLDKVLSAYNKHRDKPIREQAENIIHLFTLTNLGAPAAFKYFDTTIDRKRYTSTKEVLDATLIHQSITGLYETRIDLSQLGGDGGEAAAKGGSGSSGGVQEISDSRPMLHIYLNGRRFLGLLDTGADKTCIAGRDWPANWPIHQTESSLQGLGMACGVARSSQPLRWQHEDKSGIIHPFVIPTLPFTLWGRDIMKDIKVRLMTDSPDDSQDLMIGAIESNLFADQISWKSDQPVWLNQWPLKQEKLQALQQLVTEQLQLGHLEESNSPWNTPVFVIKKKSGKWRLLQDLRAVNATMHDMGALQPGLPSPVAVPKGWEIIIIDLQDCFFNIKLHPEDCKRFAFSVPSPNFKRPYQRFQWKVLPQGMKNSPTLCQKFVDKAILTVRDKYQDSYIVHYMDDILLAHPSRSIVDEILTSMIQALNKHGLVVSTEKIQKYDNLKYLGTHIQGDSVSYQKLQIRTDKLRTLNDFQKLLGNINWIRPFLKLTTGELKPLFEILNGDSNPISTRKLTPEACKALQLMNERLSTARVKRLDLSQPWSLCILKTEYTPTACLWQDGVVEWIHLPHISPKVITPYDIFCTQLIIKGRHRSKELFSKDPDYIVVPYTKVQFDLLLQEKEDWPISLLGFLGEVHFHLPKDPLLTFTLQTAIIFPHMTSTTPLEKGIVIFTDGSANGRSVTYIQGREPIIKENTQNTAQQAEIVAVITAFEEVSQPFNLYTDSKYVTGLFPEIETATLSPRTKIYTELKHLQRLIHKRQEKFYIGHIRGHTGLPGPLAQGNAYADSLTRILTAAGKRTADGSEFEKRTADGSEFESPKKKAKVE

SEQ ID NO: 3149 - protein, 2116 aa, synthetic construct
MPAAKRVKLDGGDKKYSIGLDIGTNSVGWAVITDEYKVPSKKFKVLGNTDRHSIKKNLIGALLFDSGETAEATRLKRTARRRYTRRKNRICYLQEIFSNEMAKVDDSFFHRLEESFLVEEDKKHERHPIFGNIVDEVAYHEKYPTIYHLRKKLVDSTDKADLRLIYLALAHMIKFRGHFLIEGDLNPDNSDVDKLFIQLVQTYNQLFEENPINASGVDAKAILSARLSKSRRLENLIAQLPGEKKNGLFGNLIALSLGLTPNFKSNFDLAEDAKLQLSKDTYDDDLDNLLAQIGDQYADLFLAAKNLSDAILLSDILRVNTEITKAPLSASMIKRYDEHHQDLTLLKALVRQQLPEKYKEIFFDQSKNGYAGYIDGGASQEEFYKFIKPILEKMDGTEELLVKLNREDLLRKQRTFDNGSIPHQIHLGELHAILRRQEDFYPFLKDNREKIEKILTFRIPYYVGPLARGNSRFAWMTRKSEETITPWNFEEVVDKGASAQSFIERMTNFDKNLPNEKVLPKHSLLYEYFTVYNELTKVKYVTEGMRKPAFLSGEQKKAIVDLLFKTNRKVTVKQLKEDYFKKIECFDSVEISGVEDRFNASLGTYHDLLKIIKDKDFLDNEENEDILEDIVLTLTLFEDREMIEERLKTYAHLFDDKVMKQLKRRRYTGWGRLSRKLINGIRDKQSGKTILDFLKSDGFANRNFMQLIHDDSLTFKEDIQKAQVSGQGDSLHEHIANLAGSPAIKKGILQTVKVVDELVKVMGRHKPENIVIEMARENQTTQKGQKNSRERMKRIEEGIKELGSQILKEHPVENTQLQNEKLYLYYLQNGRDMYVDQELDINRLSDYDVDHIVPQSFLKDDSIDNKVLTRSDKARGKSDNVPSEEVVKKMKNYWRQLLNAKLITQRKFDNLTKAERGGLSELDKAGFIKRQLVETRQITKHVAQILDSRMNTKYDENDKLIREVKVITLKSKLVSDFRKDFQFYKVREINNYHHAHDAYLNAVVGTALIKKYPKLESEFVYGDYKVYDVRKMIAKSEQEIGKATAKYFFYSNIMNFFKTEITLANGEIRKRPLIETNGETGEIVWDKGRDFATVRKVLSMPQVNIVKKTEVQTGGFSKESILPKRNSDKLIARKKDWDPKKYGGFDSPTVAYSVLVVAKVEKGKSKKLKSVKELLGITIMERSSFEKNPIDFLEAKGYKEVKKDLIIKLPKYSLFELENGRKRMLASAGELQKGNELALPSKYVNFLYLASHYEKLKGSPEDNEQKQLFVEQHKHYLDEIIEQISEFSKRVILADANLDKVLSAYNKHRDKPIREQAENIIHLFTLTNLGAPAAFKYFDTTIDRKRYTSTKEVLDATLIHQSITGLYETRIDLSQLGGDGGGSSPAPEAAAKGGVQEISDSRPMLHIYLNGRRFLGLLDTGADKTCIAGRDWPANWPIHQTESSLQGLGMACGVARSSQPLRWQHEDKSGIIHPFVIPTLPFTLWGRDIMKDIKVRLMTDSPDDSQDLMIGAIESNLFADQISWKSDQPVWLNQWPLKQEKLQALQQLVTEQLQLGHLEESNSPWNTPVFVIKKKSGKWRLLQDLRAVNATMHDMGALQPGLPSPVAVPKGWEIIIIDLQDCFFNIKLHPEDCKRFAFSVPSPNFKRPYQRFQWKVLPQGMKNSPTLCQKFVDKAILTVRDKYQDSYIVHYMDDILLAHPSRSIVDEILTSMIQALNKHGLVVSTEKIQKYDNLKYLGTHIQGDSVSYQKLQIRTDKLRTLNDFQKLLGNINWIRPFLKLTTGELKPLFEILNGDSNPISTRKLTPEACKALQLMNERLSTARVKRLDLSQPWSLCILKTEYTPTACLWQDGVVEWIHLPHISPKVITPYDIFCTQLIIKGRHRSKELFSKDPDYIVVPYTKVQFDLLLQEKEDWPISLLGFLGEVHFHLPKDPLLTFTLQTAIIFPHMTSTTPLEKGIVIFTDGSANGRSVTYIQGREPIIKENTQNTAQQAEIVAVITAFEEVSQPFNLYTDSKYVTGLFPEIETATLSPRTKIYTELKHLQRLIHKRQEKFYIGHIRGHTGLPGPLAQGNAYADSLTRILTAAGKRTADGSEFEKRTADGSEFESPKKKAKVE

SEQ ID NO: 3150 - protein, 2114 aa, synthetic construct
MPAAKRVKLDGGDKKYSIGLDIGTNSVGWAVITDEYKVPSKKFKVLGNTDRHSIKKNLIGALLFDSGETAEATRLKRTARRRYTRRKNRICYLQEIFSNEMAKVDDSFFHRLEESFLVEEDKKHERHPIFGNIVDEVAYHEKYPTIYHLRKKLVDSTDKADLRLIYLALAHMIKFRGHFLIEGDLNPDNSDVDKLFIQLVQTYNQLFEENPINASGVDAKAILSARLSKSRRLENLIAQLPGEKKNGLFGNLIALSLGLTPNFKSNFDLAEDAKLQLSKDTYDDDLDNLLAQIGDQYADLFLAAKNLSDAILLSDILRVNTEITKAPLSASMIKRYDEHHQDLTLLKALVRQQLPEKYKEIFFDQSKNGYAGYIDGGASQEEFYKFIKPILEKMDGTEELLVKLNREDLLRKQRTFDNGSIPHQIHLGELHAILRRQEDFYPFLKDNREKIEKILTFRIPYYVGPLARGNSRFAWMTRKSEETITPWNFEEVVDKGASAQSFIERMTNFDKNLPNEKVLPKHSLLYEYFTVYNELTKVKYVTEGMRKPAFLSGEQKKAIVDLLFKTNRKVTVKQLKEDYFKKIECFDSVEISGVEDRFNASLGTYHDLLKIIKDKDFLDNEENEDILEDIVLTLTLFEDREMIEERLKTYAHLFDDKVMKQLKRRRYTGWGRLSRKLINGIRDKQSGKTILDFLKSDGFANRNFMQLIHDDSLTFKEDIQKAQVSGQGDSLHEHIANLAGSPAIKKGILQTVKVVDELVKVMGRHKPENIVIEMARENQTTQKGQKNSRERMKRIEEGIKELGSQILKEHPVENTQLQNEKLYLYYLQNGRDMYVDQELDINRLSDYDVDHIVPQSFLKDDSIDNKVLTRSDKARGKSDNVPSEEVVKKMKNYWRQLLNAKLITQRKFDNLTKAERGGLSELDKAGFIKRQLVETRQITKHVAQILDSRMNTKYDENDKLIREVKVITLKSKLVSDFRKDFQFYKVREINNYHHAHDAYLNAVVGTALIKKYPKLESEFVYGDYKVYDVRKMIAKSEQEIGKATAKYFFYSNIMNFFKTEITLANGEIRKRPLIETNGETGEIVWDKGRDFATVRKVLSMPQVNIVKKTEVQTGGFSKESILPKRNSDKLIARKKDWDPKKYGGFDSPTVAYSVLVVAKVEKGKSKKLKSVKELLGITIMERSSFEKNPIDFLEAKGYKEVKKDLIIKLPKYSLFELENGRKRMLASAGELQKGNELALPSKYVNFLYLASHYEKLKGSPEDNEQKQLFVEQHKHYLDEIIEQISEFSKRVILADANLDKVLSAYNKHRDKPIREQAENIIHLFTLTNLGAPAAFKYFDTTIDRKRYTSTKEVLDATLIHQSITGLYETRIDLSQLGGDGGGGSGSSPAPGGVQEISDSRPMLHIYLNGRRFLGLLDTGADKTCIAGRDWPANWPIHQTESSLQGLGMACGVARSSQPLRWQHEDKSGIIHPFVIPTLPFTLWGRDIMKDIKVRLMTDSPDDSQDLMIGAIESNLFADQISWKSDQPVWLNQWPLKQEKLQALQQLVTEQLQLGHLEESNSPWNTPVFVIKKKSGKWRLLQDLRAVNATMHDMGALQPGLPSPVAVPKGWEIIIIDLQDCFFNIKLHPEDCKRFAFSVPSPNFKRPYQRFQWKVLPQGMKNSPTLCQKFVDKAILTVRDKYQDSYIVHYMDDILLAHPSRSIVDEILTSMIQALNKHGLVVSTEKIQKYDNLKYLGTHIQGDSVSYQKLQIRTDKLRTLNDFQKLLGNINWIRPFLKLTTGELKPLFEILNGDSNPISTRKLTPEACKALQLMNERLSTARVKRLDLSQPWSLCILKTEYTPTACLWQDGVVEWIHLPHISPKVITPYDIFCTQLIIKGRHRSKELFSKDPDYIVVPYTKVQFDLLLQEKEDWPISLLGFLGEVHFHLPKDPLLTFTLQTAIIFPHMTSTTPLEKGIVIFTDGSANGRSVTYIQGREPIIKENTQNTAQQAEIVAVITAFEEVSQPFNLYTDSKYVTGLFPEIETATLSPRTKIYTELKHLQRLIHKRQEKFYIGHIRGHTGLPGPLAQGNAYADSLTRILTAAGKRTADGSEFEKRTADGSEFESPKKKAKVE

SEQ ID NO: 3151 - protein, 2120 aa, synthetic construct
MPAAKRVKLDGGDKKYSIGLDIGTNSVGWAVITDEYKVPSKKFKVLGNTDRHSIKKNLIGALLFDSGETAEATRLKRTARRRYTRRKNRICYLQEIFSNEMAKVDDSFFHRLEESFLVEEDKKHERHPIFGNIVDEVAYHEKYPTIYHLRKKLVDSTDKADLRLIYLALAHMIKFRGHFLIEGDLNPDNSDVDKLFIQLVQTYNQLFEENPINASGVDAKAILSARLSKSRRLENLIAQLPGEKKNGLFGNLIALSLGLTPNFKSNFDLAEDAKLQLSKDTYDDDLDNLLAQIGDQYADLFLAAKNLSDAILLSDILRVNTEITKAPLSASMIKRYDEHHQDLTLLKALVRQQLPEKYKEIFFDQSKNGYAGYIDGGASQEEFYKFIKPILEKMDGTEELLVKLNREDLLRKQRTFDNGSIPHQIHLGELHAILRRQEDFYPFLKDNREKIEKILTFRIPYYVGPLARGNSRFAWMTRKSEETITPWNFEEVVDKGASAQSFIERMTNFDKNLPNEKVLPKHSLLYEYFTVYNELTKVKYVTEGMRKPAFLSGEQKKAIVDLLFKTNRKVTVKQLKEDYFKKIECFDSVEISGVEDRFNASLGTYHDLLKIIKDKDFLDNEENEDILEDIVLTLTLFEDREMIEERLKTYAHLFDDKVMKQLKRRRYTGWGRLSRKLINGIRDKQSGKTILDFLKSDGFANRNFMQLIHDDSLTFKEDIQKAQVSGQGDSLHEHIANLAGSPAIKKGILQTVKVVDELVKVMGRHKPENIVIEMARENQTTQKGQKNSRERMKRIEEGIKELGSQILKEHPVENTQLQNEKLYLYYLQNGRDMYVDQELDINRLSDYDVDHIVPQSFLKDDSIDNKVLTRSDKARGKSDNVPSEEVVKKMKNYWRQLLNAKLITQRKFDNLTKAERGGLSELDKAGFIKRQLVETRQITKHVAQILDSRMNTKYDENDKLIREVKVITLKSKLVSDFRKDFQFYKVREINNYHHAHDAYLNAVVGTALIKKYPKLESEFVYGDYKVYDVRKMIAKSEQEIGKATAKYFFYSNIMNFFKTEITLANGEIRKRPLIETNGETGEIVWDKGRDFATVRKVLSMPQVNIVKKTEVQTGGFSKESILPKRNSDKLIARKKDWDPKKYGGFDSPTVAYSVLVVAKVEKGKSKKLKSVKELLGITIMERSSFEKNPIDFLEAKGYKEVKKDLIIKLPKYSLFELENGRKRMLASAGELQKGNELALPSKYVNFLYLASHYEKLKGSPEDNEQKQLFVEQHKHYLDEIIEQISEFSKRVILADANLDKVLSAYNKHRDKPIREQAENIIHLFTLTNLGAPAAFKYFDTTIDRKRYTSTKEVLDATLIHQSITGLYETRIDLSQLGGDGGEAAAKGGGGSEAAAKGGVQEISDSRPMLHIYLNGRRFLGLLDTGADKTCIAGRDWPANWPIHQTESSLQGLGMACGVARSSQPLRWQHEDKSGIIHPFVIPTLPFTLWGRDIMKDIKVRLMTDSPDDSQDLMIGAIESNLFADQISWKSDQPVWLNQWPLKQEKLQALQQLVTEQLQLGHLEESNSPWNTPVFVIKKKSGKWRLLQDLRAVNATMHDMGALQPGLPSPVAVPKGWEIIIIDLQDCFFNIKLHPEDCKRFAFSVPSPNFKRPYQRFQWKVLPQGMKNSPTLCQKFVDKAILTVRDKYQDSYIVHYMDDILLAHPSRSIVDEILTSMIQALNKHGLVVSTEKIQKYDNLKYLGTHIQGDSVSYQKLQIRTDKLRTLNDFQKLLGNINWIRPFLKLTTGELKPLFEILNGDSNPISTRKLTPEACKALQLMNERLSTARVKRLDLSQPWSLCILKTEYTPTACLWQDGVVEWIHLPHISPKVITPYDIFCTQLIIKGRHRSKELFSKDPDYIVVPYTKVQFDLLLQEKEDWPISLLGFLGEVHFHLPKDPLLTFTLQTAIIFPHMTSTTPLEKGIVIFTDGSANGRSVTYIQGREPIIKENTQNTAQQAEIVAVITAFEEVSQPFNLYTDSKYVTGLFPEIETATLSPRTKIYTELKHLQRLIHKRQEKFYIGHIRGHTGLPGPLAQGNAYADSLTRILTAAGKRTADGSEFEKRTADGSEFESPKKKAKVE

SEQ ID NO: 3152 - protein, 2116 aa, synthetic construct
MPAAKRVKLDGGDKKYSIGLDIGTNSVGWAVITDEYKVPSKKFKVLGNTDRHSIKKNLIGALLFDSGETAEATRLKRTARRRYTRRKNRICYLQEIFSNEMAKVDDSFFHRLEESFLVEEDKKHERHPIFGNIVDEVAYHEKYPTIYHLRKKLVDSTDKADLRLIYLALAHMIKFRGHFLIEGDLNPDNSDVDKLFIQLVQTYNQLFEENPINASGVDAKAILSARLSKSRRLENLIAQLPGEKKNGLFGNLIALSLGLTPNFKSNFDLAEDAKLQLSKDTYDDDLDNLLAQIGDQYADLFLAAKNLSDAILLSDILRVNTEITKAPLSASMIKRYDEHHQDLTLLKALVRQQLPEKYKEIFFDQSKNGYAGYIDGGASQEEFYKFIKPILEKMDGTEELLVKLNREDLLRKQRTFDNGSIPHQIHLGELHAILRRQEDFYPFLKDNREKIEKILTFRIPYYVGPLARGNSRFAWMTRKSEETITPWNFEEVVDKGASAQSFIERMTNFDKNLPNEKVLPKHSLLYEYFTVYNELTKVKYVTEGMRKPAFLSGEQKKAIVDLLFKTNRKVTVKQLKEDYFKKIECFDSVEISGVEDRFNASLGTYHDLLKIIKDKDFLDNEENEDILEDIVLTLTLFEDREMIEERLKTYAHLFDDKVMKQLKRRRYTGWGRLSRKLINGIRDKQSGKTILDFLKSDGFANRNFMQLIHDDSLTFKEDIQKAQVSGQGDSLHEHIANLAGSPAIKKGILQTVKVVDELVKVMGRHKPENIVIEMARENQTTQKGQKNSRERMKRIEEGIKELGSQILKEHPVENTQLQNEKLYLYYLQNGRDMYVDQELDINRLSDYDVDHIVPQSFLKDDSIDNKVLTRSDKARGKSDNVPSEEVVKKMKNYWRQLLNAKLITQRKFDNLTKAERGGLSELDKAGFIKRQLVETRQITKHVAQILDSRMNTKYDENDKLIREVKVITLKSKLVSDFRKDFQFYKVREINNYHHAHDAYLNAVVGTALIKKYPKLESEFVYGDYKVYDVRKMIAKSEQEIGKATAKYFFYSNIMNFFKTEITLANGEIRKRPLIETNGETGEIVWDKGRDFATVRKVLSMPQVNIVKKTEVQTGGFSKESILPKRNSDKLIARKKDWDPKKYGGFDSPTVAYSVLVVAKVEKGKSKKLKSVKELLGITIMERSSFEKNPIDFLEAKGYKEVKKDLIIKLPKYSLFELENGRKRMLASAGELQKGNELALPSKYVNFLYLASHYEKLKGSPEDNEQKQLFVEQHKHYLDEIIEQISEFSKRVILADANLDKVLSAYNKHRDKPIREQAENIIHLFTLTNLGAPAAFKYFDTTIDRKRYTSTKEVLDATLIHQSITGLYETRIDLSQLGGDGGPAPEAAAKGSSGGVQEISDSRPMLHIYLNGRRFLGLLDTGADKTCIAGRDWPANWPIHQTESSLQGLGMACGVARSSQPLRWQHEDKSGIIHPFVIPTLPFTLWGRDIMKDIKVRLMTDSPDDSQDLMIGAIESNLFADQISWKSDQPVWLNQWPLKQEKLQALQQLVTEQLQLGHLEESNSPWNTPVFVIKKKSGKWRLLQDLRAVNATMHDMGALQPGLPSPVAVPKGWEIIIIDLQDCFFNIKLHPEDCKRFAFSVPSPNFKRPYQRFQWKVLPQGMKNSPTLCQKFVDKAILTVRDKYQDSYIVHYMDDILLAHPSRSIVDEILTSMIQALNKHGLVVSTEKIQKYDNLKYLGTHIQGDSVSYQKLQIRTDKLRTLNDFQKLLGNINWIRPFLKLTTGELKPLFEILNGDSNPISTRKLTPEACKALQLMNERLSTARVKRLDLSQPWSLCILKTEYTPTACLWQDGVVEWIHLPHISPKVITPYDIFCTQLIIKGRHRSKELFSKDPDYIVVPYTKVQFDLLLQEKEDWPISLLGFLGEVHFHLPKDPLLTFTLQTAIIFPHMTSTTPLEKGIVIFTDGSANGRSVTYIQGREPIIKENTQNTAQQAEIVAVITAFEEVSQPFNLYTDSKYVTGLFPEIETATLSPRTKIYTELKHLQRLIHKRQEKFYIGHIRGHTGLPGPLAQGNAYADSLTRILTAAGKRTADGSEFEKRTADGSEFESPKKKAKVE

SEQ ID NO: 3153 - protein, 2121 aa, synthetic construct
MPAAKRVKLDGGDKKYSIGLDIGTNSVGWAVITDEYKVPSKKFKVLGNTDRHSIKKNLIGALLFDSGETAEATRLKRTARRRYTRRKNRICYLQEIFSNEMAKVDDSFFHRLEESFLVEEDKKHERHPIFGNIVDEVAYHEKYPTIYHLRKKLVDSTDKADLRLIYLALAHMIKFRGHFLIEGDLNPDNSDVDKLFIQLVQTYNQLFEENPINASGVDAKAILSARLSKSRRLENLIAQLPGEKKNGLFGNLIALSLGLTPNFKSNFDLAEDAKLQLSKDTYDDDLDNLLAQIGDQYADLFLAAKNLSDAILLSDILRVNTEITKAPLSASMIKRYDEHHQDLTLLKALVRQQLPEKYKEIFFDQSKNGYAGYIDGGASQEEFYKFIKPILEKMDGTEELLVKLNREDLLRKQRTFDNGSIPHQIHLGELHAILRRQEDFYPFLKDNREKIEKILTFRIPYYVGPLARGNSRFAWMTRKSEETITPWNFEEVVDKGASAQSFIERMTNFDKNLPNEKVLPKHSLLYEYFTVYNELTKVKYVTEGMRKPAFLSGEQKKAIVDLLFKTNRKVTVKQLKEDYFKKIECFDSVEISGVEDRFNASLGTYHDLLKIIKDKDFLDNEENEDILEDIVLTLTLFEDREMIEERLKTYAHLFDDKVMKQLKRRRYTGWGRLSRKLINGIRDKQSGKTILDFLKSDGFANRNFMQLIHDDSLTFKEDIQKAQVSGQGDSLHEHIANLAGSPAIKKGILQTVKVVDELVKVMGRHKPENIVIEMARENQTTQKGQKNSRERMKRIEEGIKELGSQILKEHPVENTQLQNEKLYLYYLQNGRDMYVDQELDINRLSDYDVDHIVPQSFLKDDSIDNKVLTRSDKARGKSDNVPSEEVVKKMKNYWRQLLNAKLITQRKFDNLTKAERGGLSELDKAGFIKRQLVETRQITKHVAQILDSRMNTKYDENDKLIREVKVITLKSKLVSDFRKDFQFYKVREINNYHHAHDAYLNAVVGTALIKKYPKLESEFVYGDYKVYDVRKMIAKSEQEIGKATAKYFFYSNIMNFFKTEITLANGEIRKRPLIETNGETGEIVWDKGRDFATVRKVLSMPQVNIVKKTEVQTGGFSKESILPKRNSDKLIARKKDWDPKKYGGFDSPTVAYSVLVVAKVEKGKSKKLKSVKELLGITIMERSSFEKNPIDFLEAKGYKEVKKDLIIKLPKYSLFELENGRKRMLASAGELQKGNELALPSKYVNFLYLASHYEKLKGSPEDNEQKQLFVEQHKHYLDEIIEQISEFSKRVILADANLDKVLSAYNKHRDKPIREQAENIIHLFTLTNLGAPAAFKYFDTTIDRKRYTSTKEVLDATLIHQSITGLYETRIDLSQLGGDGGSGSETPGTSESATPESGGVQEISDSRPMLHIYLNGRRFLGLLDTGADKTCIAGRDWPANWPIHQTESSLQGLGMACGVARSSQPLRWQHEDKSGIIHPFVIPTLPFTLWGRDIMKDIKVRLMTDSPDDSQDLMIGAIESNLFADQISWKSDQPVWLNQWPLKQEKLQALQQLVTEQLQLGHLEESNSPWNTPVFVIKKKSGKWRLLQDLRAVNATMHDMGALQPGLPSPVAVPKGWEIIIIDLQDCFFNIKLHPEDCKRFAFSVPSPNFKRPYQRFQWKVLPQGMKNSPTLCQKFVDKAILTVRDKYQDSYIVHYMDDILLAHPSRSIVDEILTSMIQALNKHGLVVSTEKIQKYDNLKYLGTHIQGDSVSYQKLQIRTDKLRTLNDFQKLLGNINWIRPFLKLTTGELKPLFEILNGDSNPISTRKLTPEACKALQLMNERLSTARVKRLDLSQPWSLCILKTEYTPTACLWQDGVVEWIHLPHISPKVITPYDIFCTQLIIKGRHRSKELFSKDPDYIVVPYTKVQFDLLLQEKEDWPISLLGFLGEVHFHLPKDPLLTFTLQTAIIFPHMTSTTPLEKGIVIFTDGSANGRSVTYIQGREPIIKENTQNTAQQAEIVAVITAFEEVSQPFNLYTDSKYVTGLFPEIETATLSPRTKIYTELKHLQRLIHKRQEKFYIGHIRGHTGLPGPLAQGNAYADSLTRILTAAGKRTADGSEFEKRTADGSEFESPKKKAKVE

SEQ ID NO: 3154 - protein, 2116 aa, synthetic construct
MPAAKRVKLDGGDKKYSIGLDIGTNSVGWAVITDEYKVPSKKFKVLGNTDRHSIKKNLIGALLFDSGETAEATRLKRTARRRYTRRKNRICYLQEIFSNEMAKVDDSFFHRLEESFLVEEDKKHERHPIFGNIVDEVAYHEKYPTIYHLRKKLVDSTDKADLRLIYLALAHMIKFRGHFLIEGDLNPDNSDVDKLFIQLVQTYNQLFEENPINASGVDAKAILSARLSKSRRLENLIAQLPGEKKNGLFGNLIALSLGLTPNFKSNFDLAEDAKLQLSKDTYDDDLDNLLAQIGDQYADLFLAAKNLSDAILLSDILRVNTEITKAPLSASMIKRYDEHHQDLTLLKALVRQQLPEKYKEIFFDQSKNGYAGYIDGGASQEEFYKFIKPILEKMDGTEELLVKLNREDLLRKQRTFDNGSIPHQIHLGELHAILRRQEDFYPFLKDNREKIEKILTFRIPYYVGPLARGNSRFAWMTRKSEETITPWNFEEVVDKGASAQSFIERMTNFDKNLPNEKVLPKHSLLYEYFTVYNELTKVKYVTEGMRKPAFLSGEQKKAIVDLLFKTNRKVTVKQLKEDYFKKIECFDSVEISGVEDRFNASLGTYHDLLKIIKDKDFLDNEENEDILEDIVLTLTLFEDREMIEERLKTYAHLFDDKVMKQLKRRRYTGWGRLSRKLINGIRDKQSGKTILDFLKSDGFANRNFMQLIHDDSLTFKEDIQKAQVSGQGDSLHEHIANLAGSPAIKKGILQTVKVVDELVKVMGRHKPENIVIEMARENQTTQKGQKNSRERMKRIEEGIKELGSQILKEHPVENTQLQNEKLYLYYLQNGRDMYVDQELDINRLSDYDVDHIVPQSFLKDDSIDNKVLTRSDKARGKSDNVPSEEVVKKMKNYWRQLLNAKLITQRKFDNLTKAERGGLSELDKAGFIKRQLVETRQITKHVAQILDSRMNTKYDENDKLIREVKVITLKSKLVSDFRKDFQFYKVREINNYHHAHDAYLNAVVGTALIKKYPKLESEFVYGDYKVYDVRKMIAKSEQEIGKATAKYFFYSNIMNFFKTEITLANGEIRKRPLIETNGETGEIVWDKGRDFATVRKVLSMPQVNIVKKTEVQTGGFSKESILPKRNSDKLIARKKDWDPKKYGGFDSPTVAYSVLVVAKVEKGKSKKLKSVKELLGITIMERSSFEKNPIDFLEAKGYKEVKKDLIIKLPKYSLFELENGRKRMLASAGELQKGNELALPSKYVNFLYLASHYEKLKGSPEDNEQKQLFVEQHKHYLDEIIEQISEFSKRVILADANLDKVLSAYNKHRDKPIREQAENIIHLFTLTNLGAPAAFKYFDTTIDRKRYTSTKEVLDATLIHQSITGLYETRIDLSQLGGDGGGGSEAAAKGGGGGVQEISDSRPMLHIYLNGRRFLGLLDTGADKTCIAGRDWPANWPIHQTESSLQGLGMACGVARSSQPLRWQHEDKSGIIHPFVIPTLPFTLWGRDIMKDIKVRLMTDSPDDSQDLMIGAIESNLFADQISWKSDQPVWLNQWPLKQEKLQALQQLVTEQLQLGHLEESNSPWNTPVFVIKKKSGKWRLLQDLRAVNATMHDMGALQPGLPSPVAVPKGWEIIIIDLQDCFFNIKLHPEDCKRFAFSVPSPNFKRPYQRFQWKVLPQGMKNSPTLCQKFVDKAILTVRDKYQDSYIVHYMDDILLAHPSRSIVDEILTSMIQALNKHGLVVSTEKIQKYDNLKYLGTHIQGDSVSYQKLQIRTDKLRTLNDFQKLLGNINWIRPFLKLTTGELKPLFEILNGDSNPISTRKLTPEACKALQLMNERLSTARVKRLDLSQPWSLCILKTEYTPTACLWQDGVVEWIHLPHISPKVITPYDIFCTQLIIKGRHRSKELFSKDPDYIVVPYTKVQFDLLLQEKEDWPISLLGFLGEVHFHLPKDPLLTFTLQTAIIFPHMTSTTPLEKGIVIFTDGSANGRSVTYIQGREPIIKENTQNTAQQAEIVAVITAFEEVSQPFNLYTDSKYVTGLFPEIETATLSPRTKIYTELKHLQRLIHKRQEKFYIGHIRGHTGLPGPLAQGNAYADSLTRILTAAGKRTADGSEFEKRTADGSEFESPKKKAKVE

SEQ ID NO: 3155 - protein, 2114 aa, synthetic construct
MPAAKRVKLDGGDKKYSIGLDIGTNSVGWAVITDEYKVPSKKFKVLGNTDRHSIKKNLIGALLFDSGETAEATRLKRTARRRYTRRKNRICYLQEIFSNEMAKVDDSFFHRLEESFLVEEDKKHERHPIFGNIVDEVAYHEKYPTIYHLRKKLVDSTDKADLRLIYLALAHMIKFRGHFLIEGDLNPDNSDVDKLFIQLVQTYNQLFEENPINASGVDAKAILSARLSKSRRLENLIAQLPGEKKNGLFGNLIALSLGLTPNFKSNFDLAEDAKLQLSKDTYDDDLDNLLAQIGDQYADLFLAAKNLSDAILLSDILRVNTEITKAPLSASMIKRYDEHHQDLTLLKALVRQQLPEKYKEIFFDQSKNGYAGYIDGGASQEEFYKFIKPILEKMDGTEELLVKLNREDLLRKQRTFDNGSIPHQIHLGELHAILRRQEDFYPFLKDNREKIEKILTFRIPYYVGPLARGNSRFAWMTRKSEETITPWNFEEVVDKGASAQSFIERMTNFDKNLPNEKVLPKHSLLYEYFTVYNELTKVKYVTEGMRKPAFLSGEQKKAIVDLLFKTNRKVTVKQLKEDYFKKIECFDSVEISGVEDRFNASLGTYHDLLKIIKDKDFLDNEENEDILEDIVLTLTLFEDREMIEERLKTYAHLFDDKVMKQLKRRRYTGWGRLSRKLINGIRDKQSGKTILDFLKSDGFANRNFMQLIHDDSLTFKEDIQKAQVSGQGDSLHEHIANLAGSPAIKKGILQTVKVVDELVKVMGRHKPENIVIEMARENQTTQKGQKNSRERMKRIEEGIKELGSQILKEHPVENTQLQNEKLYLYYLQNGRDMYVDQELDINRLSDYDVDHIVPQSFLKDDSIDNKVLTRSDKARGKSDNVPSEEVVKKMKNYWRQLLNAKLITQRKFDNLTKAERGGLSELDKAGFIKRQLVETRQITKHVAQILDSRMNTKYDENDKLIREVKVITLKSKLVSDFRKDFQFYKVREINNYHHAHDAYLNAVVGTALIKKYPKLESEFVYGDYKVYDVRKMIAKSEQEIGKATAKYFFYSNIMNFFKTEITLANGEIRKRPLIETNGETGEIVWDKGRDFATVRKVLSMPQVNIVKKTEVQTGGFSKESILPKRNSDKLIARKKDWDPKKYGGFDSPTVAYSVLVVAKVEKGKSKKLKSVKELLGITIMERSSFEKNPIDFLEAKGYKEVKKDLIIKLPKYSLFELENGRKRMLASAGELQKGNELALPSKYVNFLYLASHYEKLKGSPEDNEQKQLFVEQHKHYLDEIIEQISEFSKRVILADANLDKVLSAYNKHRDKPIREQAENIIHLFTLTNLGAPAAFKYFDTTIDRKRYTSTKEVLDATLIHQSITGLYETRIDLSQLGGDGGPAPGGSGSSGGVQEISDSRPMLHIYLNGRRFLGLLDTGADKTCIAGRDWPANWPIHQTESSLQGLGMACGVARSSQPLRWQHEDKSGIIHPFVIPTLPFTLWGRDIMKDIKVRLMTDSPDDSQDLMIGAIESNLFADQISWKSDQPVWLNQWPLKQEKLQALQQLVTEQLQLGHLEESNSPWNTPVFVIKKKSGKWRLLQDLRAVNATMHDMGALQPGLPSPVAVPKGWEIIIIDLQDCFFNIKLHPEDCKRFAFSVPSPNFKRPYQRFQWKVLPQGMKNSPTLCQKFVDKAILTVRDKYQDSYIVHYMDDILLAHPSRSIVDEILTSMIQALNKHGLVVSTEKIQKYDNLKYLGTHIQGDSVSYQKLQIRTDKLRTLNDFQKLLGNINWIRPFLKLTTGELKPLFEILNGDSNPISTRKLTPEACKALQLMNERLSTARVKRLDLSQPWSLCILKTEYTPTACLWQDGVVEWIHLPHISPKVITPYDIFCTQLIIKGRHRSKELFSKDPDYIVVPYTKVQFDLLLQEKEDWPISLLGFLGEVHFHLPKDPLLTFTLQTAIIFPHMTSTTPLEKGIVIFTDGSANGRSVTYIQGREPIIKENTQNTAQQAEIVAVITAFEEVSQPFNLYTDSKYVTGLFPEIETATLSPRTKIYTELKHLQRLIHKRQEKFYIGHIRGHTGLPGPLAQGNAYADSLTRILTAAGKRTADGSEFEKRTADGSEFESPKKKAKVE

SEQ ID NO: 3156 - protein, 2116 aa, synthetic construct
MPAAKRVKLDGGDKKYSIGLDIGTNSVGWAVITDEYKVPSKKFKVLGNTDRHSIKKNLIGALLFDSGETAEATRLKRTARRRYTRRKNRICYLQEIFSNEMAKVDDSFFHRLEESFLVEEDKKHERHPIFGNIVDEVAYHEKYPTIYHLRKKLVDSTDKADLRLIYLALAHMIKFRGHFLIEGDLNPDNSDVDKLFIQLVQTYNQLFEENPINASGVDAKAILSARLSKSRRLENLIAQLPGEKKNGLFGNLIALSLGLTPNFKSNFDLAEDAKLQLSKDTYDDDLDNLLAQIGDQYADLFLAAKNLSDAILLSDILRVNTEITKAPLSASMIKRYDEHHQDLTLLKALVRQQLPEKYKEIFFDQSKNGYAGYIDGGASQEEFYKFIKPILEKMDGTEELLVKLNREDLLRKQRTFDNGSIPHQIHLGELHAILRRQEDFYPFLKDNREKIEKILTFRIPYYVGPLARGNSRFAWMTRKSEETITPWNFEEVVDKGASAQSFIERMTNFDKNLPNEKVLPKHSLLYEYFTVYNELTKVKYVTEGMRKPAFLSGEQKKAIVDLLFKTNRKVTVKQLKEDYFKKIECFDSVEISGVEDRFNASLGTYHDLLKIIKDKDFLDNEENEDILEDIVLTLTLFEDREMIEERLKTYAHLFDDKVMKQLKRRRYTGWGRLSRKLINGIRDKQSGKTILDFLKSDGFANRNFMQLIHDDSLTFKEDIQKAQVSGQGDSLHEHIANLAGSPAIKKGILQTVKVVDELVKVMGRHKPENIVIEMARENQTTQKGQKNSRERMKRIEEGIKELGSQILKEHPVENTQLQNEKLYLYYLQNGRDMYVDQELDINRLSDYDVDHIVPQSFLKDDSIDNKVLTRSDKARGKSDNVPSEEVVKKMKNYWRQLLNAKLITQRKFDNLTKAERGGLSELDKAGFIKRQLVETRQITKHVAQILDSRMNTKYDENDKLIREVKVITLKSKLVSDFRKDFQFYKVREINNYHHAHDAYLNAVVGTALIKKYPKLESEFVYGDYKVYDVRKMIAKSEQEIGKATAKYFFYSNIMNFFKTEITLANGEIRKRPLIETNGETGEIVWDKGRDFATVRKVLSMPQVNIVKKTEVQTGGFSKESILPKRNSDKLIARKKDWDPKKYGGFDSPTVAYSVLVVAKVEKGKSKKLKSVKELLGITIMERSSFEKNPIDFLEAKGYKEVKKDLIIKLPKYSLFELENGRKRMLASAGELQKGNELALPSKYVNFLYLASHYEKLKGSPEDNEQKQLFVEQHKHYLDEIIEQISEFSKRVILADANLDKVLSAYNKHRDKPIREQAENIIHLFTLTNLGAPAAFKYFDTTIDRKRYTSTKEVLDATLIHQSITGLYETRIDLSQLGGDGGEAAAKGGGGGSGGVQEISDSRPMLHIYLNGRRFLGLLDTGADKTCIAGRDWPANWPIHQTESSLQGLGMACGVARSSQPLRWQHEDKSGIIHPFVIPTLPFTLWGRDIMKDIKVRLMTDSPDDSQDLMIGAIESNLFADQISWKSDQPVWLNQWPLKQEKLQALQQLVTEQLQLGHLEESNSPWNTPVFVIKKKSGKWRLLQDLRAVNATMHDMGALQPGLPSPVAVPKGWEIIIIDLQDCFFNIKLHPEDCKRFAFSVPSPNFKRPYQRFQWKVLPQGMKNSPTLCQKFVDKAILTVRDKYQDSYIVHYMDDILLAHPSRSIVDEILTSMIQALNKHGLVVSTEKIQKYDNLKYLGTHIQGDSVSYQKLQIRTDKLRTLNDFQKLLGNINWIRPFLKLTTGELKPLFEILNGDSNPISTRKLTPEACKALQLMNERLSTARVKRLDLSQPWSLCILKTEYTPTACLWQDGVVEWIHLPHISPKVITPYDIFCTQLIIKGRHRSKELFSKDPDYIVVPYTKVQFDLLLQEKEDWPISLLGFLGEVHFHLPKDPLLTFTLQTAIIFPHMTSTTPLEKGIVIFTDGSANGRSVTYIQGREPIIKENTQNTAQQAEIVAVITAFEEVSQPFNLYTDSKYVTGLFPEIETATLSPRTKIYTELKHLQRLIHKRQEKFYIGHIRGHTGLPGPLAQGNAYADSLTRILTAAGKRTADGSEFEKRTADGSEFESPKKKAKVE

SEQ ID NO: 3157 - protein, 2125 aa, synthetic construct
MPAAKRVKLDGGDKKYSIGLDIGTNSVGWAVITDEYKVPSKKFKVLGNTDRHSIKKNLIGALLFDSGETAEATRLKRTARRRYTRRKNRICYLQEIFSNEMAKVDDSFFHRLEESFLVEEDKKHERHPIFGNIVDEVAYHEKYPTIYHLRKKLVDSTDKADLRLIYLALAHMIKFRGHFLIEGDLNPDNSDVDKLFIQLVQTYNQLFEENPINASGVDAKAILSARLSKSRRLENLIAQLPGEKKNGLFGNLIALSLGLTPNFKSNFDLAEDAKLQLSKDTYDDDLDNLLAQIGDQYADLFLAAKNLSDAILLSDILRVNTEITKAPLSASMIKRYDEHHQDLTLLKALVRQQLPEKYKEIFFDQSKNGYAGYIDGGASQEEFYKFIKPILEKMDGTEELLVKLNREDLLRKQRTFDNGSIPHQIHLGELHAILRRQEDFYPFLKDNREKIEKILTFRIPYYVGPLARGNSRFAWMTRKSEETITPWNFEEVVDKGASAQSFIERMTNFDKNLPNEKVLPKHSLLYEYFTVYNELTKVKYVTEGMRKPAFLSGEQKKAIVDLLFKTNRKVTVKQLKEDYFKKIECFDSVEISGVEDRFNASLGTYHDLLKIIKDKDFLDNEENEDILEDIVLTLTLFEDREMIEERLKTYAHLFDDKVMKQLKRRRYTGWGRLSRKLINGIRDKQSGKTILDFLKSDGFANRNFMQLIHDDSLTFKEDIQKAQVSGQGDSLHEHIANLAGSPAIKKGILQTVKVVDELVKVMGRHKPENIVIEMARENQTTQKGQKNSRERMKRIEEGIKELGSQILKEHPVENTQLQNEKLYLYYLQNGRDMYVDQELDINRLSDYDVDHIVPQSFLKDDSIDNKVLTRSDKARGKSDNVPSEEVVKKMKNYWRQLLNAKLITQRKFDNLTKAERGGLSELDKAGFIKRQLVETRQITKHVAQILDSRMNTKYDENDKLIREVKVITLKSKLVSDFRKDFQFYKVREINNYHHAHDAYLNAVVGTALIKKYPKLESEFVYGDYKVYDVRKMIAKSEQEIGKATAKYFFYSNIMNFFKTEITLANGEIRKRPLIETNGETGEIVWDKGRDFATVRKVLSMPQVNIVKKTEVQTGGFSKESILPKRNSDKLIARKKDWDPKKYGGFDSPTVAYSVLVVAKVEKGKSKKLKSVKELLGITIMERSSFEKNPIDFLEAKGYKEVKKDLIIKLPKYSLFELENGRKRMLASAGELQKGNELALPSKYVNFLYLASHYEKLKGSPEDNEQKQLFVEQHKHYLDEIIEQISEFSKRVILADANLDKVLSAYNKHRDKPIREQAENIIHLFTLTNLGAPAAFKYFDTTIDRKRYTSTKEVLDATLIHQSITGLYETRIDLSQLGGDGGEAAAKEAAAKEAAAKEAAAKGGVQEISDSRPMLHIYLNGRRFLGLLDTGADKTCIAGRDWPANWPIHQTESSLQGLGMACGVARSSQPLRWQHEDKSGIIHPFVIPTLPFTLWGRDIMKDIKVRLMTDSPDDSQDLMIGAIESNLFADQISWKSDQPVWLNQWPLKQEKLQALQQLVTEQLQLGHLEESNSPWNTPVFVIKKKSGKWRLLQDLRAVNATMHDMGALQPGLPSPVAVPKGWEIIIIDLQDCFFNIKLHPEDCKRFAFSVPSPNFKRPYQRFQWKVLPQGMKNSPTLCQKFVDKAILTVRDKYQDSYIVHYMDDILLAHPSRSIVDEILTSMIQALNKHGLVVSTEKIQKYDNLKYLGTHIQGDSVSYQKLQIRTDKLRTLNDFQKLLGNINWIRPFLKLTTGELKPLFEILNGDSNPISTRKLTPEACKALQLMNERLSTARVKRLDLSQPWSLCILKTEYTPTACLWQDGVVEWIHLPHISPKVITPYDIFCTQLIIKGRHRSKELFSKDPDYIVVPYTKVQFDLLLQEKEDWPISLLGFLGEVHFHLPKDPLLTFTLQTAIIFPHMTSTTPLEKGIVIFTDGSANGRSVTYIQGREPIIKENTQNTAQQAEIVAVITAFEEVSQPFNLYTDSKYVTGLFPEIETATLSPRTKIYTELKHLQRLIHKRQEKFYIGHIRGHTGLPGPLAQGNAYADSLTRILTAAGKRTADGSEFEKRTADGSEFESPKKKAKVE

SEQ ID NO: 3158 - protein, 2116 aa, synthetic construct
MPAAKRVKLDGGDKKYSIGLDIGTNSVGWAVITDEYKVPSKKFKVLGNTDRHSIKKNLIGALLFDSGETAEATRLKRTARRRYTRRKNRICYLQEIFSNEMAKVDDSFFHRLEESFLVEEDKKHERHPIFGNIVDEVAYHEKYPTIYHLRKKLVDSTDKADLRLIYLALAHMIKFRGHFLIEGDLNPDNSDVDKLFIQLVQTYNQLFEENPINASGVDAKAILSARLSKSRRLENLIAQLPGEKKNGLFGNLIALSLGLTPNFKSNFDLAEDAKLQLSKDTYDDDLDNLLAQIGDQYADLFLAAKNLSDAILLSDILRVNTEITKAPLSASMIKRYDEHHQDLTLLKALVRQQLPEKYKEIFFDQSKNGYAGYIDGGASQEEFYKFIKPILEKMDGTEELLVKLNREDLLRKQRTFDNGSIPHQIHLGELHAILRRQEDFYPFLKDNREKIEKILTFRIPYYVGPLARGNSRFAWMTRKSEETITPWNFEEVVDKGASAQSFIERMTNFDKNLPNEKVLPKHSLLYEYFTVYNELTKVKYVTEGMRKPAFLSGEQKKAIVDLLFKTNRKVTVKQLKEDYFKKIECFDSVEISGVEDRFNASLGTYHDLLKIIKDKDFLDNEENEDILEDIVLTLTLFEDREMIEERLKTYAHLFDDKVMKQLKRRRYTGWGRLSRKLINGIRDKQSGKTILDFLKSDGFANRNFMQLIHDDSLTFKEDIQKAQVSGQGDSLHEHIANLAGSPAIKKGILQTVKVVDELVKVMGRHKPENIVIEMARENQTTQKGQKNSRERMKRIEEGIKELGSQILKEHPVENTQLQNEKLYLYYLQNGRDMYVDQELDINRLSDYDVDHIVPQSFLKDDSIDNKVLTRSDKARGKSDNVPSEEVVKKMKNYWRQLLNAKLITQRKFDNLTKAERGGLSELDKAGFIKRQLVETRQITKHVAQILDSRMNTKYDENDKLIREVKVITLKSKLVSDFRKDFQFYKVREINNYHHAHDAYLNAVVGTALIKKYPKLESEFVYGDYKVYDVRKMIAKSEQEIGKATAKYFFYSNIMNFFKTEITLANGEIRKRPLIETNGETGEIVWDKGRDFATVRKVLSMPQVNIVKKTEVQTGGFSKESILPKRNSDKLIARKKDWDPKKYGGFDSPTVAYSVLVVAKVEKGKSKKLKSVKELLGITIMERSSFEKNPIDFLEAKGYKEVKKDLIIKLPKYSLFELENGRKRMLASAGELQKGNELALPSKYVNFLYLASHYEKLKGSPEDNEQKQLFVEQHKHYLDEIIEQISEFSKRVILADANLDKVLSAYNKHRDKPIREQAENIIHLFTLTNLGAPAAFKYFDTTIDRKRYTSTKEVLDATLIHQSITGLYETRIDLSQLGGDGGGGSEAAAKGSSGGVQEISDSRPMLHIYLNGRRFLGLLDTGADKTCIAGRDWPANWPIHQTESSLQGLGMACGVARSSQPLRWQHEDKSGIIHPFVIPTLPFTLWGRDIMKDIKVRLMTDSPDDSQDLMIGAIESNLFADQISWKSDQPVWLNQWPLKQEKLQALQQLVTEQLQLGHLEESNSPWNTPVFVIKKKSGKWRLLQDLRAVNATMHDMGALQPGLPSPVAVPKGWEIIIIDLQDCFFNIKLHPEDCKRFAFSVPSPNFKRPYQRFQWKVLPQGMKNSPTLCQKFVDKAILTVRDKYQDSYIVHYMDDILLAHPSRSIVDEILTSMIQALNKHGLVVSTEKIQKYDNLKYLGTHIQGDSVSYQKLQIRTDKLRTLNDFQKLLGNINWIRPFLKLTTGELKPLFEILNGDSNPISTRKLTPEACKALQLMNERLSTARVKRLDLSQPWSLCILKTEYTPTACLWQDGVVEWIHLPHISPKVITPYDIFCTQLIIKGRHRSKELFSKDPDYIVVPYTKVQFDLLLQEKEDWPISLLGFLGEVHFHLPKDPLLTFTLQTAIIFPHMTSTTPLEKGIVIFTDGSANGRSVTYIQGREPIIKENTQNTAQQAEIVAVITAFEEVSQPFNLYTDSKYVTGLFPEIETATLSPRTKIYTELKHLQRLIHKRQEKFYIGHIRGHTGLPGPLAQGNAYADSLTRILTAAGKRTADGSEFEKRTADGSEFESPKKKAKVE

SEQ ID NO: 3159 - protein, 2114 aa, synthetic construct
MPAAKRVKLDGGDKKYSIGLDIGTNSVGWAVITDEYKVPSKKFKVLGNTDRHSIKKNLIGALLFDSGETAEATRLKRTARRRYTRRKNRICYLQEIFSNEMAKVDDSFFHRLEESFLVEEDKKHERHPIFGNIVDEVAYHEKYPTIYHLRKKLVDSTDKADLRLIYLALAHMIKFRGHFLIEGDLNPDNSDVDKLFIQLVQTYNQLFEENPINASGVDAKAILSARLSKSRRLENLIAQLPGEKKNGLFGNLIALSLGLTPNFKSNFDLAEDAKLQLSKDTYDDDLDNLLAQIGDQYADLFLAAKNLSDAILLSDILRVNTEITKAPLSASMIKRYDEHHQDLTLLKALVRQQLPEKYKEIFFDQSKNGYAGYIDGGASQEEFYKFIKPILEKMDGTEELLVKLNREDLLRKQRTFDNGSIPHQIHLGELHAILRRQEDFYPFLKDNREKIEKILTFRIPYYVGPLARGNSRFAWMTRKSEETITPWNFEEVVDKGASAQSFIERMTNFDKNLPNEKVLPKHSLLYEYFTVYNELTKVKYVTEGMRKPAFLSGEQKKAIVDLLFKTNRKVTVKQLKEDYFKKIECFDSVEISGVEDRFNASLGTYHDLLKIIKDKDFLDNEENEDILEDIVLTLTLFEDREMIEERLKTYAHLFDDKVMKQLKRRRYTGWGRLSRKLINGIRDKQSGKTILDFLKSDGFANRNFMQLIHDDSLTFKEDIQKAQVSGQGDSLHEHIANLAGSPAIKKGILQTVKVVDELVKVMGRHKPENIVIEMARENQTTQKGQKNSRERMKRIEEGIKELGSQILKEHPVENTQLQNEKLYLYYLQNGRDMYVDQELDINRLSDYDVDHIVPQSFLKDDSIDNKVLTRSDKARGKSDNVPSEEVVKKMKNYWRQLLNAKLITQRKFDNLTKAERGGLSELDKAGFIKRQLVETRQITKHVAQILDSRMNTKYDENDKLIREVKVITLKSKLVSDFRKDFQFYKVREINNYHHAHDAYLNAVVGTALIKKYPKLESEFVYGDYKVYDVRKMIAKSEQEIGKATAKYFFYSNIMNFFKTEITLANGEIRKRPLIETNGETGEIVWDKGRDFATVRKVLSMPQVNIVKKTEVQTGGFSKESILPKRNSDKLIARKKDWDPKKYGGFDSPTVAYSVLVVAKVEKGKSKKLKSVKELLGITIMERSSFEKNPIDFLEAKGYKEVKKDLIIKLPKYSLFELENGRKRMLASAGELQKGNELALPSKYVNFLYLASHYEKLKGSPEDNEQKQLFVEQHKHYLDEIIEQISEFSKRVILADANLDKVLSAYNKHRDKPIREQAENIIHLFTLTNLGAPAAFKYFDTTIDRKRYTSTKEVLDATLIHQSITGLYETRIDLSQLGGDGGGGGGSSGGSGGVQEISDSRPMLHIYLNGRRFLGLLDTGADKTCIAGRDWPANWPIHQTESSLQGLGMACGVARSSQPLRWQHEDKSGIIHPFVIPTLPFTLWGRDIMKDIKVRLMTDSPDDSQDLMIGAIESNLFADQISWKSDQPVWLNQWPLKQEKLQALQQLVTEQLQLGHLEESNSPWNTPVFVIKKKSGKWRLLQDLRAVNATMHDMGALQPGLPSPVAVPKGWEIIIIDLQDCFFNIKLHPEDCKRFAFSVPSPNFKRPYQRFQWKVLPQGMKNSPTLCQKFVDKAILTVRDKYQDSYIVHYMDDILLAHPSRSIVDEILTSMIQALNKHGLVVSTEKIQKYDNLKYLGTHIQGDSVSYQKLQIRTDKLRTLNDFQKLLGNINWIRPFLKLTTGELKPLFEILNGDSNPISTRKLTPEACKALQLMNERLSTARVKRLDLSQPWSLCILKTEYTPTACLWQDGVVEWIHLPHISPKVITPYDIFCTQLIIKGRHRSKELFSKDPDYIVVPYTKVQFDLLLQEKEDWPISLLGFLGEVHFHLPKDPLLTFTLQTAIIFPHMTSTTPLEKGIVIFTDGSANGRSVTYIQGREPIIKENTQNTAQQAEIVAVITAFEEVSQPFNLYTDSKYVTGLFPEIETATLSPRTKIYTELKHLQRLIHKRQEKFYIGHIRGHTGLPGPLAQGNAYADSLTRILTAAGKRTADGSEFEKRTADGSEFESPKKKAKVE

SEQ ID NO: 3160 - protein, 2111 aa, synthetic construct
MPAAKRVKLDGGDKKYSIGLDIGTNSVGWAVITDEYKVPSKKFKVLGNTDRHSIKKNLIGALLFDSGETAEATRLKRTARRRYTRRKNRICYLQEIFSNEMAKVDDSFFHRLEESFLVEEDKKHERHPIFGNIVDEVAYHEKYPTIYHLRKKLVDSTDKADLRLIYLALAHMIKFRGHFLIEGDLNPDNSDVDKLFIQLVQTYNQLFEENPINASGVDAKAILSARLSKSRRLENLIAQLPGEKKNGLFGNLIALSLGLTPNFKSNFDLAEDAKLQLSKDTYDDDLDNLLAQIGDQYADLFLAAKNLSDAILLSDILRVNTEITKAPLSASMIKRYDEHHQDLTLLKALVRQQLPEKYKEIFFDQSKNGYAGYIDGGASQEEFYKFIKPILEKMDGTEELLVKLNREDLLRKQRTFDNGSIPHQIHLGELHAILRRQEDFYPFLKDNREKIEKILTFRIPYYVGPLARGNSRFAWMTRKSEETITPWNFEEVVDKGASAQSFIERMTNFDKNLPNEKVLPKHSLLYEYFTVYNELTKVKYVTEGMRKPAFLSGEQKKAIVDLLFKTNRKVTVKQLKEDYFKKIECFDSVEISGVEDRFNASLGTYHDLLKIIKDKDFLDNEENEDILEDIVLTLTLFEDREMIEERLKTYAHLFDDKVMKQLKRRRYTGWGRLSRKLINGIRDKQSGKTILDFLKSDGFANRNFMQLIHDDSLTFKEDIQKAQVSGQGDSLHEHIANLAGSPAIKKGILQTVKVVDELVKVMGRHKPENIVIEMARENQTTQKGQKNSRERMKRIEEGIKELGSQILKEHPVENTQLQNEKLYLYYLQNGRDMYVDQELDINRLSDYDVDHIVPQSFLKDDSIDNKVLTRSDKARGKSDNVPSEEVVKKMKNYWRQLLNAKLITQRKFDNLTKAERGGLSELDKAGFIKRQLVETRQITKHVAQILDSRMNTKYDENDKLIREVKVITLKSKLVSDFRKDFQFYKVREINNYHHAHDAYLNAVVGTALIKKYPKLESEFVYGDYKVYDVRKMIAKSEQEIGKATAKYFFYSNIMNFFKTEITLANGEIRKRPLIETNGETGEIVWDKGRDFATVRKVLSMPQVNIVKKTEVQTGGFSKESILPKRNSDKLIARKKDWDPKKYGGFDSPTVAYSVLVVAKVEKGKSKKLKSVKELLGITIMERSSFEKNPIDFLEAKGYKEVKKDLIIKLPKYSLFELENGRKRMLASAGELQKGNELALPSKYVNFLYLASHYEKLKGSPEDNEQKQLFVEQHKHYLDEIIEQISEFSKRVILADANLDKVLSAYNKHRDKPIREQAENIIHLFTLTNLGAPAAFKYFDTTIDRKRYTSTKEVLDATLIHQSITGLYETRIDLSQLGGDGGGGSPAPGGVQEISDSRPMLHIYLNGRRFLGLLDTGADKTCIAGRDWPANWPIHQTESSLQGLGMACGVARSSQPLRWQHEDKSGIIHPFVIPTLPFTLWGRDIMKDIKVRLMTDSPDDSQDLMIGAIESNLFADQISWKSDQPVWLNQWPLKQEKLQALQQLVTEQLQLGHLEESNSPWNTPVFVIKKKSGKWRLLQDLRAVNATMHDMGALQPGLPSPVAVPKGWEIIIIDLQDCFFNIKLHPEDCKRFAFSVPSPNFKRPYQRFQWKVLPQGMKNSPTLCQKFVDKAILTVRDKYQDSYIVHYMDDILLAHPSRSIVDEILTSMIQALNKHGLVVSTEKIQKYDNLKYLGTHIQGDSVSYQKLQIRTDKLRTLNDFQKLLGNINWIRPFLKLTTGELKPLFEILNGDSNPISTRKLTPEACKALQLMNERLSTARVKRLDLSQPWSLCILKTEYTPTACLWQDGVVEWIHLPHISPKVITPYDIFCTQLIIKGRHRSKELFSKDPDYIVVPYTKVQFDLLLQEKEDWPISLLGFLGEVHFHLPKDPLLTFTLQTAIIFPHMTSTTPLEKGIVIFTDGSANGRSVTYIQGREPIIKENTQNTAQQAEIVAVITAFEEVSQPFNLYTDSKYVTGLFPEIETATLSPRTKIYTELKHLQRLIHKRQEKFYIGHIRGHTGLPGPLAQGNAYADSLTRILTAAGKRTADGSEFEKRTADGSEFESPKKKAKVE

SEQ ID NO: 3161 - protein, 2114 aa, synthetic construct
MPAAKRVKLDGGDKKYSIGLDIGTNSVGWAVITDEYKVPSKKFKVLGNTDRHSIKKNLIGALLFDSGETAEATRLKRTARRRYTRRKNRICYLQEIFSNEMAKVDDSFFHRLEESFLVEEDKKHERHPIFGNIVDEVAYHEKYPTIYHLRKKLVDSTDKADLRLIYLALAHMIKFRGHFLIEGDLNPDNSDVDKLFIQLVQTYNQLFEENPINASGVDAKAILSARLSKSRRLENLIAQLPGEKKNGLFGNLIALSLGLTPNFKSNFDLAEDAKLQLSKDTYDDDLDNLLAQIGDQYADLFLAAKNLSDAILLSDILRVNTEITKAPLSASMIKRYDEHHQDLTLLKALVRQQLPEKYKEIFFDQSKNGYAGYIDGGASQEEFYKFIKPILEKMDGTEELLVKLNREDLLRKQRTFDNGSIPHQIHLGELHAILRRQEDFYPFLKDNREKIEKILTFRIPYYVGPLARGNSRFAWMTRKSEETITPWNFEEVVDKGASAQSFIERMTNFDKNLPNEKVLPKHSLLYEYFTVYNELTKVKYVTEGMRKPAFLSGEQKKAIVDLLFKTNRKVTVKQLKEDYFKKIECFDSVEISGVEDRFNASLGTYHDLLKIIKDKDFLDNEENEDILEDIVLTLTLFEDREMIEERLKTYAHLFDDKVMKQLKRRRYTGWGRLSRKLINGIRDKQSGKTILDFLKSDGFANRNFMQLIHDDSLTFKEDIQKAQVSGQGDSLHEHIANLAGSPAIKKGILQTVKVVDELVKVMGRHKPENIVIEMARENQTTQKGQKNSRERMKRIEEGIKELGSQILKEHPVENTQLQNEKLYLYYLQNGRDMYVDQELDINRLSDYDVDHIVPQSFLKDDSIDNKVLTRSDKARGKSDNVPSEEVVKKMKNYWRQLLNAKLITQRKFDNLTKAERGGLSELDKAGFIKRQLVETRQITKHVAQILDSRMNTKYDENDKLIREVKVITLKSKLVSDFRKDFQFYKVREINNYHHAHDAYLNAVVGTALIKKYPKLESEFVYGDYKVYDVRKMIAKSEQEIGKATAKYFFYSNIMNFFKTEITLANGEIRKRPLIETNGETGEIVWDKGRDFATVRKVLSMPQVNIVKKTEVQTGGFSKESILPKRNSDKLIARKKDWDPKKYGGFDSPTVAYSVLVVAKVEKGKSKKLKSVKELLGITIMERSSFEKNPIDFLEAKGYKEVKKDLIIKLPKYSLFELENGRKRMLASAGELQKGNELALPSKYVNFLYLASHYEKLKGSPEDNEQKQLFVEQHKHYLDEIIEQISEFSKRVILADANLDKVLSAYNKHRDKPIREQAENIIHLFTLTNLGAPAAFKYFDTTIDRKRYTSTKEVLDATLIHQSITGLYETRIDLSQLGGDGGPAPGSSGGSGGVQEISDSRPMLHIYLNGRRFLGLLDTGADKTCIAGRDWPANWPIHQTESSLQGLGMACGVARSSQPLRWQHEDKSGIIHPFVIPTLPFTLWGRDIMKDIKVRLMTDSPDDSQDLMIGAIESNLFADQISWKSDQPVWLNQWPLKQEKLQALQQLVTEQLQLGHLEESNSPWNTPVFVIKKKSGKWRLLQDLRAVNATMHDMGALQPGLPSPVAVPKGWEIIIIDLQDCFFNIKLHPEDCKRFAFSVPSPNFKRPYQRFQWKVLPQGMKNSPTLCQKFVDKAILTVRDKYQDSYIVHYMDDILLAHPSRSIVDEILTSMIQALNKHGLVVSTEKIQKYDNLKYLGTHIQGDSVSYQKLQIRTDKLRTLNDFQKLLGNINWIRPFLKLTTGELKPLFEILNGDSNPISTRKLTPEACKALQLMNERLSTARVKRLDLSQPWSLCILKTEYTPTACLWQDGVVEWIHLPHISPKVITPYDIFCTQLIIKGRHRSKELFSKDPDYIVVPYTKVQFDLLLQEKEDWPISLLGFLGEVHFHLPKDPLLTFTLQTAIIFPHMTSTTPLEKGIVIFTDGSANGRSVTYIQGREPIIKENTQNTAQQAEIVAVITAFEEVSQPFNLYTDSKYVTGLFPEIETATLSPRTKIYTELKHLQRLIHKRQEKFYIGHIRGHTGLPGPLAQGNAYADSLTRILTAAGKRTADGSEFEKRTADGSEFESPKKKAKVE

SEQ ID NO: 3162 - protein, 2116 aa, synthetic construct
MPAAKRVKLDGGDKKYSIGLDIGTNSVGWAVITDEYKVPSKKFKVLGNTDRHSIKKNLIGALLFDSGETAEATRLKRTARRRYTRRKNRICYLQEIFSNEMAKVDDSFFHRLEESFLVEEDKKHERHPIFGNIVDEVAYHEKYPTIYHLRKKLVDSTDKADLRLIYLALAHMIKFRGHFLIEGDLNPDNSDVDKLFIQLVQTYNQLFEENPINASGVDAKAILSARLSKSRRLENLIAQLPGEKKNGLFGNLIALSLGLTPNFKSNFDLAEDAKLQLSKDTYDDDLDNLLAQIGDQYADLFLAAKNLSDAILLSDILRVNTEITKAPLSASMIKRYDEHHQDLTLLKALVRQQLPEKYKEIFFDQSKNGYAGYIDGGASQEEFYKFIKPILEKMDGTEELLVKLNREDLLRKQRTFDNGSIPHQIHLGELHAILRRQEDFYPFLKDNREKIEKILTFRIPYYVGPLARGNSRFAWMTRKSEETITPWNFEEVVDKGASAQSFIERMTNFDKNLPNEKVLPKHSLLYEYFTVYNELTKVKYVTEGMRKPAFLSGEQKKAIVDLLFKTNRKVTVKQLKEDYFKKIECFDSVEISGVEDRFNASLGTYHDLLKIIKDKDFLDNEENEDILEDIVLTLTLFEDREMIEERLKTYAHLFDDKVMKQLKRRRYTGWGRLSRKLINGIRDKQSGKTILDFLKSDGFANRNFMQLIHDDSLTFKEDIQKAQVSGQGDSLHEHIANLAGSPAIKKGILQTVKVVDELVKVMGRHKPENIVIEMARENQTTQKGQKNSRERMKRIEEGIKELGSQILKEHPVENTQLQNEKLYLYYLQNGRDMYVDQELDINRLSDYDVDHIVPQSFLKDDSIDNKVLTRSDKARGKSDNVPSEEVVKKMKNYWRQLLNAKLITQRKFDNLTKAERGGLSELDKAGFIKRQLVETRQITKHVAQILDSRMNTKYDENDKLIREVKVITLKSKLVSDFRKDFQFYKVREINNYHHAHDAYLNAVVGTALIKKYPKLESEFVYGDYKVYDVRKMIAKSEQEIGKATAKYFFYSNIMNFFKTEITLANGEIRKRPLIETNGETGEIVWDKGRDFATVRKVLSMPQVNIVKKTEVQTGGFSKESILPKRNSDKLIARKKDWDPKKYGGFDSPTVAYSVLVVAKVEKGKSKKLKSVKELLGITIMERSSFEKNPIDFLEAKGYKEVKKDLIIKLPKYSLFELENGRKRMLASAGELQKGNELALPSKYVNFLYLASHYEKLKGSPEDNEQKQLFVEQHKHYLDEIIEQISEFSKRVILADANLDKVLSAYNKHRDKPIREQAENIIHLFTLTNLGAPAAFKYFDTTIDRKRYTSTKEVLDATLIHQSITGLYETRIDLSQLGGDGGGGSGGGEAAAKGGVQEISDSRPMLHIYLNGRRFLGLLDTGADKTCIAGRDWPANWPIHQTESSLQGLGMACGVARSSQPLRWQHEDKSGIIHPFVIPTLPFTLWGRDIMKDIKVRLMTDSPDDSQDLMIGAIESNLFADQISWKSDQPVWLNQWPLKQEKLQALQQLVTEQLQLGHLEESNSPWNTPVFVIKKKSGKWRLLQDLRAVNATMHDMGALQPGLPSPVAVPKGWEIIIIDLQDCFFNIKLHPEDCKRFAFSVPSPNFKRPYQRFQWKVLPQGMKNSPTLCQKFVDKAILTVRDKYQDSYIVHYMDDILLAHPSRSIVDEILTSMIQALNKHGLVVSTEKIQKYDNLKYLGTHIQGDSVSYQKLQIRTDKLRTLNDFQKLLGNINWIRPFLKLTTGELKPLFEILNGDSNPISTRKLTPEACKALQLMNERLSTARVKRLDLSQPWSLCILKTEYTPTACLWQDGVVEWIHLPHISPKVITPYDIFCTQLIIKGRHRSKELFSKDPDYIVVPYTKVQFDLLLQEKEDWPISLLGFLGEVHFHLPKDPLLTFTLQTAIIFPHMTSTTPLEKGIVIFTDGSANGRSVTYIQGREPIIKENTQNTAQQAEIVAVITAFEEVSQPFNLYTDSKYVTGLFPEIETATLSPRTKIYTELKHLQRLIHKRQEKFYIGHIRGHTGLPGPLAQGNAYADSLTRILTAAGKRTADGSEFEKRTADGSEFESPKKKAKVE

SEQ ID NO: 3163 - protein, 2116 aa, synthetic construct
MPAAKRVKLDGGDKKYSIGLDIGTNSVGWAVITDEYKVPSKKFKVLGNTDRHSIKKNLIGALLFDSGETAEATRLKRTARRRYTRRKNRICYLQEIFSNEMAKVDDSFFHRLEESFLVEEDKKHERHPIFGNIVDEVAYHEKYPTIYHLRKKLVDSTDKADLRLIYLALAHMIKFRGHFLIEGDLNPDNSDVDKLFIQLVQTYNQLFEENPINASGVDAKAILSARLSKSRRLENLIAQLPGEKKNGLFGNLIALSLGLTPNFKSNFDLAEDAKLQLSKDTYDDDLDNLLAQIGDQYADLFLAAKNLSDAILLSDILRVNTEITKAPLSASMIKRYDEHHQDLTLLKALVRQQLPEKYKEIFFDQSKNGYAGYIDGGASQEEFYKFIKPILEKMDGTEELLVKLNREDLLRKQRTFDNGSIPHQIHLGELHAILRRQEDFYPFLKDNREKIEKILTFRIPYYVGPLARGNSRFAWMTRKSEETITPWNFEEVVDKGASAQSFIERMTNFDKNLPNEKVLPKHSLLYEYFTVYNELTKVKYVTEGMRKPAFLSGEQKKAIVDLLFKTNRKVTVKQLKEDYFKKIECFDSVEISGVEDRFNASLGTYHDLLKIIKDKDFLDNEENEDILEDIVLTLTLFEDREMIEERLKTYAHLFDDKVMKQLKRRRYTGWGRLSRKLINGIRDKQSGKTILDFLKSDGFANRNFMQLIHDDSLTFKEDIQKAQVSGQGDSLHEHIANLAGSPAIKKGILQTVKVVDELVKVMGRHKPENIVIEMARENQTTQKGQKNSRERMKRIEEGIKELGSQILKEHPVENTQLQNEKLYLYYLQNGRDMYVDQELDINRLSDYDVDHIVPQSFLKDDSIDNKVLTRSDKARGKSDNVPSEEVVKKMKNYWRQLLNAKLITQRKFDNLTKAERGGLSELDKAGFIKRQLVETRQITKHVAQILDSRMNTKYDENDKLIREVKVITLKSKLVSDFRKDFQFYKVREINNYHHAHDAYLNAVVGTALIKKYPKLESEFVYGDYKVYDVRKMIAKSEQEIGKATAKYFFYSNIMNFFKTEITLANGEIRKRPLIETNGETGEIVWDKGRDFATVRKVLSMPQVNIVKKTEVQTGGFSKESILPKRNSDKLIARKKDWDPKKYGGFDSPTVAYSVLVVAKVEKGKSKKLKSVKELLGITIMERSSFEKNPIDFLEAKGYKEVKKDLIIKLPKYSLFELENGRKRMLASAGELQKGNELALPSKYVNFLYLASHYEKLKGSPEDNEQKQLFVEQHKHYLDEIIEQISEFSKRVILADANLDKVLSAYNKHRDKPIREQAENIIHLFTLTNLGAPAAFKYFDTTIDRKRYTSTKEVLDATLIHQSITGLYETRIDLSQLGGDGGGGGGSSEAAAKGGVQEISDSRPMLHIYLNGRRFLGLLDTGADKTCIAGRDWPANWPIHQTESSLQGLGMACGVARSSQPLRWQHEDKSGIIHPFVIPTLPFTLWGRDIMKDIKVRLMTDSPDDSQDLMIGAIESNLFADQISWKSDQPVWLNQWPLKQEKLQALQQLVTEQLQLGHLEESNSPWNTPVFVIKKKSGKWRLLQDLRAVNATMHDMGALQPGLPSPVAVPKGWEIIIIDLQDCFFNIKLHPEDCKRFAFSVPSPNFKRPYQRFQWKVLPQGMKNSPTLCQKFVDKAILTVRDKYQDSYIVHYMDDILLAHPSRSIVDEILTSMIQALNKHGLVVSTEKIQKYDNLKYLGTHIQGDSVSYQKLQIRTDKLRTLNDFQKLLGNINWIRPFLKLTTGELKPLFEILNGDSNPISTRKLTPEACKALQLMNERLSTARVKRLDLSQPWSLCILKTEYTPTACLWQDGVVEWIHLPHISPKVITPYDIFCTQLIIKGRHRSKELFSKDPDYIVVPYTKVQFDLLLQEKEDWPISLLGFLGEVHFHLPKDPLLTFTLQTAIIFPHMTSTTPLEKGIVIFTDGSANGRSVTYIQGREPIIKENTQNTAQQAEIVAVITAFEEVSQPFNLYTDSKYVTGLFPEIETATLSPRTKIYTELKHLQRLIHKRQEKFYIGHIRGHTGLPGPLAQGNAYADSLTRILTAAGKRTADGSEFEKRTADGSEFESPKKKAKVE

SEQ ID NO: 3164 - protein, 2116 aa, synthetic construct
MPAAKRVKLDGGDKKYSIGLDIGTNSVGWAVITDEYKVPSKKFKVLGNTDRHSIKKNLIGALLFDSGETAEATRLKRTARRRYTRRKNRICYLQEIFSNEMAKVDDSFFHRLEESFLVEEDKKHERHPIFGNIVDEVAYHEKYPTIYHLRKKLVDSTDKADLRLIYLALAHMIKFRGHFLIEGDLNPDNSDVDKLFIQLVQTYNQLFEENPINASGVDAKAILSARLSKSRRLENLIAQLPGEKKNGLFGNLIALSLGLTPNFKSNFDLAEDAKLQLSKDTYDDDLDNLLAQIGDQYADLFLAAKNLSDAILLSDILRVNTEITKAPLSASMIKRYDEHHQDLTLLKALVRQQLPEKYKEIFFDQSKNGYAGYIDGGASQEEFYKFIKPILEKMDGTEELLVKLNREDLLRKQRTFDNGSIPHQIHLGELHAILRRQEDFYPFLKDNREKIEKILTFRIPYYVGPLARGNSRFAWMTRKSEETITPWNFEEVVDKGASAQSFIERMTNFDKNLPNEKVLPKHSLLYEYFTVYNELTKVKYVTEGMRKPAFLSGEQKKAIVDLLFKTNRKVTVKQLKEDYFKKIECFDSVEISGVEDRFNASLGTYHDLLKIIKDKDFLDNEENEDILEDIVLTLTLFEDREMIEERLKTYAHLFDDKVMKQLKRRRYTGWGRLSRKLINGIRDKQSGKTILDFLKSDGFANRNFMQLIHDDSLTFKEDIQKAQVSGQGDSLHEHIANLAGSPAIKKGILQTVKVVDELVKVMGRHKPENIVIEMARENQTTQKGQKNSRERMKRIEEGIKELGSQILKEHPVENTQLQNEKLYLYYLQNGRDMYVDQELDINRLSDYDVDHIVPQSFLKDDSIDNKVLTRSDKARGKSDNVPSEEVVKKMKNYWRQLLNAKLITQRKFDNLTKAERGGLSELDKAGFIKRQLVETRQITKHVAQILDSRMNTKYDENDKLIREVKVITLKSKLVSDFRKDFQFYKVREINNYHHAHDAYLNAVVGTALIKKYPKLESEFVYGDYKVYDVRKMIAKSEQEIGKATAKYFFYSNIMNFFKTEITLANGEIRKRPLIETNGETGEIVWDKGRDFATVRKVLSMPQVNIVKKTEVQTGGFSKESILPKRNSDKLIARKKDWDPKKYGGFDSPTVAYSVLVVAKVEKGKSKKLKSVKELLGITIMERSSFEKNPIDFLEAKGYKEVKKDLIIKLPKYSLFELENGRKRMLASAGELQKGNELALPSKYVNFLYLASHYEKLKGSPEDNEQKQLFVEQHKHYLDEIIEQISEFSKRVILADANLDKVLSAYNKHRDKPIREQAENIIHLFTLTNLGAPAAFKYFDTTIDRKRYTSTKEVLDATLIHQSITGLYETRIDLSQLGGDGGGGSPAPEAAAKGGVQEISDSRPMLHIYLNGRRFLGLLDTGADKTCIAGRDWPANWPIHQTESSLQGLGMACGVARSSQPLRWQHEDKSGIIHPFVIPTLPFTLWGRDIMKDIKVRLMTDSPDDSQDLMIGAIESNLFADQISWKSDQPVWLNQWPLKQEKLQALQQLVTEQLQLGHLEESNSPWNTPVFVIKKKSGKWRLLQDLRAVNATMHDMGALQPGLPSPVAVPKGWEIIIIDLQDCFFNIKLHPEDCKRFAFSVPSPNFKRPYQRFQWKVLPQGMKNSPTLCQKFVDKAILTVRDKYQDSYIVHYMDDILLAHPSRSIVDEILTSMIQALNKHGLVVSTEKIQKYDNLKYLGTHIQGDSVSYQKLQIRTDKLRTLNDFQKLLGNINWIRPFLKLTTGELKPLFEILNGDSNPISTRKLTPEACKALQLMNERLSTARVKRLDLSQPWSLCILKTEYTPTACLWQDGVVEWIHLPHISPKVITPYDIFCTQLIIKGRHRSKELFSKDPDYIVVPYTKVQFDLLLQEKEDWPISLLGFLGEVHFHLPKDPLLTFTLQTAIIFPHMTSTTPLEKGIVIFTDGSANGRSVTYIQGREPIIKENTQNTAQQAEIVAVITAFEEVSQPFNLYTDSKYVTGLFPEIETATLSPRTKIYTELKHLQRLIHKRQEKFYIGHIRGHTGLPGPLAQGNAYADSLTRILTAAGKRTADGSEFEKRTADGSEFESPKKKAKVE

SEQ ID NO: 3165 - protein, 2117 aa, synthetic construct
MPAAKRVKLDGGDKKYSIGLDIGTNSVGWAVITDEYKVPSKKFKVLGNTDRHSIKKNLIGALLFDSGETAEATRLKRTARRRYTRRKNRICYLQEIFSNEMAKVDDSFFHRLEESFLVEEDKKHERHPIFGNIVDEVAYHEKYPTIYHLRKKLVDSTDKADLRLIYLALAHMIKFRGHFLIEGDLNPDNSDVDKLFIQLVQTYNQLFEENPINASGVDAKAILSARLSKSRRLENLIAQLPGEKKNGLFGNLIALSLGLTPNFKSNFDLAEDAKLQLSKDTYDDDLDNLLAQIGDQYADLFLAAKNLSDAILLSDILRVNTEITKAPLSASMIKRYDEHHQDLTLLKALVRQQLPEKYKEIFFDQSKNGYAGYIDGGASQEEFYKFIKPILEKMDGTEELLVKLNREDLLRKQRTFDNGSIPHQIHLGELHAILRRQEDFYPFLKDNREKIEKILTFRIPYYVGPLARGNSRFAWMTRKSEETITPWNFEEVVDKGASAQSFIERMTNFDKNLPNEKVLPKHSLLYEYFTVYNELTKVKYVTEGMRKPAFLSGEQKKAIVDLLFKTNRKVTVKQLKEDYFKKIECFDSVEISGVEDRFNASLGTYHDLLKIIKDKDFLDNEENEDILEDIVLTLTLFEDREMIEERLKTYAHLFDDKVMKQLKRRRYTGWGRLSRKLINGIRDKQSGKTILDFLKSDGFANRNFMQLIHDDSLTFKEDIQKAQVSGQGDSLHEHIANLAGSPAIKKGILQTVKVVDELVKVMGRHKPENIVIEMARENQTTQKGQKNSRERMKRIEEGIKELGSQILKEHPVENTQLQNEKLYLYYLQNGRDMYVDQELDINRLSDYDVDHIVPQSFLKDDSIDNKVLTRSDKARGKSDNVPSEEVVKKMKNYWRQLLNAKLITQRKFDNLTKAERGGLSELDKAGFIKRQLVETRQITKHVAQILDSRMNTKYDENDKLIREVKVITLKSKLVSDFRKDFQFYKVREINNYHHAHDAYLNAVVGTALIKKYPKLESEFVYGDYKVYDVRKMIAKSEQEIGKATAKYFFYSNIMNFFKTEITLANGEIRKRPLIETNGETGEIVWDKGRDFATVRKVLSMPQVNIVKKTEVQTGGFSKESILPKRNSDKLIARKKDWDPKKYGGFDSPTVAYSVLVVAKVEKGKSKKLKSVKELLGITIMERSSFEKNPIDFLEAKGYKEVKKDLIIKLPKYSLFELENGRKRMLASAGELQKGNELALPSKYVNFLYLASHYEKLKGSPEDNEQKQLFVEQHKHYLDEIIEQISEFSKRVILADANLDKVLSAYNKHRDKPIREQAENIIHLFTLTNLGAPAAFKYFDTTIDRKRYTSTKEVLDATLIHQSITGLYETRIDLSQLGGDGGGSAGSAAGSGEFGGVQEISDSRPMLHIYLNGRRFLGLLDTGADKTCIAGRDWPANWPIHQTESSLQGLGMACGVARSSQPLRWQHEDKSGIIHPFVIPTLPFTLWGRDIMKDIKVRLMTDSPDDSQDLMIGAIESNLFADQISWKSDQPVWLNQWPLKQEKLQALQQLVTEQLQLGHLEESNSPWNTPVFVIKKKSGKWRLLQDLRAVNATMHDMGALQPGLPSPVAVPKGWEIIIIDLQDCFFNIKLHPEDCKRFAFSVPSPNFKRPYQRFQWKVLPQGMKNSPTLCQKFVDKAILTVRDKYQDSYIVHYMDDILLAHPSRSIVDEILTSMIQALNKHGLVVSTEKIQKYDNLKYLGTHIQGDSVSYQKLQIRTDKLRTLNDFQKLLGNINWIRPFLKLTTGELKPLFEILNGDSNPISTRKLTPEACKALQLMNERLSTARVKRLDLSQPWSLCILKTEYTPTACLWQDGVVEWIHLPHISPKVITPYDIFCTQLIIKGRHRSKELFSKDPDYIVVPYTKVQFDLLLQEKEDWPISLLGFLGEVHFHLPKDPLLTFTLQTAIIFPHMTSTTPLEKGIVIFTDGSANGRSVTYIQGREPIIKENTQNTAQQAEIVAVITAFEEVSQPFNLYTDSKYVTGLFPEIETATLSPRTKIYTELKHLQRLIHKRQEKFYIGHIRGHTGLPGPLAQGNAYADSLTRILTAAGKRTADGSEFEKRTADGSEFESPKKKAKVE

SEQ ID NO: 3166 - protein, 2111 aa, synthetic construct
MPAAKRVKLDGGDKKYSIGLDIGTNSVGWAVITDEYKVPSKKFKVLGNTDRHSIKKNLIGALLFDSGETAEATRLKRTARRRYTRRKNRICYLQEIFSNEMAKVDDSFFHRLEESFLVEEDKKHERHPIFGNIVDEVAYHEKYPTIYHLRKKLVDSTDKADLRLIYLALAHMIKFRGHFLIEGDLNPDNSDVDKLFIQLVQTYNQLFEENPINASGVDAKAILSARLSKSRRLENLIAQLPGEKKNGLFGNLIALSLGLTPNFKSNFDLAEDAKLQLSKDTYDDDLDNLLAQIGDQYADLFLAAKNLSDAILLSDILRVNTEITKAPLSASMIKRYDEHHQDLTLLKALVRQQLPEKYKEIFFDQSKNGYAGYIDGGASQEEFYKFIKPILEKMDGTEELLVKLNREDLLRKQRTFDNGSIPHQIHLGELHAILRRQEDFYPFLKDNREKIEKILTFRIPYYVGPLARGNSRFAWMTRKSEETITPWNFEEVVDKGASAQSFIERMTNFDKNLPNEKVLPKHSLLYEYFTVYNELTKVKYVTEGMRKPAFLSGEQKKAIVDLLFKTNRKVTVKQLKEDYFKKIECFDSVEISGVEDRFNASLGTYHDLLKIIKDKDFLDNEENEDILEDIVLTLTLFEDREMIEERLKTYAHLFDDKVMKQLKRRRYTGWGRLSRKLINGIRDKQSGKTILDFLKSDGFANRNFMQLIHDDSLTFKEDIQKAQVSGQGDSLHEHIANLAGSPAIKKGILQTVKVVDELVKVMGRHKPENIVIEMARENQTTQKGQKNSRERMKRIEEGIKELGSQILKEHPVENTQLQNEKLYLYYLQNGRDMYVDQELDINRLSDYDVDHIVPQSFLKDDSIDNKVLTRSDKARGKSDNVPSEEVVKKMKNYWRQLLNAKLITQRKFDNLTKAERGGLSELDKAGFIKRQLVETRQITKHVAQILDSRMNTKYDENDKLIREVKVITLKSKLVSDFRKDFQFYKVREINNYHHAHDAYLNAVVGTALIKKYPKLESEFVYGDYKVYDVRKMIAKSEQEIGKATAKYFFYSNIMNFFKTEITLANGEIRKRPLIETNGETGEIVWDKGRDFATVRKVLSMPQVNIVKKTEVQTGGFSKESILPKRNSDKLIARKKDWDPKKYGGFDSPTVAYSVLVVAKVEKGKSKKLKSVKELLGITIMERSSFEKNPIDFLEAKGYKEVKKDLIIKLPKYSLFELENGRKRMLASAGELQKGNELALPSKYVNFLYLASHYEKLKGSPEDNEQKQLFVEQHKHYLDEIIEQISEFSKRVILADANLDKVLSAYNKHRDKPIREQAENIIHLFTLTNLGAPAAFKYFDTTIDRKRYTSTKEVLDATLIHQSITGLYETRIDLSQLGGDGGGGGGGSGGVQEISDSRPMLHIYLNGRRFLGLLDTGADKTCIAGRDWPANWPIHQTESSLQGLGMACGVARSSQPLRWQHEDKSGIIHPFVIPTLPFTLWGRDIMKDIKVRLMTDSPDDSQDLMIGAIESNLFADQISWKSDQPVWLNQWPLKQEKLQALQQLVTEQLQLGHLEESNSPWNTPVFVIKKKSGKWRLLQDLRAVNATMHDMGALQPGLPSPVAVPKGWEIIIIDLQDCFFNIKLHPEDCKRFAFSVPSPNFKRPYQRFQWKVLPQGMKNSPTLCQKFVDKAILTVRDKYQDSYIVHYMDDILLAHPSRSIVDEILTSMIQALNKHGLVVSTEKIQKYDNLKYLGTHIQGDSVSYQKLQIRTDKLRTLNDFQKLLGNINWIRPFLKLTTGELKPLFEILNGDSNPISTRKLTPEACKALQLMNERLSTARVKRLDLSQPWSLCILKTEYTPTACLWQDGVVEWIHLPHISPKVITPYDIFCTQLIIKGRHRSKELFSKDPDYIVVPYTKVQFDLLLQEKEDWPISLLGFLGEVHFHLPKDPLLTFTLQTAIIFPHMTSTTPLEKGIVIFTDGSANGRSVTYIQGREPIIKENTQNTAQQAEIVAVITAFEEVSQPFNLYTDSKYVTGLFPEIETATLSPRTKIYTELKHLQRLIHKRQEKFYIGHIRGHTGLPGPLAQGNAYADSLTRILTAAGKRTADGSEFEKRTADGSEFESPKKKAKVE

SEQ ID NO: 3167 - protein, 2113 aa, synthetic construct
MPAAKRVKLDGGDKKYSIGLDIGTNSVGWAVITDEYKVPSKKFKVLGNTDRHSIKKNLIGALLFDSGETAEATRLKRTARRRYTRRKNRICYLQEIFSNEMAKVDDSFFHRLEESFLVEEDKKHERHPIFGNIVDEVAYHEKYPTIYHLRKKLVDSTDKADLRLIYLALAHMIKFRGHFLIEGDLNPDNSDVDKLFIQLVQTYNQLFEENPINASGVDAKAILSARLSKSRRLENLIAQLPGEKKNGLFGNLIALSLGLTPNFKSNFDLAEDAKLQLSKDTYDDDLDNLLAQIGDQYADLFLAAKNLSDAILLSDILRVNTEITKAPLSASMIKRYDEHHQDLTLLKALVRQQLPEKYKEIFFDQSKNGYAGYIDGGASQEEFYKFIKPILEKMDGTEELLVKLNREDLLRKQRTFDNGSIPHQIHLGELHAILRRQEDFYPFLKDNREKIEKILTFRIPYYVGPLARGNSRFAWMTRKSEETITPWNFEEVVDKGASAQSFIERMTNFDKNLPNEKVLPKHSLLYEYFTVYNELTKVKYVTEGMRKPAFLSGEQKKAIVDLLFKTNRKVTVKQLKEDYFKKIECFDSVEISGVEDRFNASLGTYHDLLKIIKDKDFLDNEENEDILEDIVLTLTLFEDREMIEERLKTYAHLFDDKVMKQLKRRRYTGWGRLSRKLINGIRDKQSGKTILDFLKSDGFANRNFMQLIHDDSLTFKEDIQKAQVSGQGDSLHEHIANLAGSPAIKKGILQTVKVVDELVKVMGRHKPENIVIEMARENQTTQKGQKNSRERMKRIEEGIKELGSQILKEHPVENTQLQNEKLYLYYLQNGRDMYVDQELDINRLSDYDVDHIVPQSFLKDDSIDNKVLTRSDKARGKSDNVPSEEVVKKMKNYWRQLLNAKLITQRKFDNLTKAERGGLSELDKAGFIKRQLVETRQITKHVAQILDSRMNTKYDENDKLIREVKVITLKSKLVSDFRKDFQFYKVREINNYHHAHDAYLNAVVGTALIKKYPKLESEFVYGDYKVYDVRKMIAKSEQEIGKATAKYFFYSNIMNFFKTEITLANGEIRKRPLIETNGETGEIVWDKGRDFATVRKVLSMPQVNIVKKTEVQTGGFSKESILPKRNSDKLIARKKDWDPKKYGGFDSPTVAYSVLVVAKVEKGKSKKLKSVKELLGITIMERSSFEKNPIDFLEAKGYKEVKKDLIIKLPKYSLFELENGRKRMLASAGELQKGNELALPSKYVNFLYLASHYEKLKGSPEDNEQKQLFVEQHKHYLDEIIEQISEFSKRVILADANLDKVLSAYNKHRDKPIREQAENIIHLFTLTNLGAPAAFKYFDTTIDRKRYTSTKEVLDATLIHQSITGLYETRIDLSQLGGDGGGGGEAAAKGGVQEISDSRPMLHIYLNGRRFLGLLDTGADKTCIAGRDWPANWPIHQTESSLQGLGMACGVARSSQPLRWQHEDKSGIIHPFVIPTLPFTLWGRDIMKDIKVRLMTDSPDDSQDLMIGAIESNLFADQISWKSDQPVWLNQWPLKQEKLQALQQLVTEQLQLGHLEESNSPWNTPVFVIKKKSGKWRLLQDLRAVNATMHDMGALQPGLPSPVAVPKGWEIIIIDLQDCFFNIKLHPEDCKRFAFSVPSPNFKRPYQRFQWKVLPQGMKNSPTLCQKFVDKAILTVRDKYQDSYIVHYMDDILLAHPSRSIVDEILTSMIQALNKHGLVVSTEKIQKYDNLKYLGTHIQGDSVSYQKLQIRTDKLRTLNDFQKLLGNINWIRPFLKLTTGELKPLFEILNGDSNPISTRKLTPEACKALQLMNERLSTARVKRLDLSQPWSLCILKTEYTPTACLWQDGVVEWIHLPHISPKVITPYDIFCTQLIIKGRHRSKELFSKDPDYIVVPYTKVQFDLLLQEKEDWPISLLGFLGEVHFHLPKDPLLTFTLQTAIIFPHMTSTTPLEKGIVIFTDGSANGRSVTYIQGREPIIKENTQNTAQQAEIVAVITAFEEVSQPFNLYTDSKYVTGLFPEIETATLSPRTKIYTELKHLQRLIHKRQEKFYIGHIRGHTGLPGPLAQGNAYADSLTRILTAAGKRTADGSEFEKRTADGSEFESPKKKAKVE

SEQ ID NO: 3168 - protein, 2111 aa, synthetic construct
MPAAKRVKLDGGDKKYSIGLDIGTNSVGWAVITDEYKVPSKKFKVLGNTDRHSIKKNLIGALLFDSGETAEATRLKRTARRRYTRRKNRICYLQEIFSNEMAKVDDSFFHRLEESFLVEEDKKHERHPIFGNIVDEVAYHEKYPTIYHLRKKLVDSTDKADLRLIYLALAHMIKFRGHFLIEGDLNPDNSDVDKLFIQLVQTYNQLFEENPINASGVDAKAILSARLSKSRRLENLIAQLPGEKKNGLFGNLIALSLGLTPNFKSNFDLAEDAKLQLSKDTYDDDLDNLLAQIGDQYADLFLAAKNLSDAILLSDILRVNTEITKAPLSASMIKRYDEHHQDLTLLKALVRQQLPEKYKEIFFDQSKNGYAGYIDGGASQEEFYKFIKPILEKMDGTEELLVKLNREDLLRKQRTFDNGSIPHQIHLGELHAILRRQEDFYPFLKDNREKIEKILTFRIPYYVGPLARGNSRFAWMTRKSEETITPWNFEEVVDKGASAQSFIERMTNFDKNLPNEKVLPKHSLLYEYFTVYNELTKVKYVTEGMRKPAFLSGEQKKAIVDLLFKTNRKVTVKQLKEDYFKKIECFDSVEISGVEDRFNASLGTYHDLLKIIKDKDFLDNEENEDILEDIVLTLTLFEDREMIEERLKTYAHLFDDKVMKQLKRRRYTGWGRLSRKLINGIRDKQSGKTILDFLKSDGFANRNFMQLIHDDSLTFKEDIQKAQVSGQGDSLHEHIANLAGSPAIKKGILQTVKVVDELVKVMGRHKPENIVIEMARENQTTQKGQKNSRERMKRIEEGIKELGSQILKEHPVENTQLQNEKLYLYYLQNGRDMYVDQELDINRLSDYDVDHIVPQSFLKDDSIDNKVLTRSDKARGKSDNVPSEEVVKKMKNYWRQLLNAKLITQRKFDNLTKAERGGLSELDKAGFIKRQLVETRQITKHVAQILDSRMNTKYDENDKLIREVKVITLKSKLVSDFRKDFQFYKVREINNYHHAHDAYLNAVVGTALIKKYPKLESEFVYGDYKVYDVRKMIAKSEQEIGKATAKYFFYSNIMNFFKTEITLANGEIRKRPLIETNGETGEIVWDKGRDFATVRKVLSMPQVNIVKKTEVQTGGFSKESILPKRNSDKLIARKKDWDPKKYGGFDSPTVAYSVLVVAKVEKGKSKKLKSVKELLGITIMERSSFEKNPIDFLEAKGYKEVKKDLIIKLPKYSLFELENGRKRMLASAGELQKGNELALPSKYVNFLYLASHYEKLKGSPEDNEQKQLFVEQHKHYLDEIIEQISEFSKRVILADANLDKVLSAYNKHRDKPIREQAENIIHLFTLTNLGAPAAFKYFDTTIDRKRYTSTKEVLDATLIHQSITGLYETRIDLSQLGGDGGGGSGGSGGVQEISDSRPMLHIYLNGRRFLGLLDTGADKTCIAGRDWPANWPIHQTESSLQGLGMACGVARSSQPLRWQHEDKSGIIHPFVIPTLPFTLWGRDIMKDIKVRLMTDSPDDSQDLMIGAIESNLFADQISWKSDQPVWLNQWPLKQEKLQALQQLVTEQLQLGHLEESNSPWNTPVFVIKKKSGKWRLLQDLRAVNATMHDMGALQPGLPSPVAVPKGWEIIIIDLQDCFFNIKLHPEDCKRFAFSVPSPNFKRPYQRFQWKVLPQGMKNSPTLCQKFVDKAILTVRDKYQDSYIVHYMDDILLAHPSRSIVDEILTSMIQALNKHGLVVSTEKIQKYDNLKYLGTHIQGDSVSYQKLQIRTDKLRTLNDFQKLLGNINWIRPFLKLTTGELKPLFEILNGDSNPISTRKLTPEACKALQLMNERLSTARVKRLDLSQPWSLCILKTEYTPTACLWQDGVVEWIHLPHISPKVITPYDIFCTQLIIKGRHRSKELFSKDPDYIVVPYTKVQFDLLLQEKEDWPISLLGFLGEVHFHLPKDPLLTFTLQTAIIFPHMTSTTPLEKGIVIFTDGSANGRSVTYIQGREPIIKENTQNTAQQAEIVAVITAFEEVSQPFNLYTDSKYVTGLFPEIETATLSPRTKIYTELKHLQRLIHKRQEKFYIGHIRGHTGLPGPLAQGNAYADSLTRILTAAGKRTADGSEFEKRTADGSEFESPKKKAKVE

SEQ ID NO: 3169 - protein, 2116 aa, synthetic construct
MPAAKRVKLDGGDKKYSIGLDIGTNSVGWAVITDEYKVPSKKFKVLGNTDRHSIKKNLIGALLFDSGETAEATRLKRTARRRYTRRKNRICYLQEIFSNEMAKVDDSFFHRLEESFLVEEDKKHERHPIFGNIVDEVAYHEKYPTIYHLRKKLVDSTDKADLRLIYLALAHMIKFRGHFLIEGDLNPDNSDVDKLFIQLVQTYNQLFEENPINASGVDAKAILSARLSKSRRLENLIAQLPGEKKNGLFGNLIALSLGLTPNFKSNFDLAEDAKLQLSKDTYDDDLDNLLAQIGDQYADLFLAAKNLSDAILLSDILRVNTEITKAPLSASMIKRYDEHHQDLTLLKALVRQQLPEKYKEIFFDQSKNGYAGYIDGGASQEEFYKFIKPILEKMDGTEELLVKLNREDLLRKQRTFDNGSIPHQIHLGELHAILRRQEDFYPFLKDNREKIEKILTFRIPYYVGPLARGNSRFAWMTRKSEETITPWNFEEVVDKGASAQSFIERMTNFDKNLPNEKVLPKHSLLYEYFTVYNELTKVKYVTEGMRKPAFLSGEQKKAIVDLLFKTNRKVTVKQLKEDYFKKIECFDSVEISGVEDRFNASLGTYHDLLKIIKDKDFLDNEENEDILEDIVLTLTLFEDREMIEERLKTYAHLFDDKVMKQLKRRRYTGWGRLSRKLINGIRDKQSGKTILDFLKSDGFANRNFMQLIHDDSLTFKEDIQKAQVSGQGDSLHEHIANLAGSPAIKKGILQTVKVVDELVKVMGRHKPENIVIEMARENQTTQKGQKNSRERMKRIEEGIKELGSQILKEHPVENTQLQNEKLYLYYLQNGRDMYVDQELDINRLSDYDVDHIVPQSFLKDDSIDNKVLTRSDKARGKSDNVPSEEVVKKMKNYWRQLLNAKLITQRKFDNLTKAERGGLSELDKAGFIKRQLVETRQITKHVAQILDSRMNTKYDENDKLIREVKVITLKSKLVSDFRKDFQFYKVREINNYHHAHDAYLNAVVGTALIKKYPKLESEFVYGDYKVYDVRKMIAKSEQEIGKATAKYFFYSNIMNFFKTEITLANGEIRKRPLIETNGETGEIVWDKGRDFATVRKVLSMPQVNIVKKTEVQTGGFSKESILPKRNSDKLIARKKDWDPKKYGGFDSPTVAYSVLVVAKVEKGKSKKLKSVKELLGITIMERSSFEKNPIDFLEAKGYKEVKKDLIIKLPKYSLFELENGRKRMLASAGELQKGNELALPSKYVNFLYLASHYEKLKGSPEDNEQKQLFVEQHKHYLDEIIEQISEFSKRVILADANLDKVLSAYNKHRDKPIREQAENIIHLFTLTNLGAPAAFKYFDTTIDRKRYTSTKEVLDATLIHQSITGLYETRIDLSQLGGDGGPAPAPAPAPAPGGVQEISDSRPMLHIYLNGRRFLGLLDTGADKTCIAGRDWPANWPIHQTESSLQGLGMACGVARSSQPLRWQHEDKSGIIHPFVIPTLPFTLWGRDIMKDIKVRLMTDSPDDSQDLMIGAIESNLFADQISWKSDQPVWLNQWPLKQEKLQALQQLVTEQLQLGHLEESNSPWNTPVFVIKKKSGKWRLLQDLRAVNATMHDMGALQPGLPSPVAVPKGWEIIIIDLQDCFFNIKLHPEDCKRFAFSVPSPNFKRPYQRFQWKVLPQGMKNSPTLCQKFVDKAILTVRDKYQDSYIVHYMDDILLAHPSRSIVDEILTSMIQALNKHGLVVSTEKIQKYDNLKYLGTHIQGDSVSYQKLQIRTDKLRTLNDFQKLLGNINWIRPFLKLTTGELKPLFEILNGDSNPISTRKLTPEACKALQLMNERLSTARVKRLDLSQPWSLCILKTEYTPTACLWQDGVVEWIHLPHISPKVITPYDIFCTQLIIKGRHRSKELFSKDPDYIVVPYTKVQFDLLLQEKEDWPISLLGFLGEVHFHLPKDPLLTFTLQTAIIFPHMTSTTPLEKGIVIFTDGSANGRSVTYIQGREPIIKENTQNTAQQAEIVAVITAFEEVSQPFNLYTDSKYVTGLFPEIETATLSPRTKIYTELKHLQRLIHKRQEKFYIGHIRGHTGLPGPLAQGNAYADSLTRILTAAGKRTADGSEFEKRTADGSEFESPKKKAKVE

SEQ ID NO: 3170 - protein, 2116 aa, synthetic construct
MPAAKRVKLDGGDKKYSIGLDIGTNSVGWAVITDEYKVPSKKFKVLGNTDRHSIKKNLIGALLFDSGETAEATRLKRTARRRYTRRKNRICYLQEIFSNEMAKVDDSFFHRLEESFLVEEDKKHERHPIFGNIVDEVAYHEKYPTIYHLRKKLVDSTDKADLRLIYLALAHMIKFRGHFLIEGDLNPDNSDVDKLFIQLVQTYNQLFEENPINASGVDAKAILSARLSKSRRLENLIAQLPGEKKNGLFGNLIALSLGLTPNFKSNFDLAEDAKLQLSKDTYDDDLDNLLAQIGDQYADLFLAAKNLSDAILLSDILRVNTEITKAPLSASMIKRYDEHHQDLTLLKALVRQQLPEKYKEIFFDQSKNGYAGYIDGGASQEEFYKFIKPILEKMDGTEELLVKLNREDLLRKQRTFDNGSIPHQIHLGELHAILRRQEDFYPFLKDNREKIEKILTFRIPYYVGPLARGNSRFAWMTRKSEETITPWNFEEVVDKGASAQSFIERMTNFDKNLPNEKVLPKHSLLYEYFTVYNELTKVKYVTEGMRKPAFLSGEQKKAIVDLLFKTNRKVTVKQLKEDYFKKIECFDSVEISGVEDRFNASLGTYHDLLKIIKDKDFLDNEENEDILEDIVLTLTLFEDREMIEERLKTYAHLFDDKVMKQLKRRRYTGWGRLSRKLINGIRDKQSGKTILDFLKSDGFANRNFMQLIHDDSLTFKEDIQKAQVSGQGDSLHEHIANLAGSPAIKKGILQTVKVVDELVKVMGRHKPENIVIEMARENQTTQKGQKNSRERMKRIEEGIKELGSQILKEHPVENTQLQNEKLYLYYLQNGRDMYVDQELDINRLSDYDVDHIVPQSFLKDDSIDNKVLTRSDKARGKSDNVPSEEVVKKMKNYWRQLLNAKLITQRKFDNLTKAERGGLSELDKAGFIKRQLVETRQITKHVAQILDSRMNTKYDENDKLIREVKVITLKSKLVSDFRKDFQFYKVREINNYHHAHDAYLNAVVGTALIKKYPKLESEFVYGDYKVYDVRKMIAKSEQEIGKATAKYFFYSNIMNFFKTEITLANGEIRKRPLIETNGETGEIVWDKGRDFATVRKVLSMPQVNIVKKTEVQTGGFSKESILPKRNSDKLIARKKDWDPKKYGGFDSPTVAYSVLVVAKVEKGKSKKLKSVKELLGITIMERSSFEKNPIDFLEAKGYKEVKKDLIIKLPKYSLFELENGRKRMLASAGELQKGNELALPSKYVNFLYLASHYEKLKGSPEDNEQKQLFVEQHKHYLDEIIEQISEFSKRVILADANLDKVLSAYNKHRDKPIREQAENIIHLFTLTNLGAPAAFKYFDTTIDRKRYTSTKEVLDATLIHQSITGLYETRIDLSQLGGDGGGGSEAAAKPAPGGVQEISDSRPMLHIYLNGRRFLGLLDTGADKTCIAGRDWPANWPIHQTESSLQGLGMACGVARSSQPLRWQHEDKSGIIHPFVIPTLPFTLWGRDIMKDIKVRLMTDSPDDSQDLMIGAIESNLFADQISWKSDQPVWLNQWPLKQEKLQALQQLVTEQLQLGHLEESNSPWNTPVFVIKKKSGKWRLLQDLRAVNATMHDMGALQPGLPSPVAVPKGWEIIIIDLQDCFFNIKLHPEDCKRFAFSVPSPNFKRPYQRFQWKVLPQGMKNSPTLCQKFVDKAILTVRDKYQDSYIVHYMDDILLAHPSRSIVDEILTSMIQALNKHGLVVSTEKIQKYDNLKYLGTHIQGDSVSYQKLQIRTDKLRTLNDFQKLLGNINWIRPFLKLTTGELKPLFEILNGDSNPISTRKLTPEACKALQLMNERLSTARVKRLDLSQPWSLCILKTEYTPTACLWQDGVVEWIHLPHISPKVITPYDIFCTQLIIKGRHRSKELFSKDPDYIVVPYTKVQFDLLLQEKEDWPISLLGFLGEVHFHLPKDPLLTFTLQTAIIFPHMTSTTPLEKGIVIFTDGSANGRSVTYIQGREPIIKENTQNTAQQAEIVAVITAFEEVSQPFNLYTDSKYVTGLFPEIETATLSPRTKIYTELKHLQRLIHKRQEKFYIGHIRGHTGLPGPLAQGNAYADSLTRILTAAGKRTADGSEFEKRTADGSEFESPKKKAKVE

SEQ ID NO: 3171 - protein, 2116 aa, synthetic construct
MPAAKRVKLDGGDKKYSIGLDIGTNSVGWAVITDEYKVPSKKFKVLGNTDRHSIKKNLIGALLFDSGETAEATRLKRTARRRYTRRKNRICYLQEIFSNEMAKVDDSFFHRLEESFLVEEDKKHERHPIFGNIVDEVAYHEKYPTIYHLRKKLVDSTDKADLRLIYLALAHMIKFRGHFLIEGDLNPDNSDVDKLFIQLVQTYNQLFEENPINASGVDAKAILSARLSKSRRLENLIAQLPGEKKNGLFGNLIALSLGLTPNFKSNFDLAEDAKLQLSKDTYDDDLDNLLAQIGDQYADLFLAAKNLSDAILLSDILRVNTEITKAPLSASMIKRYDEHHQDLTLLKALVRQQLPEKYKEIFFDQSKNGYAGYIDGGASQEEFYKFIKPILEKMDGTEELLVKLNREDLLRKQRTFDNGSIPHQIHLGELHAILRRQEDFYPFLKDNREKIEKILTFRIPYYVGPLARGNSRFAWMTRKSEETITPWNFEEVVDKGASAQSFIERMTNFDKNLPNEKVLPKHSLLYEYFTVYNELTKVKYVTEGMRKPAFLSGEQKKAIVDLLFKTNRKVTVKQLKEDYFKKIECFDSVEISGVEDRFNASLGTYHDLLKIIKDKDFLDNEENEDILEDIVLTLTLFEDREMIEERLKTYAHLFDDKVMKQLKRRRYTGWGRLSRKLINGIRDKQSGKTILDFLKSDGFANRNFMQLIHDDSLTFKEDIQKAQVSGQGDSLHEHIANLAGSPAIKKGILQTVKVVDELVKVMGRHKPENIVIEMARENQTTQKGQKNSRERMKRIEEGIKELGSQILKEHPVENTQLQNEKLYLYYLQNGRDMYVDQELDINRLSDYDVDHIVPQSFLKDDSIDNKVLTRSDKARGKSDNVPSEEVVKKMKNYWRQLLNAKLITQRKFDNLTKAERGGLSELDKAGFIKRQLVETRQITKHVAQILDSRMNTKYDENDKLIREVKVITLKSKLVSDFRKDFQFYKVREINNYHHAHDAYLNAVVGTALIKKYPKLESEFVYGDYKVYDVRKMIAKSEQEIGKATAKYFFYSNIMNFFKTEITLANGEIRKRPLIETNGETGEIVWDKGRDFATVRKVLSMPQVNIVKKTEVQTGGFSKESILPKRNSDKLIARKKDWDPKKYGGFDSPTVAYSVLVVAKVEKGKSKKLKSVKELLGITIMERSSFEKNPIDFLEAKGYKEVKKDLIIKLPKYSLFELENGRKRMLASAGELQKGNELALPSKYVNFLYLASHYEKLKGSPEDNEQKQLFVEQHKHYLDEIIEQISEFSKRVILADANLDKVLSAYNKHRDKPIREQAENIIHLFTLTNLGAPAAFKYFDTTIDRKRYTSTKEVLDATLIHQSITGLYETRIDLSQLGGDGGEAAAKGSSGGSGGWVQEISDSRPMLHIYLNGRRFLGLLNTGADKTCIAGRDWPANWPIHQTESSLQGLGMACGVARSSQPLRWQHEDKSGIIHPFVIPTLPFTLWGRDIMKDIKVRLMTDSPDDSQDLMIGAIESNLFADQISWKSDQPVWLNQWPLKQEKLQALQQLVTEQLQLGHLEESNSPWNTPVFVIKKKSGKWRLLQDLRAVNATMHDMGALQPGLPSPVAVPKGWEIIIIDLQDCFFNIKLHPEDCKRFAFSVPSPNFKRPYQRFQWKVLPQGMKNSPTLCQKFVDKAILTVRDKYQDSYIVHYMDDILLAHPSRSIVDEILTSMIQALNKHGLVVSTEKIQKYDNLKYLGTHIQGDSVSYQKLQIRTDKLRTLNDFQKLLGNINWIRPFLKLTTGELKPLFEILNGDSNPISTRKLTPEACKALQLMNERLSTARVKRLDLSQPWSLCILKTEYTPTACLWQDGVVEWIHLPHISPKVITPYDIFCTQLIIKGRHRSKELFSKDPDYIVVPYTKVQFDLLLQEKEDWPISLLGFLGEVHFHLPKDPLLTFTLQTAIIFPHMTSTTPLEKGIVIFTDGSANGRSVTYIQGREPIIKENTQNTAQQAEIVAVITAFEEVSQPFNLYTDSKYVTGLFPEIETATLSPRTKIYTELKHLQRLIHKRQEKFYIGHIRGHTGLPGPLAQGNAYADSLTRILTAGKRTADGSEFEKRTADGSEFESPKKKAKVE

SEQ ID NO: 3172 - protein, 2135 aa, synthetic construct
MPAAKRVKLDGGDKKYSIGLDIGTNSVGWAVITDEYKVPSKKFKVLGNTDRHSIKKNLIGALLFDSGETAEATRLKRTARRRYTRRKNRICYLQEIFSNEMAKVDDSFFHRLEESFLVEEDKKHERHPIFGNIVDEVAYHEKYPTIYHLRKKLVDSTDKADLRLIYLALAHMIKFRGHFLIEGDLNPDNSDVDKLFIQLVQTYNQLFEENPINASGVDAKAILSARLSKSRRLENLIAQLPGEKKNGLFGNLIALSLGLTPNFKSNFDLAEDAKLQLSKDTYDDDLDNLLAQIGDQYADLFLAAKNLSDAILLSDILRVNTEITKAPLSASMIKRYDEHHQDLTLLKALVRQQLPEKYKEIFFDQSKNGYAGYIDGGASQEEFYKFIKPILEKMDGTEELLVKLNREDLLRKQRTFDNGSIPHQIHLGELHAILRRQEDFYPFLKDNREKIEKILTFRIPYYVGPLARGNSRFAWMTRKSEETITPWNFEEVVDKGASAQSFIERMTNFDKNLPNEKVLPKHSLLYEYFTVYNELTKVKYVTEGMRKPAFLSGEQKKAIVDLLFKTNRKVTVKQLKEDYFKKIECFDSVEISGVEDRFNASLGTYHDLLKIIKDKDFLDNEENEDILEDIVLTLTLFEDREMIEERLKTYAHLFDDKVMKQLKRRRYTGWGRLSRKLINGIRDKQSGKTILDFLKSDGFANRNFMQLIHDDSLTFKEDIQKAQVSGQGDSLHEHIANLAGSPAIKKGILQTVKVVDELVKVMGRHKPENIVIEMARENQTTQKGQKNSRERMKRIEEGIKELGSQILKEHPVENTQLQNEKLYLYYLQNGRDMYVDQELDINRLSDYDVDHIVPQSFLKDDSIDNKVLTRSDKARGKSDNVPSEEVVKKMKNYWRQLLNAKLITQRKFDNLTKAERGGLSELDKAGFIKRQLVETRQITKHVAQILDSRMNTKYDENDKLIREVKVITLKSKLVSDFRKDFQFYKVREINNYHHAHDAYLNAVVGTALIKKYPKLESEFVYGDYKVYDVRKMIAKSEQEIGKATAKYFFYSNIMNFFKTEITLANGEIRKRPLIETNGETGEIVWDKGRDFATVRKVLSMPQVNIVKKTEVQTGGFSKESILPKRNSDKLIARKKDWDPKKYGGFDSPTVAYSVLVVAKVEKGKSKKLKSVKELLGITIMERSSFEKNPIDFLEAKGYKEVKKDLIIKLPKYSLFELENGRKRMLASAGELQKGNELALPSKYVNFLYLASHYEKLKGSPEDNEQKQLFVEQHKHYLDEIIEQISEFSKRVILADANLDKVLSAYNKHRDKPIREQAENIIHLFTLTNLGAPAAFKYFDTTIDRKRYTSTKEVLDATLIHQSITGLYETRIDLSQLGGDGGEAAAKEAAAKEAAAKEAAAKEAAAKEAAAKGGWVQEISDSRPMLHIYLNGRRFLGLLNTGADKTCIAGRDWPANWPIHQTESSLQGLGMACGVARSSQPLRWQHEDKSGIIHPFVIPTLPFTLWGRDIMKDIKVRLMTDSPDDSQDLMIGAIESNLFADQISWKSDQPVWLNQWPLKQEKLQALQQLVTEQLQLGHLEESNSPWNTPVFVIKKKSGKWRLLQDLRAVNATMHDMGALQPGLPSPVAVPKGWEIIIIDLQDCFFNIKLHPEDCKRFAFSVPSPNFKRPYQRFQWKVLPQGMKNSPTLCQKFVDKAILTVRDKYQDSYIVHYMDDILLAHPSRSIVDEILTSMIQALNKHGLVVSTEKIQKYDNLKYLGTHIQGDSVSYQKLQIRTDKLRTLNDFQKLLGNINWIRPFLKLTTGELKPLFEILNGDSNPISTRKLTPEACKALQLMNERLSTARVKRLDLSQPWSLCILKTEYTPTACLWQDGVVEWIHLPHISPKVITPYDIFCTQLIIKGRHRSKELFSKDPDYIVVPYTKVQFDLLLQEKEDWPISLLGFLGEVHFHLPKDPLLTFTLQTAIIFPHMTSTTPLEKGIVIFTDGSANGRSVTYIQGREPIIKENTQNTAQQAEIVAVITAFEEVSQPFNLYTDSKYVTGLFPEIETATLSPRTKIYTELKHLQRLIHKRQEKFYIGHIRGHTGLPGPLAQGNAYADSLTRILTAGKRTADGSEFEKRTADGSEFESPKKKAKVE

SEQ ID NO: 3173 - protein, 2135 aa, synthetic construct
MPAAKRVKLDGGDKKYSIGLDIGTNSVGWAVITDEYKVPSKKFKVLGNTDRHSIKKNLIGALLFDSGETAEATRLKRTARRRYTRRKNRICYLQEIFSNEMAKVDDSFFHRLEESFLVEEDKKHERHPIFGNIVDEVAYHEKYPTIYHLRKKLVDSTDKADLRLIYLALAHMIKFRGHFLIEGDLNPDNSDVDKLFIQLVQTYNQLFEENPINASGVDAKAILSARLSKSRRLENLIAQLPGEKKNGLFGNLIALSLGLTPNFKSNFDLAEDAKLQLSKDTYDDDLDNLLAQIGDQYADLFLAAKNLSDAILLSDILRVNTEITKAPLSASMIKRYDEHHQDLTLLKALVRQQLPEKYKEIFFDQSKNGYAGYIDGGASQEEFYKFIKPILEKMDGTEELLVKLNREDLLRKQRTFDNGSIPHQIHLGELHAILRRQEDFYPFLKDNREKIEKILTFRIPYYVGPLARGNSRFAWMTRKSEETITPWNFEEVVDKGASAQSFIERMTNFDKNLPNEKVLPKHSLLYEYFTVYNELTKVKYVTEGMRKPAFLSGEQKKAIVDLLFKTNRKVTVKQLKEDYFKKIECFDSVEISGVEDRFNASLGTYHDLLKIIKDKDFLDNEENEDILEDIVLTLTLFEDREMIEERLKTYAHLFDDKVMKQLKRRRYTGWGRLSRKLINGIRDKQSGKTILDFLKSDGFANRNFMQLIHDDSLTFKEDIQKAQVSGQGDSLHEHIANLAGSPAIKKGILQTVKVVDELVKVMGRHKPENIVIEMARENQTTQKGQKNSRERMKRIEEGIKELGSQILKEHPVENTQLQNEKLYLYYLQNGRDMYVDQELDINRLSDYDVDHIVPQSFLKDDSIDNKVLTRSDKARGKSDNVPSEEVVKKMKNYWRQLLNAKLITQRKFDNLTKAERGGLSELDKAGFIKRQLVETRQITKHVAQILDSRMNTKYDENDKLIREVKVITLKSKLVSDFRKDFQFYKVREINNYHHAHDAYLNAVVGTALIKKYPKLESEFVYGDYKVYDVRKMIAKSEQEIGKATAKYFFYSNIMNFFKTEITLANGEIRKRPLIETNGETGEIVWDKGRDFATVRKVLSMPQVNIVKKTEVQTGGFSKESILPKRNSDKLIARKKDWDPKKYGGFDSPTVAYSVLVVAKVEKGKSKKLKSVKELLGITIMERSSFEKNPIDFLEAKGYKEVKKDLIIKLPKYSLFELENGRKRMLASAGELQKGNELALPSKYVNFLYLASHYEKLKGSPEDNEQKQLFVEQHKHYLDEIIEQISEFSKRVILADANLDKVLSAYNKHRDKPIREQAENIIHLFTLTNLGAPAAFKYFDTTIDRKRYTSTKEVLDATLIHQSITGLYETRIDLSQLGGDGGGGGGSGGGGSGGGGSGGGGSGGGGSGGGGSGGWVQEISDSRPMLHIYLNGRRFLGLLNTGADKTCIAGRDWPANWPIHQTESSLQGLGMACGVARSSQPLRWQHEDKSGIIHPFVIPTLPFTLWGRDIMKDIKVRLMTDSPDDSQDLMIGAIESNLFADQISWKSDQPVWLNQWPLKQEKLQALQQLVTEQLQLGHLEESNSPWNTPVFVIKKKSGKWRLLQDLRAVNATMHDMGALQPGLPSPVAVPKGWEIIIIDLQDCFFNIKLHPEDCKRFAFSVPSPNFKRPYQRFQWKVLPQGMKNSPTLCQKFVDKAILTVRDKYQDSYIVHYMDDILLAHPSRSIVDEILTSMIQALNKHGLVVSTEKIQKYDNLKYLGTHIQGDSVSYQKLQIRTDKLRTLNDFQKLLGNINWIRPFLKLTTGELKPLFEILNGDSNPISTRKLTPEACKALQLMNERLSTARVKRLDLSQPWSLCILKTEYTPTACLWQDGVVEWIHLPHISPKVITPYDIFCTQLIIKGRHRSKELFSKDPDYIVVPYTKVQFDLLLQEKEDWPISLLGFLGEVHFHLPKDPLLTFTLQTAIIFPHMTSTTPLEKGIVIFTDGSANGRSVTYIQGREPIIKENTQNTAQQAEIVAVITAFEEVSQPFNLYTDSKYVTGLFPEIETATLSPRTKIYTELKHLQRLIHKRQEKFYIGHIRGHTGLPGPLAQGNAYADSLTRILTAGKRTADGSEFEKRTADGSEFESPKKKAKVE

SEQ ID NO: 3174 - protein, 2130 aa, synthetic construct
MPAAKRVKLDGGDKKYSIGLDIGTNSVGWAVITDEYKVPSKKFKVLGNTDRHSIKKNLIGALLFDSGETAEATRLKRTARRRYTRRKNRICYLQEIFSNEMAKVDDSFFHRLEESFLVEEDKKHERHPIFGNIVDEVAYHEKYPTIYHLRKKLVDSTDKADLRLIYLALAHMIKFRGHFLIEGDLNPDNSDVDKLFIQLVQTYNQLFEENPINASGVDAKAILSARLSKSRRLENLIAQLPGEKKNGLFGNLIALSLGLTPNFKSNFDLAEDAKLQLSKDTYDDDLDNLLAQIGDQYADLFLAAKNLSDAILLSDILRVNTEITKAPLSASMIKRYDEHHQDLTLLKALVRQQLPEKYKEIFFDQSKNGYAGYIDGGASQEEFYKFIKPILEKMDGTEELLVKLNREDLLRKQRTFDNGSIPHQIHLGELHAILRRQEDFYPFLKDNREKIEKILTFRIPYYVGPLARGNSRFAWMTRKSEETITPWNFEEVVDKGASAQSFIERMTNFDKNLPNEKVLPKHSLLYEYFTVYNELTKVKYVTEGMRKPAFLSGEQKKAIVDLLFKTNRKVTVKQLKEDYFKKIECFDSVEISGVEDRFNASLGTYHDLLKIIKDKDFLDNEENEDILEDIVLTLTLFEDREMIEERLKTYAHLFDDKVMKQLKRRRYTGWGRLSRKLINGIRDKQSGKTILDFLKSDGFANRNFMQLIHDDSLTFKEDIQKAQVSGQGDSLHEHIANLAGSPAIKKGILQTVKVVDELVKVMGRHKPENIVIEMARENQTTQKGQKNSRERMKRIEEGIKELGSQILKEHPVENTQLQNEKLYLYYLQNGRDMYVDQELDINRLSDYDVDHIVPQSFLKDDSIDNKVLTRSDKARGKSDNVPSEEVVKKMKNYWRQLLNAKLITQRKFDNLTKAERGGLSELDKAGFIKRQLVETRQITKHVAQILDSRMNTKYDENDKLIREVKVITLKSKLVSDFRKDFQFYKVREINNYHHAHDAYLNAVVGTALIKKYPKLESEFVYGDYKVYDVRKMIAKSEQEIGKATAKYFFYSNIMNFFKTEITLANGEIRKRPLIETNGETGEIVWDKGRDFATVRKVLSMPQVNIVKKTEVQTGGFSKESILPKRNSDKLIARKKDWDPKKYGGFDSPTVAYSVLVVAKVEKGKSKKLKSVKELLGITIMERSSFEKNPIDFLEAKGYKEVKKDLIIKLPKYSLFELENGRKRMLASAGELQKGNELALPSKYVNFLYLASHYEKLKGSPEDNEQKQLFVEQHKHYLDEIIEQISEFSKRVILADANLDKVLSAYNKHRDKPIREQAENIIHLFTLTNLGAPAAFKYFDTTIDRKRYTSTKEVLDATLIHQSITGLYETRIDLSQLGGDGGEAAAKEAAAKEAAAKEAAAKEAAAKGGWVQEISDSRPMLHIYLNGRRFLGLLNTGADKTCIAGRDWPANWPIHQTESSLQGLGMACGVARSSQPLRWQHEDKSGIIHPFVIPTLPFTLWGRDIMKDIKVRLMTDSPDDSQDLMIGAIESNLFADQISWKSDQPVWLNQWPLKQEKLQALQQLVTEQLQLGHLEESNSPWNTPVFVIKKKSGKWRLLQDLRAVNATMHDMGALQPGLPSPVAVPKGWEIIIIDLQDCFFNIKLHPEDCKRFAFSVPSPNFKRPYQRFQWKVLPQGMKNSPTLCQKFVDKAILTVRDKYQDSYIVHYMDDILLAHPSRSIVDEILTSMIQALNKHGLVVSTEKIQKYDNLKYLGTHIQGDSVSYQKLQIRTDKLRTLNDFQKLLGNINWIRPFLKLTTGELKPLFEILNGDSNPISTRKLTPEACKALQLMNERLSTARVKRLDLSQPWSLCILKTEYTPTACLWQDGVVEWIHLPHISPKVITPYDIFCTQLIIKGRHRSKELFSKDPDYIVVPYTKVQFDLLLQEKEDWPISLLGFLGEVHFHLPKDPLLTFTLQTAIIFPHMTSTTPLEKGIVIFTDGSANGRSVTYIQGREPIIKENTQNTAQQAEIVAVITAFEEVSQPFNLYTDSKYVTGLFPEIETATLSPRTKIYTELKHLQRLIHKRQEKFYIGHIRGHTGLPGPLAQGNAYADSLTRILTAGKRTADGSEFEKRTADGSEFESPKKKAKVE

SEQ ID NO: 3175 - protein, 2116 aa, synthetic construct
MPAAKRVKLDGGDKKYSIGLDIGTNSVGWAVITDEYKVPSKKFKVLGNTDRHSIKKNLIGALLFDSGETAEATRLKRTARRRYTRRKNRICYLQEIFSNEMAKVDDSFFHRLEESFLVEEDKKHERHPIFGNIVDEVAYHEKYPTIYHLRKKLVDSTDKADLRLIYLALAHMIKFRGHFLIEGDLNPDNSDVDKLFIQLVQTYNQLFEENPINASGVDAKAILSARLSKSRRLENLIAQLPGEKKNGLFGNLIALSLGLTPNFKSNFDLAEDAKLQLSKDTYDDDLDNLLAQIGDQYADLFLAAKNLSDAILLSDILRVNTEITKAPLSASMIKRYDEHHQDLTLLKALVRQQLPEKYKEIFFDQSKNGYAGYIDGGASQEEFYKFIKPILEKMDGTEELLVKLNREDLLRKQRTFDNGSIPHQIHLGELHAILRRQEDFYPFLKDNREKIEKILTFRIPYYVGPLARGNSRFAWMTRKSEETITPWNFEEVVDKGASAQSFIERMTNFDKNLPNEKVLPKHSLLYEYFTVYNELTKVKYVTEGMRKPAFLSGEQKKAIVDLLFKTNRKVTVKQLKEDYFKKIECFDSVEISGVEDRFNASLGTYHDLLKIIKDKDFLDNEENEDILEDIVLTLTLFEDREMIEERLKTYAHLFDDKVMKQLKRRRYTGWGRLSRKLINGIRDKQSGKTILDFLKSDGFANRNFMQLIHDDSLTFKEDIQKAQVSGQGDSLHEHIANLAGSPAIKKGILQTVKVVDELVKVMGRHKPENIVIEMARENQTTQKGQKNSRERMKRIEEGIKELGSQILKEHPVENTQLQNEKLYLYYLQNGRDMYVDQELDINRLSDYDVDHIVPQSFLKDDSIDNKVLTRSDKARGKSDNVPSEEVVKKMKNYWRQLLNAKLITQRKFDNLTKAERGGLSELDKAGFIKRQLVETRQITKHVAQILDSRMNTKYDENDKLIREVKVITLKSKLVSDFRKDFQFYKVREINNYHHAHDAYLNAVVGTALIKKYPKLESEFVYGDYKVYDVRKMIAKSEQEIGKATAKYFFYSNIMNFFKTEITLANGEIRKRPLIETNGETGEIVWDKGRDFATVRKVLSMPQVNIVKKTEVQTGGFSKESILPKRNSDKLIARKKDWDPKKYGGFDSPTVAYSVLVVAKVEKGKSKKLKSVKELLGITIMERSSFEKNPIDFLEAKGYKEVKKDLIIKLPKYSLFELENGRKRMLASAGELQKGNELALPSKYVNFLYLASHYEKLKGSPEDNEQKQLFVEQHKHYLDEIIEQISEFSKRVILADANLDKVLSAYNKHRDKPIREQAENIIHLFTLTNLGAPAAFKYFDTTIDRKRYTSTKEVLDATLIHQSITGLYETRIDLSQLGGDGGPAPAPAPAPAPGGWVQEISDSRPMLHIYLNGRRFLGLLNTGADKTCIAGRDWPANWPIHQTESSLQGLGMACGVARSSQPLRWQHEDKSGIIHPFVIPTLPFTLWGRDIMKDIKVRLMTDSPDDSQDLMIGAIESNLFADQISWKSDQPVWLNQWPLKQEKLQALQQLVTEQLQLGHLEESNSPWNTPVFVIKKKSGKWRLLQDLRAVNATMHDMGALQPGLPSPVAVPKGWEIIIIDLQDCFFNIKLHPEDCKRFAFSVPSPNFKRPYQRFQWKVLPQGMKNSPTLCQKFVDKAILTVRDKYQDSYIVHYMDDILLAHPSRSIVDEILTSMIQALNKHGLVVSTEKIQKYDNLKYLGTHIQGDSVSYQKLQIRTDKLRTLNDFQKLLGNINWIRPFLKLTTGELKPLFEILNGDSNPISTRKLTPEACKALQLMNERLSTARVKRLDLSQPWSLCILKTEYTPTACLWQDGVVEWIHLPHISPKVITPYDIFCTQLIIKGRHRSKELFSKDPDYIVVPYTKVQFDLLLQEKEDWPISLLGFLGEVHFHLPKDPLLTFTLQTAIIFPHMTSTTPLEKGIVIFTDGSANGRSVTYIQGREPIIKENTQNTAQQAEIVAVITAFEEVSQPFNLYTDSKYVTGLFPEIETATLSPRTKIYTELKHLQRLIHKRQEKFYIGHIRGHTGLPGPLAQGNAYADSLTRILTAGKRTADGSEFEKRTADGSEFESPKKKAKVE

SEQ ID NO: 3176 - protein, 2114 aa, synthetic construct
MPAAKRVKLDGGDKKYSIGLDIGTNSVGWAVITDEYKVPSKKFKVLGNTDRHSIKKNLIGALLFDSGETAEATRLKRTARRRYTRRKNRICYLQEIFSNEMAKVDDSFFHRLEESFLVEEDKKHERHPIFGNIVDEVAYHEKYPTIYHLRKKLVDSTDKADLRLIYLALAHMIKFRGHFLIEGDLNPDNSDVDKLFIQLVQTYNQLFEENPINASGVDAKAILSARLSKSRRLENLIAQLPGEKKNGLFGNLIALSLGLTPNFKSNFDLAEDAKLQLSKDTYDDDLDNLLAQIGDQYADLFLAAKNLSDAILLSDILRVNTEITKAPLSASMIKRYDEHHQDLTLLKALVRQQLPEKYKEIFFDQSKNGYAGYIDGGASQEEFYKFIKPILEKMDGTEELLVKLNREDLLRKQRTFDNGSIPHQIHLGELHAILRRQEDFYPFLKDNREKIEKILTFRIPYYVGPLARGNSRFAWMTRKSEETITPWNFEEVVDKGASAQSFIERMTNFDKNLPNEKVLPKHSLLYEYFTVYNELTKVKYVTEGMRKPAFLSGEQKKAIVDLLFKTNRKVTVKQLKEDYFKKIECFDSVEISGVEDRFNASLGTYHDLLKIIKDKDFLDNEENEDILEDIVLTLTLFEDREMIEERLKTYAHLFDDKVMKQLKRRRYTGWGRLSRKLINGIRDKQSGKTILDFLKSDGFANRNFMQLIHDDSLTFKEDIQKAQVSGQGDSLHEHIANLAGSPAIKKGILQTVKVVDELVKVMGRHKPENIVIEMARENQTTQKGQKNSRERMKRIEEGIKELGSQILKEHPVENTQLQNEKLYLYYLQNGRDMYVDQELDINRLSDYDVDHIVPQSFLKDDSIDNKVLTRSDKARGKSDNVPSEEVVKKMKNYWRQLLNAKLITQRKFDNLTKAERGGLSELDKAGFIKRQLVETRQITKHVAQILDSRMNTKYDENDKLIREVKVITLKSKLVSDFRKDFQFYKVREINNYHHAHDAYLNAVVGTALIKKYPKLESEFVYGDYKVYDVRKMIAKSEQEIGKATAKYFFYSNIMNFFKTEITLANGEIRKRPLIETNGETGEIVWDKGRDFATVRKVLSMPQVNIVKKTEVQTGGFSKESILPKRNSDKLIARKKDWDPKKYGGFDSPTVAYSVLVVAKVEKGKSKKLKSVKELLGITIMERSSFEKNPIDFLEAKGYKEVKKDLIIKLPKYSLFELENGRKRMLASAGELQKGNELALPSKYVNFLYLASHYEKLKGSPEDNEQKQLFVEQHKHYLDEIIEQISEFSKRVILADANLDKVLSAYNKHRDKPIREQAENIIHLFTLTNLGAPAAFKYFDTTIDRKRYTSTKEVLDATLIHQSITGLYETRIDLSQLGGDGGPAPGSSGGSGGWVQEISDSRPMLHIYLNGRRFLGLLNTGADKTCIAGRDWPANWPIHQTESSLQGLGMACGVARSSQPLRWQHEDKSGIIHPFVIPTLPFTLWGRDIMKDIKVRLMTDSPDDSQDLMIGAIESNLFADQISWKSDQPVWLNQWPLKQEKLQALQQLVTEQLQLGHLEESNSPWNTPVFVIKKKSGKWRLLQDLRAVNATMHDMGALQPGLPSPVAVPKGWEIIIIDLQDCFFNIKLHPEDCKRFAFSVPSPNFKRPYQRFQWKVLPQGMKNSPTLCQKFVDKAILTVRDKYQDSYIVHYMDDILLAHPSRSIVDEILTSMIQALNKHGLVVSTEKIQKYDNLKYLGTHIQGDSVSYQKLQIRTDKLRTLNDFQKLLGNINWIRPFLKLTTGELKPLFEILNGDSNPISTRKLTPEACKALQLMNERLSTARVKRLDLSQPWSLCILKTEYTPTACLWQDGVVEWIHLPHISPKVITPYDIFCTQLIIKGRHRSKELFSKDPDYIVVPYTKVQFDLLLQEKEDWPISLLGFLGEVHFHLPKDPLLTFTLQTAIIFPHMTSTTPLEKGIVIFTDGSANGRSVTYIQGREPIIKENTQNTAQQAEIVAVITAFEEVSQPFNLYTDSKYVTGLFPEIETATLSPRTKIYTELKHLQRLIHKRQEKFYIGHIRGHTGLPGPLAQGNAYADSLTRILTAGKRTADGSEFEKRTADGSEFESPKKKAKVE

SEQ ID NO: 3177 - protein, 2113 aa, synthetic construct
MPAAKRVKLDGGDKKYSIGLDIGTNSVGWAVITDEYKVPSKKFKVLGNTDRHSIKKNLIGALLFDSGETAEATRLKRTARRRYTRRKNRICYLQEIFSNEMAKVDDSFFHRLEESFLVEEDKKHERHPIFGNIVDEVAYHEKYPTIYHLRKKLVDSTDKADLRLIYLALAHMIKFRGHFLIEGDLNPDNSDVDKLFIQLVQTYNQLFEENPINASGVDAKAILSARLSKSRRLENLIAQLPGEKKNGLFGNLIALSLGLTPNFKSNFDLAEDAKLQLSKDTYDDDLDNLLAQIGDQYADLFLAAKNLSDAILLSDILRVNTEITKAPLSASMIKRYDEHHQDLTLLKALVRQQLPEKYKEIFFDQSKNGYAGYIDGGASQEEFYKFIKPILEKMDGTEELLVKLNREDLLRKQRTFDNGSIPHQIHLGELHAILRRQEDFYPFLKDNREKIEKILTFRIPYYVGPLARGNSRFAWMTRKSEETITPWNFEEVVDKGASAQSFIERMTNFDKNLPNEKVLPKHSLLYEYFTVYNELTKVKYVTEGMRKPAFLSGEQKKAIVDLLFKTNRKVTVKQLKEDYFKKIECFDSVEISGVEDRFNASLGTYHDLLKIIKDKDFLDNEENEDILEDIVLTLTLFEDREMIEERLKTYAHLFDDKVMKQLKRRRYTGWGRLSRKLINGIRDKQSGKTILDFLKSDGFANRNFMQLIHDDSLTFKEDIQKAQVSGQGDSLHEHIANLAGSPAIKKGILQTVKVVDELVKVMGRHKPENIVIEMARENQTTQKGQKNSRERMKRIEEGIKELGSQILKEHPVENTQLQNEKLYLYYLQNGRDMYVDQELDINRLSDYDVDHIVPQSFLKDDSIDNKVLTRSDKARGKSDNVPSEEVVKKMKNYWRQLLNAKLITQRKFDNLTKAERGGLSELDKAGFIKRQLVETRQITKHVAQILDSRMNTKYDENDKLIREVKVITLKSKLVSDFRKDFQFYKVREINNYHHAHDAYLNAVVGTALIKKYPKLESEFVYGDYKVYDVRKMIAKSEQEIGKATAKYFFYSNIMNFFKTEITLANGEIRKRPLIETNGETGEIVWDKGRDFATVRKVLSMPQVNIVKKTEVQTGGFSKESILPKRNSDKLIARKKDWDPKKYGGFDSPTVAYSVLVVAKVEKGKSKKLKSVKELLGITIMERSSFEKNPIDFLEAKGYKEVKKDLIIKLPKYSLFELENGRKRMLASAGELQKGNELALPSKYVNFLYLASHYEKLKGSPEDNEQKQLFVEQHKHYLDEIIEQISEFSKRVILADANLDKVLSAYNKHRDKPIREQAENIIHLFTLTNLGAPAAFKYFDTTIDRKRYTSTKEVLDATLIHQSITGLYETRIDLSQLGGDGGGGGEAAAKGGWVQEISDSRPMLHIYLNGRRFLGLLNTGADKTCIAGRDWPANWPIHQTESSLQGLGMACGVARSSQPLRWQHEDKSGIIHPFVIPTLPFTLWGRDIMKDIKVRLMTDSPDDSQDLMIGAIESNLFADQISWKSDQPVWLNQWPLKQEKLQALQQLVTEQLQLGHLEESNSPWNTPVFVIKKKSGKWRLLQDLRAVNATMHDMGALQPGLPSPVAVPKGWEIIIIDLQDCFFNIKLHPEDCKRFAFSVPSPNFKRPYQRFQWKVLPQGMKNSPTLCQKFVDKAILTVRDKYQDSYIVHYMDDILLAHPSRSIVDEILTSMIQALNKHGLVVSTEKIQKYDNLKYLGTHIQGDSVSYQKLQIRTDKLRTLNDFQKLLGNINWIRPFLKLTTGELKPLFEILNGDSNPISTRKLTPEACKALQLMNERLSTARVKRLDLSQPWSLCILKTEYTPTACLWQDGVVEWIHLPHISPKVITPYDIFCTQLIIKGRHRSKELFSKDPDYIVVPYTKVQFDLLLQEKEDWPISLLGFLGEVHFHLPKDPLLTFTLQTAIIFPHMTSTTPLEKGIVIFTDGSANGRSVTYIQGREPIIKENTQNTAQQAEIVAVITAFEEVSQPFNLYTDSKYVTGLFPEIETATLSPRTKIYTELKHLQRLIHKRQEKFYIGHIRGHTGLPGPLAQGNAYADSLTRILTAGKRTADGSEFEKRTADGSEFESPKKKAKVE

SEQ ID NO: 3178 - protein, 2116 aa, synthetic construct
MPAAKRVKLDGGDKKYSIGLDIGTNSVGWAVITDEYKVPSKKFKVLGNTDRHSIKKNLIGALLFDSGETAEATRLKRTARRRYTRRKNRICYLQEIFSNEMAKVDDSFFHRLEESFLVEEDKKHERHPIFGNIVDEVAYHEKYPTIYHLRKKLVDSTDKADLRLIYLALAHMIKFRGHFLIEGDLNPDNSDVDKLFIQLVQTYNQLFEENPINASGVDAKAILSARLSKSRRLENLIAQLPGEKKNGLFGNLIALSLGLTPNFKSNFDLAEDAKLQLSKDTYDDDLDNLLAQIGDQYADLFLAAKNLSDAILLSDILRVNTEITKAPLSASMIKRYDEHHQDLTLLKALVRQQLPEKYKEIFFDQSKNGYAGYIDGGASQEEFYKFIKPILEKMDGTEELLVKLNREDLLRKQRTFDNGSIPHQIHLGELHAILRRQEDFYPFLKDNREKIEKILTFRIPYYVGPLARGNSRFAWMTRKSEETITPWNFEEVVDKGASAQSFIERMTNFDKNLPNEKVLPKHSLLYEYFTVYNELTKVKYVTEGMRKPAFLSGEQKKAIVDLLFKTNRKVTVKQLKEDYFKKIECFDSVEISGVEDRFNASLGTYHDLLKIIKDKDFLDNEENEDILEDIVLTLTLFEDREMIEERLKTYAHLFDDKVMKQLKRRRYTGWGRLSRKLINGIRDKQSGKTILDFLKSDGFANRNFMQLIHDDSLTFKEDIQKAQVSGQGDSLHEHIANLAGSPAIKKGILQTVKVVDELVKVMGRHKPENIVIEMARENQTTQKGQKNSRERMKRIEEGIKELGSQILKEHPVENTQLQNEKLYLYYLQNGRDMYVDQELDINRLSDYDVDHIVPQSFLKDDSIDNKVLTRSDKARGKSDNVPSEEVVKKMKNYWRQLLNAKLITQRKFDNLTKAERGGLSELDKAGFIKRQLVETRQITKHVAQILDSRMNTKYDENDKLIREVKVITLKSKLVSDFRKDFQFYKVREINNYHHAHDAYLNAVVGTALIKKYPKLESEFVYGDYKVYDVRKMIAKSEQEIGKATAKYFFYSNIMNFFKTEITLANGEIRKRPLIETNGETGEIVWDKGRDFATVRKVLSMPQVNIVKKTEVQTGGFSKESILPKRNSDKLIARKKDWDPKKYGGFDSPTVAYSVLVVAKVEKGKSKKLKSVKELLGITIMERSSFEKNPIDFLEAKGYKEVKKDLIIKLPKYSLFELENGRKRMLASAGELQKGNELALPSKYVNFLYLASHYEKLKGSPEDNEQKQLFVEQHKHYLDEIIEQISEFSKRVILADANLDKVLSAYNKHRDKPIREQAENIIHLFTLTNLGAPAAFKYFDTTIDRKRYTSTKEVLDATLIHQSITGLYETRIDLSQLGGDGGGGSPAPEAAAKGGWVQEISDSRPMLHIYLNGRRFLGLLNTGADKTCIAGRDWPANWPIHQTESSLQGLGMACGVARSSQPLRWQHEDKSGIIHPFVIPTLPFTLWGRDIMKDIKVRLMTDSPDDSQDLMIGAIESNLFADQISWKSDQPVWLNQWPLKQEKLQALQQLVTEQLQLGHLEESNSPWNTPVFVIKKKSGKWRLLQDLRAVNATMHDMGALQPGLPSPVAVPKGWEIIIIDLQDCFFNIKLHPEDCKRFAFSVPSPNFKRPYQRFQWKVLPQGMKNSPTLCQKFVDKAILTVRDKYQDSYIVHYMDDILLAHPSRSIVDEILTSMIQALNKHGLVVSTEKIQKYDNLKYLGTHIQGDSVSYQKLQIRTDKLRTLNDFQKLLGNINWIRPFLKLTTGELKPLFEILNGDSNPISTRKLTPEACKALQLMNERLSTARVKRLDLSQPWSLCILKTEYTPTACLWQDGVVEWIHLPHISPKVITPYDIFCTQLIIKGRHRSKELFSKDPDYIVVPYTKVQFDLLLQEKEDWPISLLGFLGEVHFHLPKDPLLTFTLQTAIIFPHMTSTTPLEKGIVIFTDGSANGRSVTYIQGREPIIKENTQNTAQQAEIVAVITAFEEVSQPFNLYTDSKYVTGLFPEIETATLSPRTKIYTELKHLQRLIHKRQEKFYIGHIRGHTGLPGPLAQGNAYADSLTRILTAGKRTADGSEFEKRTADGSEFESPKKKAKVE

SEQ ID NO: 3179 - protein, 2114 aa, synthetic construct
MPAAKRVKLDGGDKKYSIGLDIGTNSVGWAVITDEYKVPSKKFKVLGNTDRHSIKKNLIGALLFDSGETAEATRLKRTARRRYTRRKNRICYLQEIFSNEMAKVDDSFFHRLEESFLVEEDKKHERHPIFGNIVDEVAYHEKYPTIYHLRKKLVDSTDKADLRLIYLALAHMIKFRGHFLIEGDLNPDNSDVDKLFIQLVQTYNQLFEENPINASGVDAKAILSARLSKSRRLENLIAQLPGEKKNGLFGNLIALSLGLTPNFKSNFDLAEDAKLQLSKDTYDDDLDNLLAQIGDQYADLFLAAKNLSDAILLSDILRVNTEITKAPLSASMIKRYDEHHQDLTLLKALVRQQLPEKYKEIFFDQSKNGYAGYIDGGASQEEFYKFIKPILEKMDGTEELLVKLNREDLLRKQRTFDNGSIPHQIHLGELHAILRRQEDFYPFLKDNREKIEKILTFRIPYYVGPLARGNSRFAWMTRKSEETITPWNFEEVVDKGASAQSFIERMTNFDKNLPNEKVLPKHSLLYEYFTVYNELTKVKYVTEGMRKPAFLSGEQKKAIVDLLFKTNRKVTVKQLKEDYFKKIECFDSVEISGVEDRFNASLGTYHDLLKIIKDKDFLDNEENEDILEDIVLTLTLFEDREMIEERLKTYAHLFDDKVMKQLKRRRYTGWGRLSRKLINGIRDKQSGKTILDFLKSDGFANRNFMQLIHDDSLTFKEDIQKAQVSGQGDSLHEHIANLAGSPAIKKGILQTVKVVDELVKVMGRHKPENIVIEMARENQTTQKGQKNSRERMKRIEEGIKELGSQILKEHPVENTQLQNEKLYLYYLQNGRDMYVDQELDINRLSDYDVDHIVPQSFLKDDSIDNKVLTRSDKARGKSDNVPSEEVVKKMKNYWRQLLNAKLITQRKFDNLTKAERGGLSELDKAGFIKRQLVETRQITKHVAQILDSRMNTKYDENDKLIREVKVITLKSKLVSDFRKDFQFYKVREINNYHHAHDAYLNAVVGTALIKKYPKLESEFVYGDYKVYDVRKMIAKSEQEIGKATAKYFFYSNIMNFFKTEITLANGEIRKRPLIETNGETGEIVWDKGRDFATVRKVLSMPQVNIVKKTEVQTGGFSKESILPKRNSDKLIARKKDWDPKKYGGFDSPTVAYSVLVVAKVEKGKSKKLKSVKELLGITIMERSSFEKNPIDFLEAKGYKEVKKDLIIKLPKYSLFELENGRKRMLASAGELQKGNELALPSKYVNFLYLASHYEKLKGSPEDNEQKQLFVEQHKHYLDEIIEQISEFSKRVILADANLDKVLSAYNKHRDKPIREQAENIIHLFTLTNLGAPAAFKYFDTTIDRKRYTSTKEVLDATLIHQSITGLYETRIDLSQLGGDGGGGSGSSGGGGGWVQEISDSRPMLHIYLNGRRFLGLLNTGADKTCIAGRDWPANWPIHQTESSLQGLGMACGVARSSQPLRWQHEDKSGIIHPFVIPTLPFTLWGRDIMKDIKVRLMTDSPDDSQDLMIGAIESNLFADQISWKSDQPVWLNQWPLKQEKLQALQQLVTEQLQLGHLEESNSPWNTPVFVIKKKSGKWRLLQDLRAVNATMHDMGALQPGLPSPVAVPKGWEIIIIDLQDCFFNIKLHPEDCKRFAFSVPSPNFKRPYQRFQWKVLPQGMKNSPTLCQKFVDKAILTVRDKYQDSYIVHYMDDILLAHPSRSIVDEILTSMIQALNKHGLVVSTEKIQKYDNLKYLGTHIQGDSVSYQKLQIRTDKLRTLNDFQKLLGNINWIRPFLKLTTGELKPLFEILNGDSNPISTRKLTPEACKALQLMNERLSTARVKRLDLSQPWSLCILKTEYTPTACLWQDGVVEWIHLPHISPKVITPYDIFCTQLIIKGRHRSKELFSKDPDYIVVPYTKVQFDLLLQEKEDWPISLLGFLGEVHFHLPKDPLLTFTLQTAIIFPHMTSTTPLEKGIVIFTDGSANGRSVTYIQGREPIIKENTQNTAQQAEIVAVITAFEEVSQPFNLYTDSKYVTGLFPEIETATLSPRTKIYTELKHLQRLIHKRQEKFYIGHIRGHTGLPGPLAQGNAYADSLTRILTAGKRTADGSEFEKRTADGSEFESPKKKAKVE

SEQ ID NO: 3180 - protein, 2114 aa, synthetic construct
MPAAKRVKLDGGDKKYSIGLDIGTNSVGWAVITDEYKVPSKKFKVLGNTDRHSIKKNLIGALLFDSGETAEATRLKRTARRRYTRRKNRICYLQEIFSNEMAKVDDSFFHRLEESFLVEEDKKHERHPIFGNIVDEVAYHEKYPTIYHLRKKLVDSTDKADLRLIYLALAHMIKFRGHFLIEGDLNPDNSDVDKLFIQLVQTYNQLFEENPINASGVDAKAILSARLSKSRRLENLIAQLPGEKKNGLFGNLIALSLGLTPNFKSNFDLAEDAKLQLSKDTYDDDLDNLLAQIGDQYADLFLAAKNLSDAILLSDILRVNTEITKAPLSASMIKRYDEHHQDLTLLKALVRQQLPEKYKEIFFDQSKNGYAGYIDGGASQEEFYKFIKPILEKMDGTEELLVKLNREDLLRKQRTFDNGSIPHQIHLGELHAILRRQEDFYPFLKDNREKIEKILTFRIPYYVGPLARGNSRFAWMTRKSEETITPWNFEEVVDKGASAQSFIERMTNFDKNLPNEKVLPKHSLLYEYFTVYNELTKVKYVTEGMRKPAFLSGEQKKAIVDLLFKTNRKVTVKQLKEDYFKKIECFDSVEISGVEDRFNASLGTYHDLLKIIKDKDFLDNEENEDILEDIVLTLTLFEDREMIEERLKTYAHLFDDKVMKQLKRRRYTGWGRLSRKLINGIRDKQSGKTILDFLKSDGFANRNFMQLIHDDSLTFKEDIQKAQVSGQGDSLHEHIANLAGSPAIKKGILQTVKVVDELVKVMGRHKPENIVIEMARENQTTQKGQKNSRERMKRIEEGIKELGSQILKEHPVENTQLQNEKLYLYYLQNGRDMYVDQELDINRLSDYDVDHIVPQSFLKDDSIDNKVLTRSDKARGKSDNVPSEEVVKKMKNYWRQLLNAKLITQRKFDNLTKAERGGLSELDKAGFIKRQLVETRQITKHVAQILDSRMNTKYDENDKLIREVKVITLKSKLVSDFRKDFQFYKVREINNYHHAHDAYLNAVVGTALIKKYPKLESEFVYGDYKVYDVRKMIAKSEQEIGKATAKYFFYSNIMNFFKTEITLANGEIRKRPLIETNGETGEIVWDKGRDFATVRKVLSMPQVNIVKKTEVQTGGFSKESILPKRNSDKLIARKKDWDPKKYGGFDSPTVAYSVLVVAKVEKGKSKKLKSVKELLGITIMERSSFEKNPIDFLEAKGYKEVKKDLIIKLPKYSLFELENGRKRMLASAGELQKGNELALPSKYVNFLYLASHYEKLKGSPEDNEQKQLFVEQHKHYLDEIIEQISEFSKRVILADANLDKVLSAYNKHRDKPIREQAENIIHLFTLTNLGAPAAFKYFDTTIDRKRYTSTKEVLDATLIHQSITGLYETRIDLSQLGGDGGPAPAPAPAPGGWVQEISDSRPMLHIYLNGRRFLGLLNTGADKTCIAGRDWPANWPIHQTESSLQGLGMACGVARSSQPLRWQHEDKSGIIHPFVIPTLPFTLWGRDIMKDIKVRLMTDSPDDSQDLMIGAIESNLFADQISWKSDQPVWLNQWPLKQEKLQALQQLVTEQLQLGHLEESNSPWNTPVFVIKKKSGKWRLLQDLRAVNATMHDMGALQPGLPSPVAVPKGWEIIIIDLQDCFFNIKLHPEDCKRFAFSVPSPNFKRPYQRFQWKVLPQGMKNSPTLCQKFVDKAILTVRDKYQDSYIVHYMDDILLAHPSRSIVDEILTSMIQALNKHGLVVSTEKIQKYDNLKYLGTHIQGDSVSYQKLQIRTDKLRTLNDFQKLLGNINWIRPFLKLTTGELKPLFEILNGDSNPISTRKLTPEACKALQLMNERLSTARVKRLDLSQPWSLCILKTEYTPTACLWQDGVVEWIHLPHISPKVITPYDIFCTQLIIKGRHRSKELFSKDPDYIVVPYTKVQFDLLLQEKEDWPISLLGFLGEVHFHLPKDPLLTFTLQTAIIFPHMTSTTPLEKGIVIFTDGSANGRSVTYIQGREPIIKENTQNTAQQAEIVAVITAFEEVSQPFNLYTDSKYVTGLFPEIETATLSPRTKIYTELKHLQRLIHKRQEKFYIGHIRGHTGLPGPLAQGNAYADSLTRILTAGKRTADGSEFEKRTADGSEFESPKKKAKVE

SEQ ID NO: 3181 - protein, 2116 aa, synthetic construct
MPAAKRVKLDGGDKKYSIGLDIGTNSVGWAVITDEYKVPSKKFKVLGNTDRHSIKKNLIGALLFDSGETAEATRLKRTARRRYTRRKNRICYLQEIFSNEMAKVDDSFFHRLEESFLVEEDKKHERHPIFGNIVDEVAYHEKYPTIYHLRKKLVDSTDKADLRLIYLALAHMIKFRGHFLIEGDLNPDNSDVDKLFIQLVQTYNQLFEENPINASGVDAKAILSARLSKSRRLENLIAQLPGEKKNGLFGNLIALSLGLTPNFKSNFDLAEDAKLQLSKDTYDDDLDNLLAQIGDQYADLFLAAKNLSDAILLSDILRVNTEITKAPLSASMIKRYDEHHQDLTLLKALVRQQLPEKYKEIFFDQSKNGYAGYIDGGASQEEFYKFIKPILEKMDGTEELLVKLNREDLLRKQRTFDNGSIPHQIHLGELHAILRRQEDFYPFLKDNREKIEKILTFRIPYYVGPLARGNSRFAWMTRKSEETITPWNFEEVVDKGASAQSFIERMTNFDKNLPNEKVLPKHSLLYEYFTVYNELTKVKYVTEGMRKPAFLSGEQKKAIVDLLFKTNRKVTVKQLKEDYFKKIECFDSVEISGVEDRFNASLGTYHDLLKIIKDKDFLDNEENEDILEDIVLTLTLFEDREMIEERLKTYAHLFDDKVMKQLKRRRYTGWGRLSRKLINGIRDKQSGKTILDFLKSDGFANRNFMQLIHDDSLTFKEDIQKAQVSGQGDSLHEHIANLAGSPAIKKGILQTVKVVDELVKVMGRHKPENIVIEMARENQTTQKGQKNSRERMKRIEEGIKELGSQILKEHPVENTQLQNEKLYLYYLQNGRDMYVDQELDINRLSDYDVDHIVPQSFLKDDSIDNKVLTRSDKARGKSDNVPSEEVVKKMKNYWRQLLNAKLITQRKFDNLTKAERGGLSELDKAGFIKRQLVETRQITKHVAQILDSRMNTKYDENDKLIREVKVITLKSKLVSDFRKDFQFYKVREINNYHHAHDAYLNAVVGTALIKKYPKLESEFVYGDYKVYDVRKMIAKSEQEIGKATAKYFFYSNIMNFFKTEITLANGEIRKRPLIETNGETGEIVWDKGRDFATVRKVLSMPQVNIVKKTEVQTGGFSKESILPKRNSDKLIARKKDWDPKKYGGFDSPTVAYSVLVVAKVEKGKSKKLKSVKELLGITIMERSSFEKNPIDFLEAKGYKEVKKDLIIKLPKYSLFELENGRKRMLASAGELQKGNELALPSKYVNFLYLASHYEKLKGSPEDNEQKQLFVEQHKHYLDEIIEQISEFSKRVILADANLDKVLSAYNKHRDKPIREQAENIIHLFTLTNLGAPAAFKYFDTTIDRKRYTSTKEVLDATLIHQSITGLYETRIDLSQLGGDGGGSSGGGEAAAKGGWVQEISDSRPMLHIYLNGRRFLGLLNTGADKTCIAGRDWPANWPIHQTESSLQGLGMACGVARSSQPLRWQHEDKSGIIHPFVIPTLPFTLWGRDIMKDIKVRLMTDSPDDSQDLMIGAIESNLFADQISWKSDQPVWLNQWPLKQEKLQALQQLVTEQLQLGHLEESNSPWNTPVFVIKKKSGKWRLLQDLRAVNATMHDMGALQPGLPSPVAVPKGWEIIIIDLQDCFFNIKLHPEDCKRFAFSVPSPNFKRPYQRFQWKVLPQGMKNSPTLCQKFVDKAILTVRDKYQDSYIVHYMDDILLAHPSRSIVDEILTSMIQALNKHGLVVSTEKIQKYDNLKYLGTHIQGDSVSYQKLQIRTDKLRTLNDFQKLLGNINWIRPFLKLTTGELKPLFEILNGDSNPISTRKLTPEACKALQLMNERLSTARVKRLDLSQPWSLCILKTEYTPTACLWQDGVVEWIHLPHISPKVITPYDIFCTQLIIKGRHRSKELFSKDPDYIVVPYTKVQFDLLLQEKEDWPISLLGFLGEVHFHLPKDPLLTFTLQTAIIFPHMTSTTPLEKGIVIFTDGSANGRSVTYIQGREPIIKENTQNTAQQAEIVAVITAFEEVSQPFNLYTDSKYVTGLFPEIETATLSPRTKIYTELKHLQRLIHKRQEKFYIGHIRGHTGLPGPLAQGNAYADSLTRILTAGKRTADGSEFEKRTADGSEFESPKKKAKVE

SEQ ID NO: 3182 - protein, 2116 aa, synthetic construct
MPAAKRVKLDGGDKKYSIGLDIGTNSVGWAVITDEYKVPSKKFKVLGNTDRHSIKKNLIGALLFDSGETAEATRLKRTARRRYTRRKNRICYLQEIFSNEMAKVDDSFFHRLEESFLVEEDKKHERHPIFGNIVDEVAYHEKYPTIYHLRKKLVDSTDKADLRLIYLALAHMIKFRGHFLIEGDLNPDNSDVDKLFIQLVQTYNQLFEENPINASGVDAKAILSARLSKSRRLENLIAQLPGEKKNGLFGNLIALSLGLTPNFKSNFDLAEDAKLQLSKDTYDDDLDNLLAQIGDQYADLFLAAKNLSDAILLSDILRVNTEITKAPLSASMIKRYDEHHQDLTLLKALVRQQLPEKYKEIFFDQSKNGYAGYIDGGASQEEFYKFIKPILEKMDGTEELLVKLNREDLLRKQRTFDNGSIPHQIHLGELHAILRRQEDFYPFLKDNREKIEKILTFRIPYYVGPLARGNSRFAWMTRKSEETITPWNFEEVVDKGASAQSFIERMTNFDKNLPNEKVLPKHSLLYEYFTVYNELTKVKYVTEGMRKPAFLSGEQKKAIVDLLFKTNRKVTVKQLKEDYFKKIECFDSVEISGVEDRFNASLGTYHDLLKIIKDKDFLDNEENEDILEDIVLTLTLFEDREMIEERLKTYAHLFDDKVMKQLKRRRYTGWGRLSRKLINGIRDKQSGKTILDFLKSDGFANRNFMQLIHDDSLTFKEDIQKAQVSGQGDSLHEHIANLAGSPAIKKGILQTVKVVDELVKVMGRHKPENIVIEMARENQTTQKGQKNSRERMKRIEEGIKELGSQILKEHPVENTQLQNEKLYLYYLQNGRDMYVDQELDINRLSDYDVDHIVPQSFLKDDSIDNKVLTRSDKARGKSDNVPSEEVVKKMKNYWRQLLNAKLITQRKFDNLTKAERGGLSELDKAGFIKRQLVETRQITKHVAQILDSRMNTKYDENDKLIREVKVITLKSKLVSDFRKDFQFYKVREINNYHHAHDAYLNAVVGTALIKKYPKLESEFVYGDYKVYDVRKMIAKSEQEIGKATAKYFFYSNIMNFFKTEITLANGEIRKRPLIETNGETGEIVWDKGRDFATVRKVLSMPQVNIVKKTEVQTGGFSKESILPKRNSDKLIARKKDWDPKKYGGFDSPTVAYSVLVVAKVEKGKSKKLKSVKELLGITIMERSSFEKNPIDFLEAKGYKEVKKDLIIKLPKYSLFELENGRKRMLASAGELQKGNELALPSKYVNFLYLASHYEKLKGSPEDNEQKQLFVEQHKHYLDEIIEQISEFSKRVILADANLDKVLSAYNKHRDKPIREQAENIIHLFTLTNLGAPAAFKYFDTTIDRKRYTSTKEVLDATLIHQSITGLYETRIDLSQLGGDGGGSSEAAAKPAPGGWVQEISDSRPMLHIYLNGRRFLGLLNTGADKTCIAGRDWPANWPIHQTESSLQGLGMACGVARSSQPLRWQHEDKSGIIHPFVIPTLPFTLWGRDIMKDIKVRLMTDSPDDSQDLMIGAIESNLFADQISWKSDQPVWLNQWPLKQEKLQALQQLVTEQLQLGHLEESNSPWNTPVFVIKKKSGKWRLLQDLRAVNATMHDMGALQPGLPSPVAVPKGWEIIIIDLQDCFFNIKLHPEDCKRFAFSVPSPNFKRPYQRFQWKVLPQGMKNSPTLCQKFVDKAILTVRDKYQDSYIVHYMDDILLAHPSRSIVDEILTSMIQALNKHGLVVSTEKIQKYDNLKYLGTHIQGDSVSYQKLQIRTDKLRTLNDFQKLLGNINWIRPFLKLTTGELKPLFEILNGDSNPISTRKLTPEACKALQLMNERLSTARVKRLDLSQPWSLCILKTEYTPTACLWQDGVVEWIHLPHISPKVITPYDIFCTQLIIKGRHRSKELFSKDPDYIVVPYTKVQFDLLLQEKEDWPISLLGFLGEVHFHLPKDPLLTFTLQTAIIFPHMTSTTPLEKGIVIFTDGSANGRSVTYIQGREPIIKENTQNTAQQAEIVAVITAFEEVSQPFNLYTDSKYVTGLFPEIETATLSPRTKIYTELKHLQRLIHKRQEKFYIGHIRGHTGLPGPLAQGNAYADSLTRILTAGKRTADGSEFEKRTADGSEFESPKKKAKVE

SEQ ID NO: 3183 - protein, 2111 aa, synthetic construct
MPAAKRVKLDGGDKKYSIGLDIGTNSVGWAVITDEYKVPSKKFKVLGNTDRHSIKKNLIGALLFDSGETAEATRLKRTARRRYTRRKNRICYLQEIFSNEMAKVDDSFFHRLEESFLVEEDKKHERHPIFGNIVDEVAYHEKYPTIYHLRKKLVDSTDKADLRLIYLALAHMIKFRGHFLIEGDLNPDNSDVDKLFIQLVQTYNQLFEENPINASGVDAKAILSARLSKSRRLENLIAQLPGEKKNGLFGNLIALSLGLTPNFKSNFDLAEDAKLQLSKDTYDDDLDNLLAQIGDQYADLFLAAKNLSDAILLSDILRVNTEITKAPLSASMIKRYDEHHQDLTLLKALVRQQLPEKYKEIFFDQSKNGYAGYIDGGASQEEFYKFIKPILEKMDGTEELLVKLNREDLLRKQRTFDNGSIPHQIHLGELHAILRRQEDFYPFLKDNREKIEKILTFRIPYYVGPLARGNSRFAWMTRKSEETITPWNFEEVVDKGASAQSFIERMTNFDKNLPNEKVLPKHSLLYEYFTVYNELTKVKYVTEGMRKPAFLSGEQKKAIVDLLFKTNRKVTVKQLKEDYFKKIECFDSVEISGVEDRFNASLGTYHDLLKIIKDKDFLDNEENEDILEDIVLTLTLFEDREMIEERLKTYAHLFDDKVMKQLKRRRYTGWGRLSRKLINGIRDKQSGKTILDFLKSDGFANRNFMQLIHDDSLTFKEDIQKAQVSGQGDSLHEHIANLAGSPAIKKGILQTVKVVDELVKVMGRHKPENIVIEMARENQTTQKGQKNSRERMKRIEEGIKELGSQILKEHPVENTQLQNEKLYLYYLQNGRDMYVDQELDINRLSDYDVDHIVPQSFLKDDSIDNKVLTRSDKARGKSDNVPSEEVVKKMKNYWRQLLNAKLITQRKFDNLTKAERGGLSELDKAGFIKRQLVETRQITKHVAQILDSRMNTKYDENDKLIREVKVITLKSKLVSDFRKDFQFYKVREINNYHHAHDAYLNAVVGTALIKKYPKLESEFVYGDYKVYDVRKMIAKSEQEIGKATAKYFFYSNIMNFFKTEITLANGEIRKRPLIETNGETGEIVWDKGRDFATVRKVLSMPQVNIVKKTEVQTGGFSKESILPKRNSDKLIARKKDWDPKKYGGFDSPTVAYSVLVVAKVEKGKSKKLKSVKELLGITIMERSSFEKNPIDFLEAKGYKEVKKDLIIKLPKYSLFELENGRKRMLASAGELQKGNELALPSKYVNFLYLASHYEKLKGSPEDNEQKQLFVEQHKHYLDEIIEQISEFSKRVILADANLDKVLSAYNKHRDKPIREQAENIIHLFTLTNLGAPAAFKYFDTTIDRKRYTSTKEVLDATLIHQSITGLYETRIDLSQLGGDGGGGSGSSGGWVQEISDSRPMLHIYLNGRRFLGLLNTGADKTCIAGRDWPANWPIHQTESSLQGLGMACGVARSSQPLRWQHEDKSGIIHPFVIPTLPFTLWGRDIMKDIKVRLMTDSPDDSQDLMIGAIESNLFADQISWKSDQPVWLNQWPLKQEKLQALQQLVTEQLQLGHLEESNSPWNTPVFVIKKKSGKWRLLQDLRAVNATMHDMGALQPGLPSPVAVPKGWEIIIIDLQDCFFNIKLHPEDCKRFAFSVPSPNFKRPYQRFQWKVLPQGMKNSPTLCQKFVDKAILTVRDKYQDSYIVHYMDDILLAHPSRSIVDEILTSMIQALNKHGLVVSTEKIQKYDNLKYLGTHIQGDSVSYQKLQIRTDKLRTLNDFQKLLGNINWIRPFLKLTTGELKPLFEILNGDSNPISTRKLTPEACKALQLMNERLSTARVKRLDLSQPWSLCILKTEYTPTACLWQDGVVEWIHLPHISPKVITPYDIFCTQLIIKGRHRSKELFSKDPDYIVVPYTKVQFDLLLQEKEDWPISLLGFLGEVHFHLPKDPLLTFTLQTAIIFPHMTSTTPLEKGIVIFTDGSANGRSVTYIQGREPIIKENTQNTAQQAEIVAVITAFEEVSQPFNLYTDSKYVTGLFPEIETATLSPRTKIYTELKHLQRLIHKRQEKFYIGHIRGHTGLPGPLAQGNAYADSLTRILTAGKRTADGSEFEKRTADGSEFESPKKKAKVE

SEQ ID NO: 3184 - protein, 2114 aa, synthetic construct
MPAAKRVKLDGGDKKYSIGLDIGTNSVGWAVITDEYKVPSKKFKVLGNTDRHSIKKNLIGALLFDSGETAEATRLKRTARRRYTRRKNRICYLQEIFSNEMAKVDDSFFHRLEESFLVEEDKKHERHPIFGNIVDEVAYHEKYPTIYHLRKKLVDSTDKADLRLIYLALAHMIKFRGHFLIEGDLNPDNSDVDKLFIQLVQTYNQLFEENPINASGVDAKAILSARLSKSRRLENLIAQLPGEKKNGLFGNLIALSLGLTPNFKSNFDLAEDAKLQLSKDTYDDDLDNLLAQIGDQYADLFLAAKNLSDAILLSDILRVNTEITKAPLSASMIKRYDEHHQDLTLLKALVRQQLPEKYKEIFFDQSKNGYAGYIDGGASQEEFYKFIKPILEKMDGTEELLVKLNREDLLRKQRTFDNGSIPHQIHLGELHAILRRQEDFYPFLKDNREKIEKILTFRIPYYVGPLARGNSRFAWMTRKSEETITPWNFEEVVDKGASAQSFIERMTNFDKNLPNEKVLPKHSLLYEYFTVYNELTKVKYVTEGMRKPAFLSGEQKKAIVDLLFKTNRKVTVKQLKEDYFKKIECFDSVEISGVEDRFNASLGTYHDLLKIIKDKDFLDNEENEDILEDIVLTLTLFEDREMIEERLKTYAHLFDDKVMKQLKRRRYTGWGRLSRKLINGIRDKQSGKTILDFLKSDGFANRNFMQLIHDDSLTFKEDIQKAQVSGQGDSLHEHIANLAGSPAIKKGILQTVKVVDELVKVMGRHKPENIVIEMARENQTTQKGQKNSRERMKRIEEGIKELGSQILKEHPVENTQLQNEKLYLYYLQNGRDMYVDQELDINRLSDYDVDHIVPQSFLKDDSIDNKVLTRSDKARGKSDNVPSEEVVKKMKNYWRQLLNAKLITQRKFDNLTKAERGGLSELDKAGFIKRQLVETRQITKHVAQILDSRMNTKYDENDKLIREVKVITLKSKLVSDFRKDFQFYKVREINNYHHAHDAYLNAVVGTALIKKYPKLESEFVYGDYKVYDVRKMIAKSEQEIGKATAKYFFYSNIMNFFKTEITLANGEIRKRPLIETNGETGEIVWDKGRDFATVRKVLSMPQVNIVKKTEVQTGGFSKESILPKRNSDKLIARKKDWDPKKYGGFDSPTVAYSVLVVAKVEKGKSKKLKSVKELLGITIMERSSFEKNPIDFLEAKGYKEVKKDLIIKLPKYSLFELENGRKRMLASAGELQKGNELALPSKYVNFLYLASHYEKLKGSPEDNEQKQLFVEQHKHYLDEIIEQISEFSKRVILADANLDKVLSAYNKHRDKPIREQAENIIHLFTLTNLGAPAAFKYFDTTIDRKRYTSTKEVLDATLIHQSITGLYETRIDLSQLGGDGGGGGGSSGGSGGWVQEISDSRPMLHIYLNGRRFLGLLNTGADKTCIAGRDWPANWPIHQTESSLQGLGMACGVARSSQPLRWQHEDKSGIIHPFVIPTLPFTLWGRDIMKDIKVRLMTDSPDDSQDLMIGAIESNLFADQISWKSDQPVWLNQWPLKQEKLQALQQLVTEQLQLGHLEESNSPWNTPVFVIKKKSGKWRLLQDLRAVNATMHDMGALQPGLPSPVAVPKGWEIIIIDLQDCFFNIKLHPEDCKRFAFSVPSPNFKRPYQRFQWKVLPQGMKNSPTLCQKFVDKAILTVRDKYQDSYIVHYMDDILLAHPSRSIVDEILTSMIQALNKHGLVVSTEKIQKYDNLKYLGTHIQGDSVSYQKLQIRTDKLRTLNDFQKLLGNINWIRPFLKLTTGELKPLFEILNGDSNPISTRKLTPEACKALQLMNERLSTARVKRLDLSQPWSLCILKTEYTPTACLWQDGVVEWIHLPHISPKVITPYDIFCTQLIIKGRHRSKELFSKDPDYIVVPYTKVQFDLLLQEKEDWPISLLGFLGEVHFHLPKDPLLTFTLQTAIIFPHMTSTTPLEKGIVIFTDGSANGRSVTYIQGREPIIKENTQNTAQQAEIVAVITAFEEVSQPFNLYTDSKYVTGLFPEIETATLSPRTKIYTELKHLQRLIHKRQEKFYIGHIRGHTGLPGPLAQGNAYADSLTRILTAGKRTADGSEFEKRTADGSEFESPKKKAKVE

SEQ ID NO: 3185 - protein, 2120 aa, synthetic construct
MPAAKRVKLDGGDKKYSIGLDIGTNSVGWAVITDEYKVPSKKFKVLGNTDRHSIKKNLIGALLFDSGETAEATRLKRTARRRYTRRKNRICYLQEIFSNEMAKVDDSFFHRLEESFLVEEDKKHERHPIFGNIVDEVAYHEKYPTIYHLRKKLVDSTDKADLRLIYLALAHMIKFRGHFLIEGDLNPDNSDVDKLFIQLVQTYNQLFEENPINASGVDAKAILSARLSKSRRLENLIAQLPGEKKNGLFGNLIALSLGLTPNFKSNFDLAEDAKLQLSKDTYDDDLDNLLAQIGDQYADLFLAAKNLSDAILLSDILRVNTEITKAPLSASMIKRYDEHHQDLTLLKALVRQQLPEKYKEIFFDQSKNGYAGYIDGGASQEEFYKFIKPILEKMDGTEELLVKLNREDLLRKQRTFDNGSIPHQIHLGELHAILRRQEDFYPFLKDNREKIEKILTFRIPYYVGPLARGNSRFAWMTRKSEETITPWNFEEVVDKGASAQSFIERMTNFDKNLPNEKVLPKHSLLYEYFTVYNELTKVKYVTEGMRKPAFLSGEQKKAIVDLLFKTNRKVTVKQLKEDYFKKIECFDSVEISGVEDRFNASLGTYHDLLKIIKDKDFLDNEENEDILEDIVLTLTLFEDREMIEERLKTYAHLFDDKVMKQLKRRRYTGWGRLSRKLINGIRDKQSGKTILDFLKSDGFANRNFMQLIHDDSLTFKEDIQKAQVSGQGDSLHEHIANLAGSPAIKKGILQTVKVVDELVKVMGRHKPENIVIEMARENQTTQKGQKNSRERMKRIEEGIKELGSQILKEHPVENTQLQNEKLYLYYLQNGRDMYVDQELDINRLSDYDVDHIVPQSFLKDDSIDNKVLTRSDKARGKSDNVPSEEVVKKMKNYWRQLLNAKLITQRKFDNLTKAERGGLSELDKAGFIKRQLVETRQITKHVAQILDSRMNTKYDENDKLIREVKVITLKSKLVSDFRKDFQFYKVREINNYHHAHDAYLNAVVGTALIKKYPKLESEFVYGDYKVYDVRKMIAKSEQEIGKATAKYFFYSNIMNFFKTEITLANGEIRKRPLIETNGETGEIVWDKGRDFATVRKVLSMPQVNIVKKTEVQTGGFSKESILPKRNSDKLIARKKDWDPKKYGGFDSPTVAYSVLVVAKVEKGKSKKLKSVKELLGITIMERSSFEKNPIDFLEAKGYKEVKKDLIIKLPKYSLFELENGRKRMLASAGELQKGNELALPSKYVNFLYLASHYEKLKGSPEDNEQKQLFVEQHKHYLDEIIEQISEFSKRVILADANLDKVLSAYNKHRDKPIREQAENIIHLFTLTNLGAPAAFKYFDTTIDRKRYTSTKEVLDATLIHQSITGLYETRIDLSQLGGDGGEAAAKGGGGSEAAAKGGWVQEISDSRPMLHIYLNGRRFLGLLNTGADKTCIAGRDWPANWPIHQTESSLQGLGMACGVARSSQPLRWQHEDKSGIIHPFVIPTLPFTLWGRDIMKDIKVRLMTDSPDDSQDLMIGAIESNLFADQISWKSDQPVWLNQWPLKQEKLQALQQLVTEQLQLGHLEESNSPWNTPVFVIKKKSGKWRLLQDLRAVNATMHDMGALQPGLPSPVAVPKGWEIIIIDLQDCFFNIKLHPEDCKRFAFSVPSPNFKRPYQRFQWKVLPQGMKNSPTLCQKFVDKAILTVRDKYQDSYIVHYMDDILLAHPSRSIVDEILTSMIQALNKHGLVVSTEKIQKYDNLKYLGTHIQGDSVSYQKLQIRTDKLRTLNDFQKLLGNINWIRPFLKLTTGELKPLFEILNGDSNPISTRKLTPEACKALQLMNERLSTARVKRLDLSQPWSLCILKTEYTPTACLWQDGVVEWIHLPHISPKVITPYDIFCTQLIIKGRHRSKELFSKDPDYIVVPYTKVQFDLLLQEKEDWPISLLGFLGEVHFHLPKDPLLTFTLQTAIIFPHMTSTTPLEKGIVIFTDGSANGRSVTYIQGREPIIKENTQNTAQQAEIVAVITAFEEVSQPFNLYTDSKYVTGLFPEIETATLSPRTKIYTELKHLQRLIHKRQEKFYIGHIRGHTGLPGPLAQGNAYADSLTRILTAGKRTADGSEFEKRTADGSEFESPKKKAKVE

SEQ ID NO: 3186 - protein, 2108 aa, synthetic construct
MPAAKRVKLDGGDKKYSIGLDIGTNSVGWAVITDEYKVPSKKFKVLGNTDRHSIKKNLIGALLFDSGETAEATRLKRTARRRYTRRKNRICYLQEIFSNEMAKVDDSFFHRLEESFLVEEDKKHERHPIFGNIVDEVAYHEKYPTIYHLRKKLVDSTDKADLRLIYLALAHMIKFRGHFLIEGDLNPDNSDVDKLFIQLVQTYNQLFEENPINASGVDAKAILSARLSKSRRLENLIAQLPGEKKNGLFGNLIALSLGLTPNFKSNFDLAEDAKLQLSKDTYDDDLDNLLAQIGDQYADLFLAAKNLSDAILLSDILRVNTEITKAPLSASMIKRYDEHHQDLTLLKALVRQQLPEKYKEIFFDQSKNGYAGYIDGGASQEEFYKFIKPILEKMDGTEELLVKLNREDLLRKQRTFDNGSIPHQIHLGELHAILRRQEDFYPFLKDNREKIEKILTFRIPYYVGPLARGNSRFAWMTRKSEETITPWNFEEVVDKGASAQSFIERMTNFDKNLPNEKVLPKHSLLYEYFTVYNELTKVKYVTEGMRKPAFLSGEQKKAIVDLLFKTNRKVTVKQLKEDYFKKIECFDSVEISGVEDRFNASLGTYHDLLKIIKDKDFLDNEENEDILEDIVLTLTLFEDREMIEERLKTYAHLFDDKVMKQLKRRRYTGWGRLSRKLINGIRDKQSGKTILDFLKSDGFANRNFMQLIHDDSLTFKEDIQKAQVSGQGDSLHEHIANLAGSPAIKKGILQTVKVVDELVKVMGRHKPENIVIEMARENQTTQKGQKNSRERMKRIEEGIKELGSQILKEHPVENTQLQNEKLYLYYLQNGRDMYVDQELDINRLSDYDVDHIVPQSFLKDDSIDNKVLTRSDKARGKSDNVPSEEVVKKMKNYWRQLLNAKLITQRKFDNLTKAERGGLSELDKAGFIKRQLVETRQITKHVAQILDSRMNTKYDENDKLIREVKVITLKSKLVSDFRKDFQFYKVREINNYHHAHDAYLNAVVGTALIKKYPKLESEFVYGDYKVYDVRKMIAKSEQEIGKATAKYFFYSNIMNFFKTEITLANGEIRKRPLIETNGETGEIVWDKGRDFATVRKVLSMPQVNIVKKTEVQTGGFSKESILPKRNSDKLIARKKDWDPKKYGGFDSPTVAYSVLVVAKVEKGKSKKLKSVKELLGITIMERSSFEKNPIDFLEAKGYKEVKKDLIIKLPKYSLFELENGRKRMLASAGELQKGNELALPSKYVNFLYLASHYEKLKGSPEDNEQKQLFVEQHKHYLDEIIEQISEFSKRVILADANLDKVLSAYNKHRDKPIREQAENIIHLFTLTNLGAPAAFKYFDTTIDRKRYTSTKEVLDATLIHQSITGLYETRIDLSQLGGDGGGGSGGWVQEISDSRPMLHIYLNGRRFLGLLNTGADKTCIAGRDWPANWPIHQTESSLQGLGMACGVARSSQPLRWQHEDKSGIIHPFVIPTLPFTLWGRDIMKDIKVRLMTDSPDDSQDLMIGAIESNLFADQISWKSDQPVWLNQWPLKQEKLQALQQLVTEQLQLGHLEESNSPWNTPVFVIKKKSGKWRLLQDLRAVNATMHDMGALQPGLPSPVAVPKGWEIIIIDLQDCFFNIKLHPEDCKRFAFSVPSPNFKRPYQRFQWKVLPQGMKNSPTLCQKFVDKAILTVRDKYQDSYIVHYMDDILLAHPSRSIVDEILTSMIQALNKHGLVVSTEKIQKYDNLKYLGTHIQGDSVSYQKLQIRTDKLRTLNDFQKLLGNINWIRPFLKLTTGELKPLFEILNGDSNPISTRKLTPEACKALQLMNERLSTARVKRLDLSQPWSLCILKTEYTPTACLWQDGVVEWIHLPHISPKVITPYDIFCTQLIIKGRHRSKELFSKDPDYIVVPYTKVQFDLLLQEKEDWPISLLGFLGEVHFHLPKDPLLTFTLQTAIIFPHMTSTTPLEKGIVIFTDGSANGRSVTYIQGREPIIKENTQNTAQQAEIVAVITAFEEVSQPFNLYTDSKYVTGLFPEIETATLSPRTKIYTELKHLQRLIHKRQEKFYIGHIRGHTGLPGPLAQGNAYADSLTRILTAGKRTADGSEFEKRTADGSEFESPKKKAKVE

SEQ ID NO: 3187 - protein, 2114 aa, synthetic construct
MPAAKRVKLDGGDKKYSIGLDIGTNSVGWAVITDEYKVPSKKFKVLGNTDRHSIKKNLIGALLFDSGETAEATRLKRTARRRYTRRKNRICYLQEIFSNEMAKVDDSFFHRLEESFLVEEDKKHERHPIFGNIVDEVAYHEKYPTIYHLRKKLVDSTDKADLRLIYLALAHMIKFRGHFLIEGDLNPDNSDVDKLFIQLVQTYNQLFEENPINASGVDAKAILSARLSKSRRLENLIAQLPGEKKNGLFGNLIALSLGLTPNFKSNFDLAEDAKLQLSKDTYDDDLDNLLAQIGDQYADLFLAAKNLSDAILLSDILRVNTEITKAPLSASMIKRYDEHHQDLTLLKALVRQQLPEKYKEIFFDQSKNGYAGYIDGGASQEEFYKFIKPILEKMDGTEELLVKLNREDLLRKQRTFDNGSIPHQIHLGELHAILRRQEDFYPFLKDNREKIEKILTFRIPYYVGPLARGNSRFAWMTRKSEETITPWNFEEVVDKGASAQSFIERMTNFDKNLPNEKVLPKHSLLYEYFTVYNELTKVKYVTEGMRKPAFLSGEQKKAIVDLLFKTNRKVTVKQLKEDYFKKIECFDSVEISGVEDRFNASLGTYHDLLKIIKDKDFLDNEENEDILEDIVLTLTLFEDREMIEERLKTYAHLFDDKVMKQLKRRRYTGWGRLSRKLINGIRDKQSGKTILDFLKSDGFANRNFMQLIHDDSLTFKEDIQKAQVSGQGDSLHEHIANLAGSPAIKKGILQTVKVVDELVKVMGRHKPENIVIEMARENQTTQKGQKNSRERMKRIEEGIKELGSQILKEHPVENTQLQNEKLYLYYLQNGRDMYVDQELDINRLSDYDVDHIVPQSFLKDDSIDNKVLTRSDKARGKSDNVPSEEVVKKMKNYWRQLLNAKLITQRKFDNLTKAERGGLSELDKAGFIKRQLVETRQITKHVAQILDSRMNTKYDENDKLIREVKVITLKSKLVSDFRKDFQFYKVREINNYHHAHDAYLNAVVGTALIKKYPKLESEFVYGDYKVYDVRKMIAKSEQEIGKATAKYFFYSNIMNFFKTEITLANGEIRKRPLIETNGETGEIVWDKGRDFATVRKVLSMPQVNIVKKTEVQTGGFSKESILPKRNSDKLIARKKDWDPKKYGGFDSPTVAYSVLVVAKVEKGKSKKLKSVKELLGITIMERSSFEKNPIDFLEAKGYKEVKKDLIIKLPKYSLFELENGRKRMLASAGELQKGNELALPSKYVNFLYLASHYEKLKGSPEDNEQKQLFVEQHKHYLDEIIEQISEFSKRVILADANLDKVLSAYNKHRDKPIREQAENIIHLFTLTNLGAPAAFKYFDTTIDRKRYTSTKEVLDATLIHQSITGLYETRIDLSQLGGDGGGSSPAPGGGGGWVQEISDSRPMLHIYLNGRRFLGLLNTGADKTCIAGRDWPANWPIHQTESSLQGLGMACGVARSSQPLRWQHEDKSGIIHPFVIPTLPFTLWGRDIMKDIKVRLMTDSPDDSQDLMIGAIESNLFADQISWKSDQPVWLNQWPLKQEKLQALQQLVTEQLQLGHLEESNSPWNTPVFVIKKKSGKWRLLQDLRAVNATMHDMGALQPGLPSPVAVPKGWEIIIIDLQDCFFNIKLHPEDCKRFAFSVPSPNFKRPYQRFQWKVLPQGMKNSPTLCQKFVDKAILTVRDKYQDSYIVHYMDDILLAHPSRSIVDEILTSMIQALNKHGLVVSTEKIQKYDNLKYLGTHIQGDSVSYQKLQIRTDKLRTLNDFQKLLGNINWIRPFLKLTTGELKPLFEILNGDSNPISTRKLTPEACKALQLMNERLSTARVKRLDLSQPWSLCILKTEYTPTACLWQDGVVEWIHLPHISPKVITPYDIFCTQLIIKGRHRSKELFSKDPDYIVVPYTKVQFDLLLQEKEDWPISLLGFLGEVHFHLPKDPLLTFTLQTAIIFPHMTSTTPLEKGIVIFTDGSANGRSVTYIQGREPIIKENTQNTAQQAEIVAVITAFEEVSQPFNLYTDSKYVTGLFPEIETATLSPRTKIYTELKHLQRLIHKRQEKFYIGHIRGHTGLPGPLAQGNAYADSLTRILTAGKRTADGSEFEKRTADGSEFESPKKKAKVE

SEQ ID NO: 3188 - protein, 2114 aa, synthetic construct
MPAAKRVKLDGGDKKYSIGLDIGTNSVGWAVITDEYKVPSKKFKVLGNTDRHSIKKNLIGALLFDSGETAEATRLKRTARRRYTRRKNRICYLQEIFSNEMAKVDDSFFHRLEESFLVEEDKKHERHPIFGNIVDEVAYHEKYPTIYHLRKKLVDSTDKADLRLIYLALAHMIKFRGHFLIEGDLNPDNSDVDKLFIQLVQTYNQLFEENPINASGVDAKAILSARLSKSRRLENLIAQLPGEKKNGLFGNLIALSLGLTPNFKSNFDLAEDAKLQLSKDTYDDDLDNLLAQIGDQYADLFLAAKNLSDAILLSDILRVNTEITKAPLSASMIKRYDEHHQDLTLLKALVRQQLPEKYKEIFFDQSKNGYAGYIDGGASQEEFYKFIKPILEKMDGTEELLVKLNREDLLRKQRTFDNGSIPHQIHLGELHAILRRQEDFYPFLKDNREKIEKILTFRIPYYVGPLARGNSRFAWMTRKSEETITPWNFEEVVDKGASAQSFIERMTNFDKNLPNEKVLPKHSLLYEYFTVYNELTKVKYVTEGMRKPAFLSGEQKKAIVDLLFKTNRKVTVKQLKEDYFKKIECFDSVEISGVEDRFNASLGTYHDLLKIIKDKDFLDNEENEDILEDIVLTLTLFEDREMIEERLKTYAHLFDDKVMKQLKRRRYTGWGRLSRKLINGIRDKQSGKTILDFLKSDGFANRNFMQLIHDDSLTFKEDIQKAQVSGQGDSLHEHIANLAGSPAIKKGILQTVKVVDELVKVMGRHKPENIVIEMARENQTTQKGQKNSRERMKRIEEGIKELGSQILKEHPVENTQLQNEKLYLYYLQNGRDMYVDQELDINRLSDYDVDHIVPQSFLKDDSIDNKVLTRSDKARGKSDNVPSEEVVKKMKNYWRQLLNAKLITQRKFDNLTKAERGGLSELDKAGFIKRQLVETRQITKHVAQILDSRMNTKYDENDKLIREVKVITLKSKLVSDFRKDFQFYKVREINNYHHAHDAYLNAVVGTALIKKYPKLESEFVYGDYKVYDVRKMIAKSEQEIGKATAKYFFYSNIMNFFKTEITLANGEIRKRPLIETNGETGEIVWDKGRDFATVRKVLSMPQVNIVKKTEVQTGGFSKESILPKRNSDKLIARKKDWDPKKYGGFDSPTVAYSVLVVAKVEKGKSKKLKSVKELLGITIMERSSFEKNPIDFLEAKGYKEVKKDLIIKLPKYSLFELENGRKRMLASAGELQKGNELALPSKYVNFLYLASHYEKLKGSPEDNEQKQLFVEQHKHYLDEIIEQISEFSKRVILADANLDKVLSAYNKHRDKPIREQAENIIHLFTLTNLGAPAAFKYFDTTIDRKRYTSTKEVLDATLIHQSITGLYETRIDLSQLGGDGGPAPGSSGGGGGWVQEISDSRPMLHIYLNGRRFLGLLNTGADKTCIAGRDWPANWPIHQTESSLQGLGMACGVARSSQPLRWQHEDKSGIIHPFVIPTLPFTLWGRDIMKDIKVRLMTDSPDDSQDLMIGAIESNLFADQISWKSDQPVWLNQWPLKQEKLQALQQLVTEQLQLGHLEESNSPWNTPVFVIKKKSGKWRLLQDLRAVNATMHDMGALQPGLPSPVAVPKGWEIIIIDLQDCFFNIKLHPEDCKRFAFSVPSPNFKRPYQRFQWKVLPQGMKNSPTLCQKFVDKAILTVRDKYQDSYIVHYMDDILLAHPSRSIVDEILTSMIQALNKHGLVVSTEKIQKYDNLKYLGTHIQGDSVSYQKLQIRTDKLRTLNDFQKLLGNINWIRPFLKLTTGELKPLFEILNGDSNPISTRKLTPEACKALQLMNERLSTARVKRLDLSQPWSLCILKTEYTPTACLWQDGVVEWIHLPHISPKVITPYDIFCTQLIIKGRHRSKELFSKDPDYIVVPYTKVQFDLLLQEKEDWPISLLGFLGEVHFHLPKDPLLTFTLQTAIIFPHMTSTTPLEKGIVIFTDGSANGRSVTYIQGREPIIKENTQNTAQQAEIVAVITAFEEVSQPFNLYTDSKYVTGLFPEIETATLSPRTKIYTELKHLQRLIHKRQEKFYIGHIRGHTGLPGPLAQGNAYADSLTRILTAGKRTADGSEFEKRTADGSEFESPKKKAKVE

SEQ ID NO: 3189 - protein, 2116 aa, synthetic construct
MPAAKRVKLDGGDKKYSIGLDIGTNSVGWAVITDEYKVPSKKFKVLGNTDRHSIKKNLIGALLFDSGETAEATRLKRTARRRYTRRKNRICYLQEIFSNEMAKVDDSFFHRLEESFLVEEDKKHERHPIFGNIVDEVAYHEKYPTIYHLRKKLVDSTDKADLRLIYLALAHMIKFRGHFLIEGDLNPDNSDVDKLFIQLVQTYNQLFEENPINASGVDAKAILSARLSKSRRLENLIAQLPGEKKNGLFGNLIALSLGLTPNFKSNFDLAEDAKLQLSKDTYDDDLDNLLAQIGDQYADLFLAAKNLSDAILLSDILRVNTEITKAPLSASMIKRYDEHHQDLTLLKALVRQQLPEKYKEIFFDQSKNGYAGYIDGGASQEEFYKFIKPILEKMDGTEELLVKLNREDLLRKQRTFDNGSIPHQIHLGELHAILRRQEDFYPFLKDNREKIEKILTFRIPYYVGPLARGNSRFAWMTRKSEETITPWNFEEVVDKGASAQSFIERMTNFDKNLPNEKVLPKHSLLYEYFTVYNELTKVKYVTEGMRKPAFLSGEQKKAIVDLLFKTNRKVTVKQLKEDYFKKIECFDSVEISGVEDRFNASLGTYHDLLKIIKDKDFLDNEENEDILEDIVLTLTLFEDREMIEERLKTYAHLFDDKVMKQLKRRRYTGWGRLSRKLINGIRDKQSGKTILDFLKSDGFANRNFMQLIHDDSLTFKEDIQKAQVSGQGDSLHEHIANLAGSPAIKKGILQTVKVVDELVKVMGRHKPENIVIEMARENQTTQKGQKNSRERMKRIEEGIKELGSQILKEHPVENTQLQNEKLYLYYLQNGRDMYVDQELDINRLSDYDVDHIVPQSFLKDDSIDNKVLTRSDKARGKSDNVPSEEVVKKMKNYWRQLLNAKLITQRKFDNLTKAERGGLSELDKAGFIKRQLVETRQITKHVAQILDSRMNTKYDENDKLIREVKVITLKSKLVSDFRKDFQFYKVREINNYHHAHDAYLNAVVGTALIKKYPKLESEFVYGDYKVYDVRKMIAKSEQEIGKATAKYFFYSNIMNFFKTEITLANGEIRKRPLIETNGETGEIVWDKGRDFATVRKVLSMPQVNIVKKTEVQTGGFSKESILPKRNSDKLIARKKDWDPKKYGGFDSPTVAYSVLVVAKVEKGKSKKLKSVKELLGITIMERSSFEKNPIDFLEAKGYKEVKKDLIIKLPKYSLFELENGRKRMLASAGELQKGNELALPSKYVNFLYLASHYEKLKGSPEDNEQKQLFVEQHKHYLDEIIEQISEFSKRVILADANLDKVLSAYNKHRDKPIREQAENIIHLFTLTNLGAPAAFKYFDTTIDRKRYTSTKEVLDATLIHQSITGLYETRIDLSQLGGDGGEAAAKGGSPAPGGWVQEISDSRPMLHIYLNGRRFLGLLNTGADKTCIAGRDWPANWPIHQTESSLQGLGMACGVARSSQPLRWQHEDKSGIIHPFVIPTLPFTLWGRDIMKDIKVRLMTDSPDDSQDLMIGAIESNLFADQISWKSDQPVWLNQWPLKQEKLQALQQLVTEQLQLGHLEESNSPWNTPVFVIKKKSGKWRLLQDLRAVNATMHDMGALQPGLPSPVAVPKGWEIIIIDLQDCFFNIKLHPEDCKRFAFSVPSPNFKRPYQRFQWKVLPQGMKNSPTLCQKFVDKAILTVRDKYQDSYIVHYMDDILLAHPSRSIVDEILTSMIQALNKHGLVVSTEKIQKYDNLKYLGTHIQGDSVSYQKLQIRTDKLRTLNDFQKLLGNINWIRPFLKLTTGELKPLFEILNGDSNPISTRKLTPEACKALQLMNERLSTARVKRLDLSQPWSLCILKTEYTPTACLWQDGVVEWIHLPHISPKVITPYDIFCTQLIIKGRHRSKELFSKDPDYIVVPYTKVQFDLLLQEKEDWPISLLGFLGEVHFHLPKDPLLTFTLQTAIIFPHMTSTTPLEKGIVIFTDGSANGRSVTYIQGREPIIKENTQNTAQQAEIVAVITAFEEVSQPFNLYTDSKYVTGLFPEIETATLSPRTKIYTELKHLQRLIHKRQEKFYIGHIRGHTGLPGPLAQGNAYADSLTRILTAGKRTADGSEFEKRTADGSEFESPKKKAKVE

SEQ ID NO: 3190 - protein, 2114 aa, synthetic construct
MPAAKRVKLDGGDKKYSIGLDIGTNSVGWAVITDEYKVPSKKFKVLGNTDRHSIKKNLIGALLFDSGETAEATRLKRTARRRYTRRKNRICYLQEIFSNEMAKVDDSFFHRLEESFLVEEDKKHERHPIFGNIVDEVAYHEKYPTIYHLRKKLVDSTDKADLRLIYLALAHMIKFRGHFLIEGDLNPDNSDVDKLFIQLVQTYNQLFEENPINASGVDAKAILSARLSKSRRLENLIAQLPGEKKNGLFGNLIALSLGLTPNFKSNFDLAEDAKLQLSKDTYDDDLDNLLAQIGDQYADLFLAAKNLSDAILLSDILRVNTEITKAPLSASMIKRYDEHHQDLTLLKALVRQQLPEKYKEIFFDQSKNGYAGYIDGGASQEEFYKFIKPILEKMDGTEELLVKLNREDLLRKQRTFDNGSIPHQIHLGELHAILRRQEDFYPFLKDNREKIEKILTFRIPYYVGPLARGNSRFAWMTRKSEETITPWNFEEVVDKGASAQSFIERMTNFDKNLPNEKVLPKHSLLYEYFTVYNELTKVKYVTEGMRKPAFLSGEQKKAIVDLLFKTNRKVTVKQLKEDYFKKIECFDSVEISGVEDRFNASLGTYHDLLKIIKDKDFLDNEENEDILEDIVLTLTLFEDREMIEERLKTYAHLFDDKVMKQLKRRRYTGWGRLSRKLINGIRDKQSGKTILDFLKSDGFANRNFMQLIHDDSLTFKEDIQKAQVSGQGDSLHEHIANLAGSPAIKKGILQTVKVVDELVKVMGRHKPENIVIEMARENQTTQKGQKNSRERMKRIEEGIKELGSQILKEHPVENTQLQNEKLYLYYLQNGRDMYVDQELDINRLSDYDVDHIVPQSFLKDDSIDNKVLTRSDKARGKSDNVPSEEVVKKMKNYWRQLLNAKLITQRKFDNLTKAERGGLSELDKAGFIKRQLVETRQITKHVAQILDSRMNTKYDENDKLIREVKVITLKSKLVSDFRKDFQFYKVREINNYHHAHDAYLNAVVGTALIKKYPKLESEFVYGDYKVYDVRKMIAKSEQEIGKATAKYFFYSNIMNFFKTEITLANGEIRKRPLIETNGETGEIVWDKGRDFATVRKVLSMPQVNIVKKTEVQTGGFSKESILPKRNSDKLIARKKDWDPKKYGGFDSPTVAYSVLVVAKVEKGKSKKLKSVKELLGITIMERSSFEKNPIDFLEAKGYKEVKKDLIIKLPKYSLFELENGRKRMLASAGELQKGNELALPSKYVNFLYLASHYEKLKGSPEDNEQKQLFVEQHKHYLDEIIEQISEFSKRVILADANLDKVLSAYNKHRDKPIREQAENIIHLFTLTNLGAPAAFKYFDTTIDRKRYTSTKEVLDATLIHQSITGLYETRIDLSQLGGDGGGSSGGSGGGGGWVQEISDSRPMLHIYLNGRRFLGLLNTGADKTCIAGRDWPANWPIHQTESSLQGLGMACGVARSSQPLRWQHEDKSGIIHPFVIPTLPFTLWGRDIMKDIKVRLMTDSPDDSQDLMIGAIESNLFADQISWKSDQPVWLNQWPLKQEKLQALQQLVTEQLQLGHLEESNSPWNTPVFVIKKKSGKWRLLQDLRAVNATMHDMGALQPGLPSPVAVPKGWEIIIIDLQDCFFNIKLHPEDCKRFAFSVPSPNFKRPYQRFQWKVLPQGMKNSPTLCQKFVDKAILTVRDKYQDSYIVHYMDDILLAHPSRSIVDEILTSMIQALNKHGLVVSTEKIQKYDNLKYLGTHIQGDSVSYQKLQIRTDKLRTLNDFQKLLGNINWIRPFLKLTTGELKPLFEILNGDSNPISTRKLTPEACKALQLMNERLSTARVKRLDLSQPWSLCILKTEYTPTACLWQDGVVEWIHLPHISPKVITPYDIFCTQLIIKGRHRSKELFSKDPDYIVVPYTKVQFDLLLQEKEDWPISLLGFLGEVHFHLPKDPLLTFTLQTAIIFPHMTSTTPLEKGIVIFTDGSANGRSVTYIQGREPIIKENTQNTAQQAEIVAVITAFEEVSQPFNLYTDSKYVTGLFPEIETATLSPRTKIYTELKHLQRLIHKRQEKFYIGHIRGHTGLPGPLAQGNAYADSLTRILTAGKRTADGSEFEKRTADGSEFESPKKKAKVE

SEQ ID NO: 3191 - protein, 2116 aa, synthetic construct
MPAAKRVKLDGGDKKYSIGLDIGTNSVGWAVITDEYKVPSKKFKVLGNTDRHSIKKNLIGALLFDSGETAEATRLKRTARRRYTRRKNRICYLQEIFSNEMAKVDDSFFHRLEESFLVEEDKKHERHPIFGNIVDEVAYHEKYPTIYHLRKKLVDSTDKADLRLIYLALAHMIKFRGHFLIEGDLNPDNSDVDKLFIQLVQTYNQLFEENPINASGVDAKAILSARLSKSRRLENLIAQLPGEKKNGLFGNLIALSLGLTPNFKSNFDLAEDAKLQLSKDTYDDDLDNLLAQIGDQYADLFLAAKNLSDAILLSDILRVNTEITKAPLSASMIKRYDEHHQDLTLLKALVRQQLPEKYKEIFFDQSKNGYAGYIDGGASQEEFYKFIKPILEKMDGTEELLVKLNREDLLRKQRTFDNGSIPHQIHLGELHAILRRQEDFYPFLKDNREKIEKILTFRIPYYVGPLARGNSRFAWMTRKSEETITPWNFEEVVDKGASAQSFIERMTNFDKNLPNEKVLPKHSLLYEYFTVYNELTKVKYVTEGMRKPAFLSGEQKKAIVDLLFKTNRKVTVKQLKEDYFKKIECFDSVEISGVEDRFNASLGTYHDLLKIIKDKDFLDNEENEDILEDIVLTLTLFEDREMIEERLKTYAHLFDDKVMKQLKRRRYTGWGRLSRKLINGIRDKQSGKTILDFLKSDGFANRNFMQLIHDDSLTFKEDIQKAQVSGQGDSLHEHIANLAGSPAIKKGILQTVKVVDELVKVMGRHKPENIVIEMARENQTTQKGQKNSRERMKRIEEGIKELGSQILKEHPVENTQLQNEKLYLYYLQNGRDMYVDQELDINRLSDYDVDHIVPQSFLKDDSIDNKVLTRSDKARGKSDNVPSEEVVKKMKNYWRQLLNAKLITQRKFDNLTKAERGGLSELDKAGFIKRQLVETRQITKHVAQILDSRMNTKYDENDKLIREVKVITLKSKLVSDFRKDFQFYKVREINNYHHAHDAYLNAVVGTALIKKYPKLESEFVYGDYKVYDVRKMIAKSEQEIGKATAKYFFYSNIMNFFKTEITLANGEIRKRPLIETNGETGEIVWDKGRDFATVRKVLSMPQVNIVKKTEVQTGGFSKESILPKRNSDKLIARKKDWDPKKYGGFDSPTVAYSVLVVAKVEKGKSKKLKSVKELLGITIMERSSFEKNPIDFLEAKGYKEVKKDLIIKLPKYSLFELENGRKRMLASAGELQKGNELALPSKYVNFLYLASHYEKLKGSPEDNEQKQLFVEQHKHYLDEIIEQISEFSKRVILADANLDKVLSAYNKHRDKPIREQAENIIHLFTLTNLGAPAAFKYFDTTIDRKRYTSTKEVLDATLIHQSITGLYETRIDLSQLGGDGGGGGEAAAKPAPGGWVQEISDSRPMLHIYLNGRRFLGLLNTGADKTCIAGRDWPANWPIHQTESSLQGLGMACGVARSSQPLRWQHEDKSGIIHPFVIPTLPFTLWGRDIMKDIKVRLMTDSPDDSQDLMIGAIESNLFADQISWKSDQPVWLNQWPLKQEKLQALQQLVTEQLQLGHLEESNSPWNTPVFVIKKKSGKWRLLQDLRAVNATMHDMGALQPGLPSPVAVPKGWEIIIIDLQDCFFNIKLHPEDCKRFAFSVPSPNFKRPYQRFQWKVLPQGMKNSPTLCQKFVDKAILTVRDKYQDSYIVHYMDDILLAHPSRSIVDEILTSMIQALNKHGLVVSTEKIQKYDNLKYLGTHIQGDSVSYQKLQIRTDKLRTLNDFQKLLGNINWIRPFLKLTTGELKPLFEILNGDSNPISTRKLTPEACKALQLMNERLSTARVKRLDLSQPWSLCILKTEYTPTACLWQDGVVEWIHLPHISPKVITPYDIFCTQLIIKGRHRSKELFSKDPDYIVVPYTKVQFDLLLQEKEDWPISLLGFLGEVHFHLPKDPLLTFTLQTAIIFPHMTSTTPLEKGIVIFTDGSANGRSVTYIQGREPIIKENTQNTAQQAEIVAVITAFEEVSQPFNLYTDSKYVTGLFPEIETATLSPRTKIYTELKHLQRLIHKRQEKFYIGHIRGHTGLPGPLAQGNAYADSLTRILTAGKRTADGSEFEKRTADGSEFESPKKKAKVE

SEQ ID NO: 3192 - protein, 2116 aa, synthetic construct
MPAAKRVKLDGGDKKYSIGLDIGTNSVGWAVITDEYKVPSKKFKVLGNTDRHSIKKNLIGALLFDSGETAEATRLKRTARRRYTRRKNRICYLQEIFSNEMAKVDDSFFHRLEESFLVEEDKKHERHPIFGNIVDEVAYHEKYPTIYHLRKKLVDSTDKADLRLIYLALAHMIKFRGHFLIEGDLNPDNSDVDKLFIQLVQTYNQLFEENPINASGVDAKAILSARLSKSRRLENLIAQLPGEKKNGLFGNLIALSLGLTPNFKSNFDLAEDAKLQLSKDTYDDDLDNLLAQIGDQYADLFLAAKNLSDAILLSDILRVNTEITKAPLSASMIKRYDEHHQDLTLLKALVRQQLPEKYKEIFFDQSKNGYAGYIDGGASQEEFYKFIKPILEKMDGTEELLVKLNREDLLRKQRTFDNGSIPHQIHLGELHAILRRQEDFYPFLKDNREKIEKILTFRIPYYVGPLARGNSRFAWMTRKSEETITPWNFEEVVDKGASAQSFIERMTNFDKNLPNEKVLPKHSLLYEYFTVYNELTKVKYVTEGMRKPAFLSGEQKKAIVDLLFKTNRKVTVKQLKEDYFKKIECFDSVEISGVEDRFNASLGTYHDLLKIIKDKDFLDNEENEDILEDIVLTLTLFEDREMIEERLKTYAHLFDDKVMKQLKRRRYTGWGRLSRKLINGIRDKQSGKTILDFLKSDGFANRNFMQLIHDDSLTFKEDIQKAQVSGQGDSLHEHIANLAGSPAIKKGILQTVKVVDELVKVMGRHKPENIVIEMARENQTTQKGQKNSRERMKRIEEGIKELGSQILKEHPVENTQLQNEKLYLYYLQNGRDMYVDQELDINRLSDYDVDHIVPQSFLKDDSIDNKVLTRSDKARGKSDNVPSEEVVKKMKNYWRQLLNAKLITQRKFDNLTKAERGGLSELDKAGFIKRQLVETRQITKHVAQILDSRMNTKYDENDKLIREVKVITLKSKLVSDFRKDFQFYKVREINNYHHAHDAYLNAVVGTALIKKYPKLESEFVYGDYKVYDVRKMIAKSEQEIGKATAKYFFYSNIMNFFKTEITLANGEIRKRPLIETNGETGEIVWDKGRDFATVRKVLSMPQVNIVKKTEVQTGGFSKESILPKRNSDKLIARKKDWDPKKYGGFDSPTVAYSVLVVAKVEKGKSKKLKSVKELLGITIMERSSFEKNPIDFLEAKGYKEVKKDLIIKLPKYSLFELENGRKRMLASAGELQKGNELALPSKYVNFLYLASHYEKLKGSPEDNEQKQLFVEQHKHYLDEIIEQISEFSKRVILADANLDKVLSAYNKHRDKPIREQAENIIHLFTLTNLGAPAAFKYFDTTIDRKRYTSTKEVLDATLIHQSITGLYETRIDLSQLGGDGGGSSEAAAKGGSGGWVQEISDSRPMLHIYLNGRRFLGLLNTGADKTCIAGRDWPANWPIHQTESSLQGLGMACGVARSSQPLRWQHEDKSGIIHPFVIPTLPFTLWGRDIMKDIKVRLMTDSPDDSQDLMIGAIESNLFADQISWKSDQPVWLNQWPLKQEKLQALQQLVTEQLQLGHLEESNSPWNTPVFVIKKKSGKWRLLQDLRAVNATMHDMGALQPGLPSPVAVPKGWEIIIIDLQDCFFNIKLHPEDCKRFAFSVPSPNFKRPYQRFQWKVLPQGMKNSPTLCQKFVDKAILTVRDKYQDSYIVHYMDDILLAHPSRSIVDEILTSMIQALNKHGLVVSTEKIQKYDNLKYLGTHIQGDSVSYQKLQIRTDKLRTLNDFQKLLGNINWIRPFLKLTTGELKPLFEILNGDSNPISTRKLTPEACKALQLMNERLSTARVKRLDLSQPWSLCILKTEYTPTACLWQDGVVEWIHLPHISPKVITPYDIFCTQLIIKGRHRSKELFSKDPDYIVVPYTKVQFDLLLQEKEDWPISLLGFLGEVHFHLPKDPLLTFTLQTAIIFPHMTSTTPLEKGIVIFTDGSANGRSVTYIQGREPIIKENTQNTAQQAEIVAVITAFEEVSQPFNLYTDSKYVTGLFPEIETATLSPRTKIYTELKHLQRLIHKRQEKFYIGHIRGHTGLPGPLAQGNAYADSLTRILTAGKRTADGSEFEKRTADGSEFESPKKKAKVE

SEQ ID NO: 3193 - protein, 2125 aa, synthetic construct
MPAAKRVKLDGGDKKYSIGLDIGTNSVGWAVITDEYKVPSKKFKVLGNTDRHSIKKNLIGALLFDSGETAEATRLKRTARRRYTRRKNRICYLQEIFSNEMAKVDDSFFHRLEESFLVEEDKKHERHPIFGNIVDEVAYHEKYPTIYHLRKKLVDSTDKADLRLIYLALAHMIKFRGHFLIEGDLNPDNSDVDKLFIQLVQTYNQLFEENPINASGVDAKAILSARLSKSRRLENLIAQLPGEKKNGLFGNLIALSLGLTPNFKSNFDLAEDAKLQLSKDTYDDDLDNLLAQIGDQYADLFLAAKNLSDAILLSDILRVNTEITKAPLSASMIKRYDEHHQDLTLLKALVRQQLPEKYKEIFFDQSKNGYAGYIDGGASQEEFYKFIKPILEKMDGTEELLVKLNREDLLRKQRTFDNGSIPHQIHLGELHAILRRQEDFYPFLKDNREKIEKILTFRIPYYVGPLARGNSRFAWMTRKSEETITPWNFEEVVDKGASAQSFIERMTNFDKNLPNEKVLPKHSLLYEYFTVYNELTKVKYVTEGMRKPAFLSGEQKKAIVDLLFKTNRKVTVKQLKEDYFKKIECFDSVEISGVEDRFNASLGTYHDLLKIIKDKDFLDNEENEDILEDIVLTLTLFEDREMIEERLKTYAHLFDDKVMKQLKRRRYTGWGRLSRKLINGIRDKQSGKTILDFLKSDGFANRNFMQLIHDDSLTFKEDIQKAQVSGQGDSLHEHIANLAGSPAIKKGILQTVKVVDELVKVMGRHKPENIVIEMARENQTTQKGQKNSRERMKRIEEGIKELGSQILKEHPVENTQLQNEKLYLYYLQNGRDMYVDQELDINRLSDYDVDHIVPQSFLKDDSIDNKVLTRSDKARGKSDNVPSEEVVKKMKNYWRQLLNAKLITQRKFDNLTKAERGGLSELDKAGFIKRQLVETRQITKHVAQILDSRMNTKYDENDKLIREVKVITLKSKLVSDFRKDFQFYKVREINNYHHAHDAYLNAVVGTALIKKYPKLESEFVYGDYKVYDVRKMIAKSEQEIGKATAKYFFYSNIMNFFKTEITLANGEIRKRPLIETNGETGEIVWDKGRDFATVRKVLSMPQVNIVKKTEVQTGGFSKESILPKRNSDKLIARKKDWDPKKYGGFDSPTVAYSVLVVAKVEKGKSKKLKSVKELLGITIMERSSFEKNPIDFLEAKGYKEVKKDLIIKLPKYSLFELENGRKRMLASAGELQKGNELALPSKYVNFLYLASHYEKLKGSPEDNEQKQLFVEQHKHYLDEIIEQISEFSKRVILADANLDKVLSAYNKHRDKPIREQAENIIHLFTLTNLGAPAAFKYFDTTIDRKRYTSTKEVLDATLIHQSITGLYETRIDLSQLGGDGGGGGGSGGGGSGGGGSGGGGSGGWVQEISDSRPMLHIYLNGRRFLGLLNTGADKTCIAGRDWPANWPIHQTESSLQGLGMACGVARSSQPLRWQHEDKSGIIHPFVIPTLPFTLWGRDIMKDIKVRLMTDSPDDSQDLMIGAIESNLFADQISWKSDQPVWLNQWPLKQEKLQALQQLVTEQLQLGHLEESNSPWNTPVFVIKKKSGKWRLLQDLRAVNATMHDMGALQPGLPSPVAVPKGWEIIIIDLQDCFFNIKLHPEDCKRFAFSVPSPNFKRPYQRFQWKVLPQGMKNSPTLCQKFVDKAILTVRDKYQDSYIVHYMDDILLAHPSRSIVDEILTSMIQALNKHGLVVSTEKIQKYDNLKYLGTHIQGDSVSYQKLQIRTDKLRTLNDFQKLLGNINWIRPFLKLTTGELKPLFEILNGDSNPISTRKLTPEACKALQLMNERLSTARVKRLDLSQPWSLCILKTEYTPTACLWQDGVVEWIHLPHISPKVITPYDIFCTQLIIKGRHRSKELFSKDPDYIVVPYTKVQFDLLLQEKEDWPISLLGFLGEVHFHLPKDPLLTFTLQTAIIFPHMTSTTPLEKGIVIFTDGSANGRSVTYIQGREPIIKENTQNTAQQAEIVAVITAFEEVSQPFNLYTDSKYVTGLFPEIETATLSPRTKIYTELKHLQRLIHKRQEKFYIGHIRGHTGLPGPLAQGNAYADSLTRILTAGKRTADGSEFEKRTADGSEFESPKKKAKVE

SEQ ID NO: 3194 - protein, 2115 aa, synthetic construct
MPAAKRVKLDGGDKKYSIGLDIGTNSVGWAVITDEYKVPSKKFKVLGNTDRHSIKKNLIGALLFDSGETAEATRLKRTARRRYTRRKNRICYLQEIFSNEMAKVDDSFFHRLEESFLVEEDKKHERHPIFGNIVDEVAYHEKYPTIYHLRKKLVDSTDKADLRLIYLALAHMIKFRGHFLIEGDLNPDNSDVDKLFIQLVQTYNQLFEENPINASGVDAKAILSARLSKSRRLENLIAQLPGEKKNGLFGNLIALSLGLTPNFKSNFDLAEDAKLQLSKDTYDDDLDNLLAQIGDQYADLFLAAKNLSDAILLSDILRVNTEITKAPLSASMIKRYDEHHQDLTLLKALVRQQLPEKYKEIFFDQSKNGYAGYIDGGASQEEFYKFIKPILEKMDGTEELLVKLNREDLLRKQRTFDNGSIPHQIHLGELHAILRRQEDFYPFLKDNREKIEKILTFRIPYYVGPLARGNSRFAWMTRKSEETITPWNFEEVVDKGASAQSFIERMTNFDKNLPNEKVLPKHSLLYEYFTVYNELTKVKYVTEGMRKPAFLSGEQKKAIVDLLFKTNRKVTVKQLKEDYFKKIECFDSVEISGVEDRFNASLGTYHDLLKIIKDKDFLDNEENEDILEDIVLTLTLFEDREMIEERLKTYAHLFDDKVMKQLKRRRYTGWGRLSRKLINGIRDKQSGKTILDFLKSDGFANRNFMQLIHDDSLTFKEDIQKAQVSGQGDSLHEHIANLAGSPAIKKGILQTVKVVDELVKVMGRHKPENIVIEMARENQTTQKGQKNSRERMKRIEEGIKELGSQILKEHPVENTQLQNEKLYLYYLQNGRDMYVDQELDINRLSDYDVDHIVPQSFLKDDSIDNKVLTRSDKARGKSDNVPSEEVVKKMKNYWRQLLNAKLITQRKFDNLTKAERGGLSELDKAGFIKRQLVETRQITKHVAQILDSRMNTKYDENDKLIREVKVITLKSKLVSDFRKDFQFYKVREINNYHHAHDAYLNAVVGTALIKKYPKLESEFVYGDYKVYDVRKMIAKSEQEIGKATAKYFFYSNIMNFFKTEITLANGEIRKRPLIETNGETGEIVWDKGRDFATVRKVLSMPQVNIVKKTEVQTGGFSKESILPKRNSDKLIARKKDWDPKKYGGFDSPTVAYSVLVVAKVEKGKSKKLKSVKELLGITIMERSSFEKNPIDFLEAKGYKEVKKDLIIKLPKYSLFELENGRKRMLASAGELQKGNELALPSKYVNFLYLASHYEKLKGSPEDNEQKQLFVEQHKHYLDEIIEQISEFSKRVILADANLDKVLSAYNKHRDKPIREQAENIIHLFTLTNLGAPAAFKYFDTTIDRKRYTSTKEVLDATLIHQSITGLYETRIDLSQLGGDGGGGGGSGGGGSGGWVQEISDSRPMLHIYLNGRRFLGLLNTGADKTCIAGRDWPANWPIHQTESSLQGLGMACGVARSSQPLRWQHEDKSGIIHPFVIPTLPFTLWGRDIMKDIKVRLMTDSPDDSQDLMIGAIESNLFADQISWKSDQPVWLNQWPLKQEKLQALQQLVTEQLQLGHLEESNSPWNTPVFVIKKKSGKWRLLQDLRAVNATMHDMGALQPGLPSPVAVPKGWEIIIIDLQDCFFNIKLHPEDCKRFAFSVPSPNFKRPYQRFQWKVLPQGMKNSPTLCQKFVDKAILTVRDKYQDSYIVHYMDDILLAHPSRSIVDEILTSMIQALNKHGLVVSTEKIQKYDNLKYLGTHIQGDSVSYQKLQIRTDKLRTLNDFQKLLGNINWIRPFLKLTTGELKPLFEILNGDSNPISTRKLTPEACKALQLMNERLSTARVKRLDLSQPWSLCILKTEYTPTACLWQDGVVEWIHLPHISPKVITPYDIFCTQLIIKGRHRSKELFSKDPDYIVVPYTKVQFDLLLQEKEDWPISLLGFLGEVHFHLPKDPLLTFTLQTAIIFPHMTSTTPLEKGIVIFTDGSANGRSVTYIQGREPIIKENTQNTAQQAEIVAVITAFEEVSQPFNLYTDSKYVTGLFPEIETATLSPRTKIYTELKHLQRLIHKRQEKFYIGHIRGHTGLPGPLAQGNAYADSLTRILTAGKRTADGSEFEKRTADGSEFESPKKKAKVE

SEQ ID NO: 3195 - protein, 2114 aa, synthetic construct
MPAAKRVKLDGGDKKYSIGLDIGTNSVGWAVITDEYKVPSKKFKVLGNTDRHSIKKNLIGALLFDSGETAEATRLKRTARRRYTRRKNRICYLQEIFSNEMAKVDDSFFHRLEESFLVEEDKKHERHPIFGNIVDEVAYHEKYPTIYHLRKKLVDSTDKADLRLIYLALAHMIKFRGHFLIEGDLNPDNSDVDKLFIQLVQTYNQLFEENPINASGVDAKAILSARLSKSRRLENLIAQLPGEKKNGLFGNLIALSLGLTPNFKSNFDLAEDAKLQLSKDTYDDDLDNLLAQIGDQYADLFLAAKNLSDAILLSDILRVNTEITKAPLSASMIKRYDEHHQDLTLLKALVRQQLPEKYKEIFFDQSKNGYAGYIDGGASQEEFYKFIKPILEKMDGTEELLVKLNREDLLRKQRTFDNGSIPHQIHLGELHAILRRQEDFYPFLKDNREKIEKILTFRIPYYVGPLARGNSRFAWMTRKSEETITPWNFEEVVDKGASAQSFIERMTNFDKNLPNEKVLPKHSLLYEYFTVYNELTKVKYVTEGMRKPAFLSGEQKKAIVDLLFKTNRKVTVKQLKEDYFKKIECFDSVEISGVEDRFNASLGTYHDLLKIIKDKDFLDNEENEDILEDIVLTLTLFEDREMIEERLKTYAHLFDDKVMKQLKRRRYTGWGRLSRKLINGIRDKQSGKTILDFLKSDGFANRNFMQLIHDDSLTFKEDIQKAQVSGQGDSLHEHIANLAGSPAIKKGILQTVKVVDELVKVMGRHKPENIVIEMARENQTTQKGQKNSRERMKRIEEGIKELGSQILKEHPVENTQLQNEKLYLYYLQNGRDMYVDQELDINRLSDYDVDHIVPQSFLKDDSIDNKVLTRSDKARGKSDNVPSEEVVKKMKNYWRQLLNAKLITQRKFDNLTKAERGGLSELDKAGFIKRQLVETRQITKHVAQILDSRMNTKYDENDKLIREVKVITLKSKLVSDFRKDFQFYKVREINNYHHAHDAYLNAVVGTALIKKYPKLESEFVYGDYKVYDVRKMIAKSEQEIGKATAKYFFYSNIMNFFKTEITLANGEIRKRPLIETNGETGEIVWDKGRDFATVRKVLSMPQVNIVKKTEVQTGGFSKESILPKRNSDKLIARKKDWDPKKYGGFDSPTVAYSVLVVAKVEKGKSKKLKSVKELLGITIMERSSFEKNPIDFLEAKGYKEVKKDLIIKLPKYSLFELENGRKRMLASAGELQKGNELALPSKYVNFLYLASHYEKLKGSPEDNEQKQLFVEQHKHYLDEIIEQISEFSKRVILADANLDKVLSAYNKHRDKPIREQAENIIHLFTLTNLGAPAAFKYFDTTIDRKRYTSTKEVLDATLIHQSITGLYETRIDLSQLGGDGGPAPGGGGSSGGWVQEISDSRPMLHIYLNGRRFLGLLNTGADKTCIAGRDWPANWPIHQTESSLQGLGMACGVARSSQPLRWQHEDKSGIIHPFVIPTLPFTLWGRDIMKDIKVRLMTDSPDDSQDLMIGAIESNLFADQISWKSDQPVWLNQWPLKQEKLQALQQLVTEQLQLGHLEESNSPWNTPVFVIKKKSGKWRLLQDLRAVNATMHDMGALQPGLPSPVAVPKGWEIIIIDLQDCFFNIKLHPEDCKRFAFSVPSPNFKRPYQRFQWKVLPQGMKNSPTLCQKFVDKAILTVRDKYQDSYIVHYMDDILLAHPSRSIVDEILTSMIQALNKHGLVVSTEKIQKYDNLKYLGTHIQGDSVSYQKLQIRTDKLRTLNDFQKLLGNINWIRPFLKLTTGELKPLFEILNGDSNPISTRKLTPEACKALQLMNERLSTARVKRLDLSQPWSLCILKTEYTPTACLWQDGVVEWIHLPHISPKVITPYDIFCTQLIIKGRHRSKELFSKDPDYIVVPYTKVQFDLLLQEKEDWPISLLGFLGEVHFHLPKDPLLTFTLQTAIIFPHMTSTTPLEKGIVIFTDGSANGRSVTYIQGREPIIKENTQNTAQQAEIVAVITAFEEVSQPFNLYTDSKYVTGLFPEIETATLSPRTKIYTELKHLQRLIHKRQEKFYIGHIRGHTGLPGPLAQGNAYADSLTRILTAGKRTADGSEFEKRTADGSEFESPKKKAKVE

SEQ ID NO: 3196 - protein, 2024 aa, synthetic construct
MPAAKRVKLDGGDKKYSIGLDIGTNSVGWAVITDEYKVPSKKFKVLGNTDRHSIKKNLIGALLFDSGETAEATRLKRTARRRYTRRKNRICYLQEIFSNEMAKVDDSFFHRLEESFLVEEDKKHERHPIFGNIVDEVAYHEKYPTIYHLRKKLVDSTDKADLRLIYLALAHMIKFRGHFLIEGDLNPDNSDVDKLFIQLVQTYNQLFEENPINASGVDAKAILSARLSKSRRLENLIAQLPGEKKNGLFGNLIALSLGLTPNFKSNFDLAEDAKLQLSKDTYDDDLDNLLAQIGDQYADLFLAAKNLSDAILLSDILRVNTEITKAPLSASMIKRYDEHHQDLTLLKALVRQQLPEKYKEIFFDQSKNGYAGYIDGGASQEEFYKFIKPILEKMDGTEELLVKLNREDLLRKQRTFDNGSIPHQIHLGELHAILRRQEDFYPFLKDNREKIEKILTFRIPYYVGPLARGNSRFAWMTRKSEETITPWNFEEVVDKGASAQSFIERMTNFDKNLPNEKVLPKHSLLYEYFTVYNELTKVKYVTEGMRKPAFLSGEQKKAIVDLLFKTNRKVTVKQLKEDYFKKIECFDSVEISGVEDRFNASLGTYHDLLKIIKDKDFLDNEENEDILEDIVLTLTLFEDREMIEERLKTYAHLFDDKVMKQLKRRRYTGWGRLSRKLINGIRDKQSGKTILDFLKSDGFANRNFMQLIHDDSLTFKEDIQKAQVSGQGDSLHEHIANLAGSPAIKKGILQTVKVVDELVKVMGRHKPENIVIEMARENQTTQKGQKNSRERMKRIEEGIKELGSQILKEHPVENTQLQNEKLYLYYLQNGRDMYVDQELDINRLSDYDVDHIVPQSFLKDDSIDNKVLTRSDKARGKSDNVPSEEVVKKMKNYWRQLLNAKLITQRKFDNLTKAERGGLSELDKAGFIKRQLVETRQITKHVAQILDSRMNTKYDENDKLIREVKVITLKSKLVSDFRKDFQFYKVREINNYHHAHDAYLNAVVGTALIKKYPKLESEFVYGDYKVYDVRKMIAKSEQEIGKATAKYFFYSNIMNFFKTEITLANGEIRKRPLIETNGETGEIVWDKGRDFATVRKVLSMPQVNIVKKTEVQTGGFSKESILPKRNSDKLIARKKDWDPKKYGGFDSPTVAYSVLVVAKVEKGKSKKLKSVKELLGITIMERSSFEKNPIDFLEAKGYKEVKKDLIIKLPKYSLFELENGRKRMLASAGELQKGNELALPSKYVNFLYLASHYEKLKGSPEDNEQKQLFVEQHKHYLDEIIEQISEFSKRVILADANLDKVLSAYNKHRDKPIREQAENIIHLFTLTNLGAPAAFKYFDTTIDRKRYTSTKEVLDATLIHQSITGLYETRIDLSQLGGDGGGGGPAPEAAAKGGGRDIMKDIKVRLMTDSPDDSQDLMIGAIESNLFADQISWKSDQPVWLNQWPLKQEKLQALQQLVTEQLQLGHLEESNSPWNTPVFVIKKKSGKWRLLQDLRAVNATMHDMGALQPGLPSPVAVPKGWEIIIIDLQDCFFNIKLHPEDCKRFAFSVPSPNFKRPYQRFQWKVLPQGMKNSPTLCQKFVDKAILTVRDKYQDSYIVHYMDDILLAHPSRSIVDEILTSMIQALNKHGLVVSTEKIQKYDNLKYLGTHIQGDSVSYQKLQIRTDKLRTLNDFQKLLGNINWIRPFLKLTTGELKPLFEILNGDSNPISTRKLTPEACKALQLMNERLSTARVKRLDLSQPWSLCILKTEYTPTACLWQDGVVEWIHLPHISPKVITPYDIFCTQLIIKGRHRSKELFSKDPDYIVVPYTKVQFDLLLQEKEDWPISLLGFLGEVHFHLPKDPLLTFTLQTAIIFPHMTSTTPLEKGIVIFTDGSANGRSVTYIQGREPIIKENTQNTAQQAEIVAVITAFEEVSQPFNLYTDSKYVTGLFPEIETATLSPRTKIYTELKHLQRLIHKRQEKFYIGHIRGHTGLPGPLAQGNAYADSLTRILTAGKRTADGSEFEKRTADGSEFESPKKKAKVE

SEQ ID NO: 3197 - protein, 2059 aa, synthetic construct
MPAAKRVKLDGGDKKYSIGLDIGTNSVGWAVITDEYKVPSKKFKVLGNTDRHSIKKNLIGALLFDSGETAEATRLKRTARRRYTRRKNRICYLQEIFSNEMAKVDDSFFHRLEESFLVEEDKKHERHPIFGNIVDEVAYHEKYPTIYHLRKKLVDSTDKADLRLIYLALAHMIKFRGHFLIEGDLNPDNSDVDKLFIQLVQTYNQLFEENPINASGVDAKAILSARLSKSRRLENLIAQLPGEKKNGLFGNLIALSLGLTPNFKSNFDLAEDAKLQLSKDTYDDDLDNLLAQIGDQYADLFLAAKNLSDAILLSDILRVNTEITKAPLSASMIKRYDEHHQDLTLLKALVRQQLPEKYKEIFFDQSKNGYAGYIDGGASQEEFYKFIKPILEKMDGTEELLVKLNREDLLRKQRTFDNGSIPHQIHLGELHAILRRQEDFYPFLKDNREKIEKILTFRIPYYVGPLARGNSRFAWMTRKSEETITPWNFEEVVDKGASAQSFIERMTNFDKNLPNEKVLPKHSLLYEYFTVYNELTKVKYVTEGMRKPAFLSGEQKKAIVDLLFKTNRKVTVKQLKEDYFKKIECFDSVEISGVEDRFNASLGTYHDLLKIIKDKDFLDNEENEDILEDIVLTLTLFEDREMIEERLKTYAHLFDDKVMKQLKRRRYTGWGRLSRKLINGIRDKQSGKTILDFLKSDGFANRNFMQLIHDDSLTFKEDIQKAQVSGQGDSLHEHIANLAGSPAIKKGILQTVKVVDELVKVMGRHKPENIVIEMARENQTTQKGQKNSRERMKRIEEGIKELGSQILKEHPVENTQLQNEKLYLYYLQNGRDMYVDQELDINRLSDYDVDHIVPQSFLKDDSIDNKVLTRSDKARGKSDNVPSEEVVKKMKNYWRQLLNAKLITQRKFDNLTKAERGGLSELDKAGFIKRQLVETRQITKHVAQILDSRMNTKYDENDKLIREVKVITLKSKLVSDFRKDFQFYKVREINNYHHAHDAYLNAVVGTALIKKYPKLESEFVYGDYKVYDVRKMIAKSEQEIGKATAKYFFYSNIMNFFKTEITLANGEIRKRPLIETNGETGEIVWDKGRDFATVRKVLSMPQVNIVKKTEVQTGGFSKESILPKRNSDKLIARKKDWDPKKYGGFDSPTVAYSVLVVAKVEKGKSKKLKSVKELLGITIMERSSFEKNPIDFLEAKGYKEVKKDLIIKLPKYSLFELENGRKRMLASAGELQKGNELALPSKYVNFLYLASHYEKLKGSPEDNEQKQLFVEQHKHYLDEIIEQISEFSKRVILADANLDKVLSAYNKHRDKPIREQAENIIHLFTLTNLGAPAAFKYFDTTIDRKRYTSTKEVLDATLIHQSITGLYETRIDLSQLGGDGGAEAAAKEAAAKEAAAKEAAAKALEAEAAAKEAAAKEAAAKEAAAKAGGGRDIMKDIKVRLMTDSPDDSQDLMIGAIESNLFADQISWKSDQPVWLNQWPLKQEKLQALQQLVTEQLQLGHLEESNSPWNTPVFVIKKKSGKWRLLQDLRAVNATMHDMGALQPGLPSPVAVPKGWEIIIIDLQDCFFNIKLHPEDCKRFAFSVPSPNFKRPYQRFQWKVLPQGMKNSPTLCQKFVDKAILTVRDKYQDSYIVHYMDDILLAHPSRSIVDEILTSMIQALNKHGLVVSTEKIQKYDNLKYLGTHIQGDSVSYQKLQIRTDKLRTLNDFQKLLGNINWIRPFLKLTTGELKPLFEILNGDSNPISTRKLTPEACKALQLMNERLSTARVKRLDLSQPWSLCILKTEYTPTACLWQDGVVEWIHLPHISPKVITPYDIFCTQLIIKGRHRSKELFSKDPDYIVVPYTKVQFDLLLQEKEDWPISLLGFLGEVHFHLPKDPLLTFTLQTAIIFPHMTSTTPLEKGIVIFTDGSANGRSVTYIQGREPIIKENTQNTAQQAEIVAVITAFEEVSQPFNLYTDSKYVTGLFPEIETATLSPRTKIYTELKHLQRLIHKRQEKFYIGHIRGHTGLPGPLAQGNAYADSLTRILTAGKRTADGSEFEKRTADGSEFESPKKKAKVE

SEQ ID NO: 3198 - protein, 2024 aa, synthetic construct
MPAAKRVKLDGGDKKYSIGLDIGTNSVGWAVITDEYKVPSKKFKVLGNTDRHSIKKNLIGALLFDSGETAEATRLKRTARRRYTRRKNRICYLQEIFSNEMAKVDDSFFHRLEESFLVEEDKKHERHPIFGNIVDEVAYHEKYPTIYHLRKKLVDSTDKADLRLIYLALAHMIKFRGHFLIEGDLNPDNSDVDKLFIQLVQTYNQLFEENPINASGVDAKAILSARLSKSRRLENLIAQLPGEKKNGLFGNLIALSLGLTPNFKSNFDLAEDAKLQLSKDTYDDDLDNLLAQIGDQYADLFLAAKNLSDAILLSDILRVNTEITKAPLSASMIKRYDEHHQDLTLLKALVRQQLPEKYKEIFFDQSKNGYAGYIDGGASQEEFYKFIKPILEKMDGTEELLVKLNREDLLRKQRTFDNGSIPHQIHLGELHAILRRQEDFYPFLKDNREKIEKILTFRIPYYVGPLARGNSRFAWMTRKSEETITPWNFEEVVDKGASAQSFIERMTNFDKNLPNEKVLPKHSLLYEYFTVYNELTKVKYVTEGMRKPAFLSGEQKKAIVDLLFKTNRKVTVKQLKEDYFKKIECFDSVEISGVEDRFNASLGTYHDLLKIIKDKDFLDNEENEDILEDIVLTLTLFEDREMIEERLKTYAHLFDDKVMKQLKRRRYTGWGRLSRKLINGIRDKQSGKTILDFLKSDGFANRNFMQLIHDDSLTFKEDIQKAQVSGQGDSLHEHIANLAGSPAIKKGILQTVKVVDELVKVMGRHKPENIVIEMARENQTTQKGQKNSRERMKRIEEGIKELGSQILKEHPVENTQLQNEKLYLYYLQNGRDMYVDQELDINRLSDYDVDHIVPQSFLKDDSIDNKVLTRSDKARGKSDNVPSEEVVKKMKNYWRQLLNAKLITQRKFDNLTKAERGGLSELDKAGFIKRQLVETRQITKHVAQILDSRMNTKYDENDKLIREVKVITLKSKLVSDFRKDFQFYKVREINNYHHAHDAYLNAVVGTALIKKYPKLESEFVYGDYKVYDVRKMIAKSEQEIGKATAKYFFYSNIMNFFKTEITLANGEIRKRPLIETNGETGEIVWDKGRDFATVRKVLSMPQVNIVKKTEVQTGGFSKESILPKRNSDKLIARKKDWDPKKYGGFDSPTVAYSVLVVAKVEKGKSKKLKSVKELLGITIMERSSFEKNPIDFLEAKGYKEVKKDLIIKLPKYSLFELENGRKRMLASAGELQKGNELALPSKYVNFLYLASHYEKLKGSPEDNEQKQLFVEQHKHYLDEIIEQISEFSKRVILADANLDKVLSAYNKHRDKPIREQAENIIHLFTLTNLGAPAAFKYFDTTIDRKRYTSTKEVLDATLIHQSITGLYETRIDLSQLGGDGGPAPGSSEAAAKGGGRDIMKDIKVRLMTDSPDDSQDLMIGAIESNLFADQISWKSDQPVWLNQWPLKQEKLQALQQLVTEQLQLGHLEESNSPWNTPVFVIKKKSGKWRLLQDLRAVNATMHDMGALQPGLPSPVAVPKGWEIIIIDLQDCFFNIKLHPEDCKRFAFSVPSPNFKRPYQRFQWKVLPQGMKNSPTLCQKFVDKAILTVRDKYQDSYIVHYMDDILLAHPSRSIVDEILTSMIQALNKHGLVVSTEKIQKYDNLKYLGTHIQGDSVSYQKLQIRTDKLRTLNDFQKLLGNINWIRPFLKLTTGELKPLFEILNGDSNPISTRKLTPEACKALQLMNERLSTARVKRLDLSQPWSLCILKTEYTPTACLWQDGVVEWIHLPHISPKVITPYDIFCTQLIIKGRHRSKELFSKDPDYIVVPYTKVQFDLLLQEKEDWPISLLGFLGEVHFHLPKDPLLTFTLQTAIIFPHMTSTTPLEKGIVIFTDGSANGRSVTYIQGREPIIKENTQNTAQQAEIVAVITAFEEVSQPFNLYTDSKYVTGLFPEIETATLSPRTKIYTELKHLQRLIHKRQEKFYIGHIRGHTGLPGPLAQGNAYADSLTRILTAGKRTADGSEFEKRTADGSEFESPKKKAKVE

SEQ ID NO: 3199 - protein, 2022 aa, synthetic construct
MPAAKRVKLDGGDKKYSIGLDIGTNSVGWAVITDEYKVPSKKFKVLGNTDRHSIKKNLIGALLFDSGETAEATRLKRTARRRYTRRKNRICYLQEIFSNEMAKVDDSFFHRLEESFLVEEDKKHERHPIFGNIVDEVAYHEKYPTIYHLRKKLVDSTDKADLRLIYLALAHMIKFRGHFLIEGDLNPDNSDVDKLFIQLVQTYNQLFEENPINASGVDAKAILSARLSKSRRLENLIAQLPGEKKNGLFGNLIALSLGLTPNFKSNFDLAEDAKLQLSKDTYDDDLDNLLAQIGDQYADLFLAAKNLSDAILLSDILRVNTEITKAPLSASMIKRYDEHHQDLTLLKALVRQQLPEKYKEIFFDQSKNGYAGYIDGGASQEEFYKFIKPILEKMDGTEELLVKLNREDLLRKQRTFDNGSIPHQIHLGELHAILRRQEDFYPFLKDNREKIEKILTFRIPYYVGPLARGNSRFAWMTRKSEETITPWNFEEVVDKGASAQSFIERMTNFDKNLPNEKVLPKHSLLYEYFTVYNELTKVKYVTEGMRKPAFLSGEQKKAIVDLLFKTNRKVTVKQLKEDYFKKIECFDSVEISGVEDRFNASLGTYHDLLKIIKDKDFLDNEENEDILEDIVLTLTLFEDREMIEERLKTYAHLFDDKVMKQLKRRRYTGWGRLSRKLINGIRDKQSGKTILDFLKSDGFANRNFMQLIHDDSLTFKEDIQKAQVSGQGDSLHEHIANLAGSPAIKKGILQTVKVVDELVKVMGRHKPENIVIEMARENQTTQKGQKNSRERMKRIEEGIKELGSQILKEHPVENTQLQNEKLYLYYLQNGRDMYVDQELDINRLSDYDVDHIVPQSFLKDDSIDNKVLTRSDKARGKSDNVPSEEVVKKMKNYWRQLLNAKLITQRKFDNLTKAERGGLSELDKAGFIKRQLVETRQITKHVAQILDSRMNTKYDENDKLIREVKVITLKSKLVSDFRKDFQFYKVREINNYHHAHDAYLNAVVGTALIKKYPKLESEFVYGDYKVYDVRKMIAKSEQEIGKATAKYFFYSNIMNFFKTEITLANGEIRKRPLIETNGETGEIVWDKGRDFATVRKVLSMPQVNIVKKTEVQTGGFSKESILPKRNSDKLIARKKDWDPKKYGGFDSPTVAYSVLVVAKVEKGKSKKLKSVKELLGITIMERSSFEKNPIDFLEAKGYKEVKKDLIIKLPKYSLFELENGRKRMLASAGELQKGNELALPSKYVNFLYLASHYEKLKGSPEDNEQKQLFVEQHKHYLDEIIEQISEFSKRVILADANLDKVLSAYNKHRDKPIREQAENIIHLFTLTNLGAPAAFKYFDTTIDRKRYTSTKEVLDATLIHQSITGLYETRIDLSQLGGDGGGGSGGGGSSGGGRDIMKDIKVRLMTDSPDDSQDLMIGAIESNLFADQISWKSDQPVWLNQWPLKQEKLQALQQLVTEQLQLGHLEESNSPWNTPVFVIKKKSGKWRLLQDLRAVNATMHDMGALQPGLPSPVAVPKGWEIIIIDLQDCFFNIKLHPEDCKRFAFSVPSPNFKRPYQRFQWKVLPQGMKNSPTLCQKFVDKAILTVRDKYQDSYIVHYMDDILLAHPSRSIVDEILTSMIQALNKHGLVVSTEKIQKYDNLKYLGTHIQGDSVSYQKLQIRTDKLRTLNDFQKLLGNINWIRPFLKLTTGELKPLFEILNGDSNPISTRKLTPEACKALQLMNERLSTARVKRLDLSQPWSLCILKTEYTPTACLWQDGVVEWIHLPHISPKVITPYDIFCTQLIIKGRHRSKELFSKDPDYIVVPYTKVQFDLLLQEKEDWPISLLGFLGEVHFHLPKDPLLTFTLQTAIIFPHMTSTTPLEKGIVIFTDGSANGRSVTYIQGREPIIKENTQNTAQQAEIVAVITAFEEVSQPFNLYTDSKYVTGLFPEIETATLSPRTKIYTELKHLQRLIHKRQEKFYIGHIRGHTGLPGPLAQGNAYADSLTRILTAGKRTADGSEFEKRTADGSEFESPKKKAKVE

SEQ ID NO: 3200 - protein, 2024 aa, synthetic construct
MPAAKRVKLDGGDKKYSIGLDIGTNSVGWAVITDEYKVPSKKFKVLGNTDRHSIKKNLIGALLFDSGETAEATRLKRTARRRYTRRKNRICYLQEIFSNEMAKVDDSFFHRLEESFLVEEDKKHERHPIFGNIVDEVAYHEKYPTIYHLRKKLVDSTDKADLRLIYLALAHMIKFRGHFLIEGDLNPDNSDVDKLFIQLVQTYNQLFEENPINASGVDAKAILSARLSKSRRLENLIAQLPGEKKNGLFGNLIALSLGLTPNFKSNFDLAEDAKLQLSKDTYDDDLDNLLAQIGDQYADLFLAAKNLSDAILLSDILRVNTEITKAPLSASMIKRYDEHHQDLTLLKALVRQQLPEKYKEIFFDQSKNGYAGYIDGGASQEEFYKFIKPILEKMDGTEELLVKLNREDLLRKQRTFDNGSIPHQIHLGELHAILRRQEDFYPFLKDNREKIEKILTFRIPYYVGPLARGNSRFAWMTRKSEETITPWNFEEVVDKGASAQSFIERMTNFDKNLPNEKVLPKHSLLYEYFTVYNELTKVKYVTEGMRKPAFLSGEQKKAIVDLLFKTNRKVTVKQLKEDYFKKIECFDSVEISGVEDRFNASLGTYHDLLKIIKDKDFLDNEENEDILEDIVLTLTLFEDREMIEERLKTYAHLFDDKVMKQLKRRRYTGWGRLSRKLINGIRDKQSGKTILDFLKSDGFANRNFMQLIHDDSLTFKEDIQKAQVSGQGDSLHEHIANLAGSPAIKKGILQTVKVVDELVKVMGRHKPENIVIEMARENQTTQKGQKNSRERMKRIEEGIKELGSQILKEHPVENTQLQNEKLYLYYLQNGRDMYVDQELDINRLSDYDVDHIVPQSFLKDDSIDNKVLTRSDKARGKSDNVPSEEVVKKMKNYWRQLLNAKLITQRKFDNLTKAERGGLSELDKAGFIKRQLVETRQITKHVAQILDSRMNTKYDENDKLIREVKVITLKSKLVSDFRKDFQFYKVREINNYHHAHDAYLNAVVGTALIKKYPKLESEFVYGDYKVYDVRKMIAKSEQEIGKATAKYFFYSNIMNFFKTEITLANGEIRKRPLIETNGETGEIVWDKGRDFATVRKVLSMPQVNIVKKTEVQTGGFSKESILPKRNSDKLIARKKDWDPKKYGGFDSPTVAYSVLVVAKVEKGKSKKLKSVKELLGITIMERSSFEKNPIDFLEAKGYKEVKKDLIIKLPKYSLFELENGRKRMLASAGELQKGNELALPSKYVNFLYLASHYEKLKGSPEDNEQKQLFVEQHKHYLDEIIEQISEFSKRVILADANLDKVLSAYNKHRDKPIREQAENIIHLFTLTNLGAPAAFKYFDTTIDRKRYTSTKEVLDATLIHQSITGLYETRIDLSQLGGDGGPAPEAAAKGGGGGGRDIMKDIKVRLMTDSPDDSQDLMIGAIESNLFADQISWKSDQPVWLNQWPLKQEKLQALQQLVTEQLQLGHLEESNSPWNTPVFVIKKKSGKWRLLQDLRAVNATMHDMGALQPGLPSPVAVPKGWEIIIIDLQDCFFNIKLHPEDCKRFAFSVPSPNFKRPYQRFQWKVLPQGMKNSPTLCQKFVDKAILTVRDKYQDSYIVHYMDDILLAHPSRSIVDEILTSMIQALNKHGLVVSTEKIQKYDNLKYLGTHIQGDSVSYQKLQIRTDKLRTLNDFQKLLGNINWIRPFLKLTTGELKPLFEILNGDSNPISTRKLTPEACKALQLMNERLSTARVKRLDLSQPWSLCILKTEYTPTACLWQDGVVEWIHLPHISPKVITPYDIFCTQLIIKGRHRSKELFSKDPDYIVVPYTKVQFDLLLQEKEDWPISLLGFLGEVHFHLPKDPLLTFTLQTAIIFPHMTSTTPLEKGIVIFTDGSANGRSVTYIQGREPIIKENTQNTAQQAEIVAVITAFEEVSQPFNLYTDSKYVTGLFPEIETATLSPRTKIYTELKHLQRLIHKRQEKFYIGHIRGHTGLPGPLAQGNAYADSLTRILTAGKRTADGSEFEKRTADGSEFESPKKKAKVE

SEQ ID NO: 3201 - protein, 2028 aa, synthetic construct
MPAAKRVKLDGGDKKYSIGLDIGTNSVGWAVITDEYKVPSKKFKVLGNTDRHSIKKNLIGALLFDSGETAEATRLKRTARRRYTRRKNRICYLQEIFSNEMAKVDDSFFHRLEESFLVEEDKKHERHPIFGNIVDEVAYHEKYPTIYHLRKKLVDSTDKADLRLIYLALAHMIKFRGHFLIEGDLNPDNSDVDKLFIQLVQTYNQLFEENPINASGVDAKAILSARLSKSRRLENLIAQLPGEKKNGLFGNLIALSLGLTPNFKSNFDLAEDAKLQLSKDTYDDDLDNLLAQIGDQYADLFLAAKNLSDAILLSDILRVNTEITKAPLSASMIKRYDEHHQDLTLLKALVRQQLPEKYKEIFFDQSKNGYAGYIDGGASQEEFYKFIKPILEKMDGTEELLVKLNREDLLRKQRTFDNGSIPHQIHLGELHAILRRQEDFYPFLKDNREKIEKILTFRIPYYVGPLARGNSRFAWMTRKSEETITPWNFEEVVDKGASAQSFIERMTNFDKNLPNEKVLPKHSLLYEYFTVYNELTKVKYVTEGMRKPAFLSGEQKKAIVDLLFKTNRKVTVKQLKEDYFKKIECFDSVEISGVEDRFNASLGTYHDLLKIIKDKDFLDNEENEDILEDIVLTLTLFEDREMIEERLKTYAHLFDDKVMKQLKRRRYTGWGRLSRKLINGIRDKQSGKTILDFLKSDGFANRNFMQLIHDDSLTFKEDIQKAQVSGQGDSLHEHIANLAGSPAIKKGILQTVKVVDELVKVMGRHKPENIVIEMARENQTTQKGQKNSRERMKRIEEGIKELGSQILKEHPVENTQLQNEKLYLYYLQNGRDMYVDQELDINRLSDYDVDHIVPQSFLKDDSIDNKVLTRSDKARGKSDNVPSEEVVKKMKNYWRQLLNAKLITQRKFDNLTKAERGGLSELDKAGFIKRQLVETRQITKHVAQILDSRMNTKYDENDKLIREVKVITLKSKLVSDFRKDFQFYKVREINNYHHAHDAYLNAVVGTALIKKYPKLESEFVYGDYKVYDVRKMIAKSEQEIGKATAKYFFYSNIMNFFKTEITLANGEIRKRPLIETNGETGEIVWDKGRDFATVRKVLSMPQVNIVKKTEVQTGGFSKESILPKRNSDKLIARKKDWDPKKYGGFDSPTVAYSVLVVAKVEKGKSKKLKSVKELLGITIMERSSFEKNPIDFLEAKGYKEVKKDLIIKLPKYSLFELENGRKRMLASAGELQKGNELALPSKYVNFLYLASHYEKLKGSPEDNEQKQLFVEQHKHYLDEIIEQISEFSKRVILADANLDKVLSAYNKHRDKPIREQAENIIHLFTLTNLGAPAAFKYFDTTIDRKRYTSTKEVLDATLIHQSITGLYETRIDLSQLGGDGGEAAAKGGGGSEAAAKGGGRDIMKDIKVRLMTDSPDDSQDLMIGAIESNLFADQISWKSDQPVWLNQWPLKQEKLQALQQLVTEQLQLGHLEESNSPWNTPVFVIKKKSGKWRLLQDLRAVNATMHDMGALQPGLPSPVAVPKGWEIIIIDLQDCFFNIKLHPEDCKRFAFSVPSPNFKRPYQRFQWKVLPQGMKNSPTLCQKFVDKAILTVRDKYQDSYIVHYMDDILLAHPSRSIVDEILTSMIQALNKHGLVVSTEKIQKYDNLKYLGTHIQGDSVSYQKLQIRTDKLRTLNDFQKLLGNINWIRPFLKLTTGELKPLFEILNGDSNPISTRKLTPEACKALQLMNERLSTARVKRLDLSQPWSLCILKTEYTPTACLWQDGVVEWIHLPHISPKVITPYDIFCTQLIIKGRHRSKELFSKDPDYIVVPYTKVQFDLLLQEKEDWPISLLGFLGEVHFHLPKDPLLTFTLQTAIIFPHMTSTTPLEKGIVIFTDGSANGRSVTYIQGREPIIKENTQNTAQQAEIVAVITAFEEVSQPFNLYTDSKYVTGLFPEIETATLSPRTKIYTELKHLQRLIHKRQEKFYIGHIRGHTGLPGPLAQGNAYADSLTRILTAGKRTADGSEFEKRTADGSEFESPKKKAKVE

SEQ ID NO: 3202 - protein, 2019 aa, synthetic construct
MPAAKRVKLDGGDKKYSIGLDIGTNSVGWAVITDEYKVPSKKFKVLGNTDRHSIKKNLIGALLFDSGETAEATRLKRTARRRYTRRKNRICYLQEIFSNEMAKVDDSFFHRLEESFLVEEDKKHERHPIFGNIVDEVAYHEKYPTIYHLRKKLVDSTDKADLRLIYLALAHMIKFRGHFLIEGDLNPDNSDVDKLFIQLVQTYNQLFEENPINASGVDAKAILSARLSKSRRLENLIAQLPGEKKNGLFGNLIALSLGLTPNFKSNFDLAEDAKLQLSKDTYDDDLDNLLAQIGDQYADLFLAAKNLSDAILLSDILRVNTEITKAPLSASMIKRYDEHHQDLTLLKALVRQQLPEKYKEIFFDQSKNGYAGYIDGGASQEEFYKFIKPILEKMDGTEELLVKLNREDLLRKQRTFDNGSIPHQIHLGELHAILRRQEDFYPFLKDNREKIEKILTFRIPYYVGPLARGNSRFAWMTRKSEETITPWNFEEVVDKGASAQSFIERMTNFDKNLPNEKVLPKHSLLYEYFTVYNELTKVKYVTEGMRKPAFLSGEQKKAIVDLLFKTNRKVTVKQLKEDYFKKIECFDSVEISGVEDRFNASLGTYHDLLKIIKDKDFLDNEENEDILEDIVLTLTLFEDREMIEERLKTYAHLFDDKVMKQLKRRRYTGWGRLSRKLINGIRDKQSGKTILDFLKSDGFANRNFMQLIHDDSLTFKEDIQKAQVSGQGDSLHEHIANLAGSPAIKKGILQTVKVVDELVKVMGRHKPENIVIEMARENQTTQKGQKNSRERMKRIEEGIKELGSQILKEHPVENTQLQNEKLYLYYLQNGRDMYVDQELDINRLSDYDVDHIVPQSFLKDDSIDNKVLTRSDKARGKSDNVPSEEVVKKMKNYWRQLLNAKLITQRKFDNLTKAERGGLSELDKAGFIKRQLVETRQITKHVAQILDSRMNTKYDENDKLIREVKVITLKSKLVSDFRKDFQFYKVREINNYHHAHDAYLNAVVGTALIKKYPKLESEFVYGDYKVYDVRKMIAKSEQEIGKATAKYFFYSNIMNFFKTEITLANGEIRKRPLIETNGETGEIVWDKGRDFATVRKVLSMPQVNIVKKTEVQTGGFSKESILPKRNSDKLIARKKDWDPKKYGGFDSPTVAYSVLVVAKVEKGKSKKLKSVKELLGITIMERSSFEKNPIDFLEAKGYKEVKKDLIIKLPKYSLFELENGRKRMLASAGELQKGNELALPSKYVNFLYLASHYEKLKGSPEDNEQKQLFVEQHKHYLDEIIEQISEFSKRVILADANLDKVLSAYNKHRDKPIREQAENIIHLFTLTNLGAPAAFKYFDTTIDRKRYTSTKEVLDATLIHQSITGLYETRIDLSQLGGDGGGGGPAPGGGRDIMKDIKVRLMTDSPDDSQDLMIGAIESNLFADQISWKSDQPVWLNQWPLKQEKLQALQQLVTEQLQLGHLEESNSPWNTPVFVIKKKSGKWRLLQDLRAVNATMHDMGALQPGLPSPVAVPKGWEIIIIDLQDCFFNIKLHPEDCKRFAFSVPSPNFKRPYQRFQWKVLPQGMKNSPTLCQKFVDKAILTVRDKYQDSYIVHYMDDILLAHPSRSIVDEILTSMIQALNKHGLVVSTEKIQKYDNLKYLGTHIQGDSVSYQKLQIRTDKLRTLNDFQKLLGNINWIRPFLKLTTGELKPLFEILNGDSNPISTRKLTPEACKALQLMNERLSTARVKRLDLSQPWSLCILKTEYTPTACLWQDGVVEWIHLPHISPKVITPYDIFCTQLIIKGRHRSKELFSKDPDYIVVPYTKVQFDLLLQEKEDWPISLLGFLGEVHFHLPKDPLLTFTLQTAIIFPHMTSTTPLEKGIVIFTDGSANGRSVTYIQGREPIIKENTQNTAQQAEIVAVITAFEEVSQPFNLYTDSKYVTGLFPEIETATLSPRTKIYTELKHLQRLIHKRQEKFYIGHIRGHTGLPGPLAQGNAYADSLTRILTAGKRTADGSEFEKRTADGSEFESPKKKAKVE

SEQ ID NO: 3203 - protein, 2028 aa, synthetic construct
MPAAKRVKLDGGDKKYSIGLDIGTNSVGWAVITDEYKVPSKKFKVLGNTDRHSIKKNLIGALLFDSGETAEATRLKRTARRRYTRRKNRICYLQEIFSNEMAKVDDSFFHRLEESFLVEEDKKHERHPIFGNIVDEVAYHEKYPTIYHLRKKLVDSTDKADLRLIYLALAHMIKFRGHFLIEGDLNPDNSDVDKLFIQLVQTYNQLFEENPINASGVDAKAILSARLSKSRRLENLIAQLPGEKKNGLFGNLIALSLGLTPNFKSNFDLAEDAKLQLSKDTYDDDLDNLLAQIGDQYADLFLAAKNLSDAILLSDILRVNTEITKAPLSASMIKRYDEHHQDLTLLKALVRQQLPEKYKEIFFDQSKNGYAGYIDGGASQEEFYKFIKPILEKMDGTEELLVKLNREDLLRKQRTFDNGSIPHQIHLGELHAILRRQEDFYPFLKDNREKIEKILTFRIPYYVGPLARGNSRFAWMTRKSEETITPWNFEEVVDKGASAQSFIERMTNFDKNLPNEKVLPKHSLLYEYFTVYNELTKVKYVTEGMRKPAFLSGEQKKAIVDLLFKTNRKVTVKQLKEDYFKKIECFDSVEISGVEDRFNASLGTYHDLLKIIKDKDFLDNEENEDILEDIVLTLTLFEDREMIEERLKTYAHLFDDKVMKQLKRRRYTGWGRLSRKLINGIRDKQSGKTILDFLKSDGFANRNFMQLIHDDSLTFKEDIQKAQVSGQGDSLHEHIANLAGSPAIKKGILQTVKVVDELVKVMGRHKPENIVIEMARENQTTQKGQKNSRERMKRIEEGIKELGSQILKEHPVENTQLQNEKLYLYYLQNGRDMYVDQELDINRLSDYDVDHIVPQSFLKDDSIDNKVLTRSDKARGKSDNVPSEEVVKKMKNYWRQLLNAKLITQRKFDNLTKAERGGLSELDKAGFIKRQLVETRQITKHVAQILDSRMNTKYDENDKLIREVKVITLKSKLVSDFRKDFQFYKVREINNYHHAHDAYLNAVVGTALIKKYPKLESEFVYGDYKVYDVRKMIAKSEQEIGKATAKYFFYSNIMNFFKTEITLANGEIRKRPLIETNGETGEIVWDKGRDFATVRKVLSMPQVNIVKKTEVQTGGFSKESILPKRNSDKLIARKKDWDPKKYGGFDSPTVAYSVLVVAKVEKGKSKKLKSVKELLGITIMERSSFEKNPIDFLEAKGYKEVKKDLIIKLPKYSLFELENGRKRMLASAGELQKGNELALPSKYVNFLYLASHYEKLKGSPEDNEQKQLFVEQHKHYLDEIIEQISEFSKRVILADANLDKVLSAYNKHRDKPIREQAENIIHLFTLTNLGAPAAFKYFDTTIDRKRYTSTKEVLDATLIHQSITGLYETRIDLSQLGGDGGGGGGSGGGGSGGGGSGGGRDIMKDIKVRLMTDSPDDSQDLMIGAIESNLFADQISWKSDQPVWLNQWPLKQEKLQALQQLVTEQLQLGHLEESNSPWNTPVFVIKKKSGKWRLLQDLRAVNATMHDMGALQPGLPSPVAVPKGWEIIIIDLQDCFFNIKLHPEDCKRFAFSVPSPNFKRPYQRFQWKVLPQGMKNSPTLCQKFVDKAILTVRDKYQDSYIVHYMDDILLAHPSRSIVDEILTSMIQALNKHGLVVSTEKIQKYDNLKYLGTHIQGDSVSYQKLQIRTDKLRTLNDFQKLLGNINWIRPFLKLTTGELKPLFEILNGDSNPISTRKLTPEACKALQLMNERLSTARVKRLDLSQPWSLCILKTEYTPTACLWQDGVVEWIHLPHISPKVITPYDIFCTQLIIKGRHRSKELFSKDPDYIVVPYTKVQFDLLLQEKEDWPISLLGFLGEVHFHLPKDPLLTFTLQTAIIFPHMTSTTPLEKGIVIFTDGSANGRSVTYIQGREPIIKENTQNTAQQAEIVAVITAFEEVSQPFNLYTDSKYVTGLFPEIETATLSPRTKIYTELKHLQRLIHKRQEKFYIGHIRGHTGLPGPLAQGNAYADSLTRILTAGKRTADGSEFEKRTADGSEFESPKKKAKVE

SEQ ID NO: 3204 - protein, 2022 aa, synthetic construct
MPAAKRVKLDGGDKKYSIGLDIGTNSVGWAVITDEYKVPSKKFKVLGNTDRHSIKKNLIGALLFDSGETAEATRLKRTARRRYTRRKNRICYLQEIFSNEMAKVDDSFFHRLEESFLVEEDKKHERHPIFGNIVDEVAYHEKYPTIYHLRKKLVDSTDKADLRLIYLALAHMIKFRGHFLIEGDLNPDNSDVDKLFIQLVQTYNQLFEENPINASGVDAKAILSARLSKSRRLENLIAQLPGEKKNGLFGNLIALSLGLTPNFKSNFDLAEDAKLQLSKDTYDDDLDNLLAQIGDQYADLFLAAKNLSDAILLSDILRVNTEITKAPLSASMIKRYDEHHQDLTLLKALVRQQLPEKYKEIFFDQSKNGYAGYIDGGASQEEFYKFIKPILEKMDGTEELLVKLNREDLLRKQRTFDNGSIPHQIHLGELHAILRRQEDFYPFLKDNREKIEKILTFRIPYYVGPLARGNSRFAWMTRKSEETITPWNFEEVVDKGASAQSFIERMTNFDKNLPNEKVLPKHSLLYEYFTVYNELTKVKYVTEGMRKPAFLSGEQKKAIVDLLFKTNRKVTVKQLKEDYFKKIECFDSVEISGVEDRFNASLGTYHDLLKIIKDKDFLDNEENEDILEDIVLTLTLFEDREMIEERLKTYAHLFDDKVMKQLKRRRYTGWGRLSRKLINGIRDKQSGKTILDFLKSDGFANRNFMQLIHDDSLTFKEDIQKAQVSGQGDSLHEHIANLAGSPAIKKGILQTVKVVDELVKVMGRHKPENIVIEMARENQTTQKGQKNSRERMKRIEEGIKELGSQILKEHPVENTQLQNEKLYLYYLQNGRDMYVDQELDINRLSDYDVDHIVPQSFLKDDSIDNKVLTRSDKARGKSDNVPSEEVVKKMKNYWRQLLNAKLITQRKFDNLTKAERGGLSELDKAGFIKRQLVETRQITKHVAQILDSRMNTKYDENDKLIREVKVITLKSKLVSDFRKDFQFYKVREINNYHHAHDAYLNAVVGTALIKKYPKLESEFVYGDYKVYDVRKMIAKSEQEIGKATAKYFFYSNIMNFFKTEITLANGEIRKRPLIETNGETGEIVWDKGRDFATVRKVLSMPQVNIVKKTEVQTGGFSKESILPKRNSDKLIARKKDWDPKKYGGFDSPTVAYSVLVVAKVEKGKSKKLKSVKELLGITIMERSSFEKNPIDFLEAKGYKEVKKDLIIKLPKYSLFELENGRKRMLASAGELQKGNELALPSKYVNFLYLASHYEKLKGSPEDNEQKQLFVEQHKHYLDEIIEQISEFSKRVILADANLDKVLSAYNKHRDKPIREQAENIIHLFTLTNLGAPAAFKYFDTTIDRKRYTSTKEVLDATLIHQSITGLYETRIDLSQLGGDGGGSSGGGPAPGGGRDIMKDIKVRLMTDSPDDSQDLMIGAIESNLFADQISWKSDQPVWLNQWPLKQEKLQALQQLVTEQLQLGHLEESNSPWNTPVFVIKKKSGKWRLLQDLRAVNATMHDMGALQPGLPSPVAVPKGWEIIIIDLQDCFFNIKLHPEDCKRFAFSVPSPNFKRPYQRFQWKVLPQGMKNSPTLCQKFVDKAILTVRDKYQDSYIVHYMDDILLAHPSRSIVDEILTSMIQALNKHGLVVSTEKIQKYDNLKYLGTHIQGDSVSYQKLQIRTDKLRTLNDFQKLLGNINWIRPFLKLTTGELKPLFEILNGDSNPISTRKLTPEACKALQLMNERLSTARVKRLDLSQPWSLCILKTEYTPTACLWQDGVVEWIHLPHISPKVITPYDIFCTQLIIKGRHRSKELFSKDPDYIVVPYTKVQFDLLLQEKEDWPISLLGFLGEVHFHLPKDPLLTFTLQTAIIFPHMTSTTPLEKGIVIFTDGSANGRSVTYIQGREPIIKENTQNTAQQAEIVAVITAFEEVSQPFNLYTDSKYVTGLFPEIETATLSPRTKIYTELKHLQRLIHKRQEKFYIGHIRGHTGLPGPLAQGNAYADSLTRILTAGKRTADGSEFEKRTADGSEFESPKKKAKVE

SEQ ID NO: 3205 - protein, 2022 aa, synthetic construct
MPAAKRVKLDGGDKKYSIGLDIGTNSVGWAVITDEYKVPSKKFKVLGNTDRHSIKKNLIGALLFDSGETAEATRLKRTARRRYTRRKNRICYLQEIFSNEMAKVDDSFFHRLEESFLVEEDKKHERHPIFGNIVDEVAYHEKYPTIYHLRKKLVDSTDKADLRLIYLALAHMIKFRGHFLIEGDLNPDNSDVDKLFIQLVQTYNQLFEENPINASGVDAKAILSARLSKSRRLENLIAQLPGEKKNGLFGNLIALSLGLTPNFKSNFDLAEDAKLQLSKDTYDDDLDNLLAQIGDQYADLFLAAKNLSDAILLSDILRVNTEITKAPLSASMIKRYDEHHQDLTLLKALVRQQLPEKYKEIFFDQSKNGYAGYIDGGASQEEFYKFIKPILEKMDGTEELLVKLNREDLLRKQRTFDNGSIPHQIHLGELHAILRRQEDFYPFLKDNREKIEKILTFRIPYYVGPLARGNSRFAWMTRKSEETITPWNFEEVVDKGASAQSFIERMTNFDKNLPNEKVLPKHSLLYEYFTVYNELTKVKYVTEGMRKPAFLSGEQKKAIVDLLFKTNRKVTVKQLKEDYFKKIECFDSVEISGVEDRFNASLGTYHDLLKIIKDKDFLDNEENEDILEDIVLTLTLFEDREMIEERLKTYAHLFDDKVMKQLKRRRYTGWGRLSRKLINGIRDKQSGKTILDFLKSDGFANRNFMQLIHDDSLTFKEDIQKAQVSGQGDSLHEHIANLAGSPAIKKGILQTVKVVDELVKVMGRHKPENIVIEMARENQTTQKGQKNSRERMKRIEEGIKELGSQILKEHPVENTQLQNEKLYLYYLQNGRDMYVDQELDINRLSDYDVDHIVPQSFLKDDSIDNKVLTRSDKARGKSDNVPSEEVVKKMKNYWRQLLNAKLITQRKFDNLTKAERGGLSELDKAGFIKRQLVETRQITKHVAQILDSRMNTKYDENDKLIREVKVITLKSKLVSDFRKDFQFYKVREINNYHHAHDAYLNAVVGTALIKKYPKLESEFVYGDYKVYDVRKMIAKSEQEIGKATAKYFFYSNIMNFFKTEITLANGEIRKRPLIETNGETGEIVWDKGRDFATVRKVLSMPQVNIVKKTEVQTGGFSKESILPKRNSDKLIARKKDWDPKKYGGFDSPTVAYSVLVVAKVEKGKSKKLKSVKELLGITIMERSSFEKNPIDFLEAKGYKEVKKDLIIKLPKYSLFELENGRKRMLASAGELQKGNELALPSKYVNFLYLASHYEKLKGSPEDNEQKQLFVEQHKHYLDEIIEQISEFSKRVILADANLDKVLSAYNKHRDKPIREQAENIIHLFTLTNLGAPAAFKYFDTTIDRKRYTSTKEVLDATLIHQSITGLYETRIDLSQLGGDGGGSSGGSGGGGGGRDIMKDIKVRLMTDSPDDSQDLMIGAIESNLFADQISWKSDQPVWLNQWPLKQEKLQALQQLVTEQLQLGHLEESNSPWNTPVFVIKKKSGKWRLLQDLRAVNATMHDMGALQPGLPSPVAVPKGWEIIIIDLQDCFFNIKLHPEDCKRFAFSVPSPNFKRPYQRFQWKVLPQGMKNSPTLCQKFVDKAILTVRDKYQDSYIVHYMDDILLAHPSRSIVDEILTSMIQALNKHGLVVSTEKIQKYDNLKYLGTHIQGDSVSYQKLQIRTDKLRTLNDFQKLLGNINWIRPFLKLTTGELKPLFEILNGDSNPISTRKLTPEACKALQLMNERLSTARVKRLDLSQPWSLCILKTEYTPTACLWQDGVVEWIHLPHISPKVITPYDIFCTQLIIKGRHRSKELFSKDPDYIVVPYTKVQFDLLLQEKEDWPISLLGFLGEVHFHLPKDPLLTFTLQTAIIFPHMTSTTPLEKGIVIFTDGSANGRSVTYIQGREPIIKENTQNTAQQAEIVAVITAFEEVSQPFNLYTDSKYVTGLFPEIETATLSPRTKIYTELKHLQRLIHKRQEKFYIGHIRGHTGLPGPLAQGNAYADSLTRILTAGKRTADGSEFEKRTADGSEFESPKKKAKVE

SEQ ID NO: 3206 - protein, 2021 aa, synthetic construct
MPAAKRVKLDGGDKKYSIGLDIGTNSVGWAVITDEYKVPSKKFKVLGNTDRHSIKKNLIGALLFDSGETAEATRLKRTARRRYTRRKNRICYLQEIFSNEMAKVDDSFFHRLEESFLVEEDKKHERHPIFGNIVDEVAYHEKYPTIYHLRKKLVDSTDKADLRLIYLALAHMIKFRGHFLIEGDLNPDNSDVDKLFIQLVQTYNQLFEENPINASGVDAKAILSARLSKSRRLENLIAQLPGEKKNGLFGNLIALSLGLTPNFKSNFDLAEDAKLQLSKDTYDDDLDNLLAQIGDQYADLFLAAKNLSDAILLSDILRVNTEITKAPLSASMIKRYDEHHQDLTLLKALVRQQLPEKYKEIFFDQSKNGYAGYIDGGASQEEFYKFIKPILEKMDGTEELLVKLNREDLLRKQRTFDNGSIPHQIHLGELHAILRRQEDFYPFLKDNREKIEKILTFRIPYYVGPLARGNSRFAWMTRKSEETITPWNFEEVVDKGASAQSFIERMTNFDKNLPNEKVLPKHSLLYEYFTVYNELTKVKYVTEGMRKPAFLSGEQKKAIVDLLFKTNRKVTVKQLKEDYFKKIECFDSVEISGVEDRFNASLGTYHDLLKIIKDKDFLDNEENEDILEDIVLTLTLFEDREMIEERLKTYAHLFDDKVMKQLKRRRYTGWGRLSRKLINGIRDKQSGKTILDFLKSDGFANRNFMQLIHDDSLTFKEDIQKAQVSGQGDSLHEHIANLAGSPAIKKGILQTVKVVDELVKVMGRHKPENIVIEMARENQTTQKGQKNSRERMKRIEEGIKELGSQILKEHPVENTQLQNEKLYLYYLQNGRDMYVDQELDINRLSDYDVDHIVPQSFLKDDSIDNKVLTRSDKARGKSDNVPSEEVVKKMKNYWRQLLNAKLITQRKFDNLTKAERGGLSELDKAGFIKRQLVETRQITKHVAQILDSRMNTKYDENDKLIREVKVITLKSKLVSDFRKDFQFYKVREINNYHHAHDAYLNAVVGTALIKKYPKLESEFVYGDYKVYDVRKMIAKSEQEIGKATAKYFFYSNIMNFFKTEITLANGEIRKRPLIETNGETGEIVWDKGRDFATVRKVLSMPQVNIVKKTEVQTGGFSKESILPKRNSDKLIARKKDWDPKKYGGFDSPTVAYSVLVVAKVEKGKSKKLKSVKELLGITIMERSSFEKNPIDFLEAKGYKEVKKDLIIKLPKYSLFELENGRKRMLASAGELQKGNELALPSKYVNFLYLASHYEKLKGSPEDNEQKQLFVEQHKHYLDEIIEQISEFSKRVILADANLDKVLSAYNKHRDKPIREQAENIIHLFTLTNLGAPAAFKYFDTTIDRKRYTSTKEVLDATLIHQSITGLYETRIDLSQLGGDGGEAAAKGGSGGGRDIMKDIKVRLMTDSPDDSQDLMIGAIESNLFADQISWKSDQPVWLNQWPLKQEKLQALQQLVTEQLQLGHLEESNSPWNTPVFVIKKKSGKWRLLQDLRAVNATMHDMGALQPGLPSPVAVPKGWEIIIIDLQDCFFNIKLHPEDCKRFAFSVPSPNFKRPYQRFQWKVLPQGMKNSPTLCQKFVDKAILTVRDKYQDSYIVHYMDDILLAHPSRSIVDEILTSMIQALNKHGLVVSTEKIQKYDNLKYLGTHIQGDSVSYQKLQIRTDKLRTLNDFQKLLGNINWIRPFLKLTTGELKPLFEILNGDSNPISTRKLTPEACKALQLMNERLSTARVKRLDLSQPWSLCILKTEYTPTACLWQDGVVEWIHLPHISPKVITPYDIFCTQLIIKGRHRSKELFSKDPDYIVVPYTKVQFDLLLQEKEDWPISLLGFLGEVHFHLPKDPLLTFTLQTAIIFPHMTSTTPLEKGIVIFTDGSANGRSVTYIQGREPIIKENTQNTAQQAEIVAVITAFEEVSQPFNLYTDSKYVTGLFPEIETATLSPRTKIYTELKHLQRLIHKRQEKFYIGHIRGHTGLPGPLAQGNAYADSLTRILTAGKRTADGSEFEKRTADGSEFESPKKKAKVE

SEQ ID NO: 3207 - protein, 2024 aa, synthetic construct
MPAAKRVKLDGGDKKYSIGLDIGTNSVGWAVITDEYKVPSKKFKVLGNTDRHSIKKNLIGALLFDSGETAEATRLKRTARRRYTRRKNRICYLQEIFSNEMAKVDDSFFHRLEESFLVEEDKKHERHPIFGNIVDEVAYHEKYPTIYHLRKKLVDSTDKADLRLIYLALAHMIKFRGHFLIEGDLNPDNSDVDKLFIQLVQTYNQLFEENPINASGVDAKAILSARLSKSRRLENLIAQLPGEKKNGLFGNLIALSLGLTPNFKSNFDLAEDAKLQLSKDTYDDDLDNLLAQIGDQYADLFLAAKNLSDAILLSDILRVNTEITKAPLSASMIKRYDEHHQDLTLLKALVRQQLPEKYKEIFFDQSKNGYAGYIDGGASQEEFYKFIKPILEKMDGTEELLVKLNREDLLRKQRTFDNGSIPHQIHLGELHAILRRQEDFYPFLKDNREKIEKILTFRIPYYVGPLARGNSRFAWMTRKSEETITPWNFEEVVDKGASAQSFIERMTNFDKNLPNEKVLPKHSLLYEYFTVYNELTKVKYVTEGMRKPAFLSGEQKKAIVDLLFKTNRKVTVKQLKEDYFKKIECFDSVEISGVEDRFNASLGTYHDLLKIIKDKDFLDNEENEDILEDIVLTLTLFEDREMIEERLKTYAHLFDDKVMKQLKRRRYTGWGRLSRKLINGIRDKQSGKTILDFLKSDGFANRNFMQLIHDDSLTFKEDIQKAQVSGQGDSLHEHIANLAGSPAIKKGILQTVKVVDELVKVMGRHKPENIVIEMARENQTTQKGQKNSRERMKRIEEGIKELGSQILKEHPVENTQLQNEKLYLYYLQNGRDMYVDQELDINRLSDYDVDHIVPQSFLKDDSIDNKVLTRSDKARGKSDNVPSEEVVKKMKNYWRQLLNAKLITQRKFDNLTKAERGGLSELDKAGFIKRQLVETRQITKHVAQILDSRMNTKYDENDKLIREVKVITLKSKLVSDFRKDFQFYKVREINNYHHAHDAYLNAVVGTALIKKYPKLESEFVYGDYKVYDVRKMIAKSEQEIGKATAKYFFYSNIMNFFKTEITLANGEIRKRPLIETNGETGEIVWDKGRDFATVRKVLSMPQVNIVKKTEVQTGGFSKESILPKRNSDKLIARKKDWDPKKYGGFDSPTVAYSVLVVAKVEKGKSKKLKSVKELLGITIMERSSFEKNPIDFLEAKGYKEVKKDLIIKLPKYSLFELENGRKRMLASAGELQKGNELALPSKYVNFLYLASHYEKLKGSPEDNEQKQLFVEQHKHYLDEIIEQISEFSKRVILADANLDKVLSAYNKHRDKPIREQAENIIHLFTLTNLGAPAAFKYFDTTIDRKRYTSTKEVLDATLIHQSITGLYETRIDLSQLGGDGGGSSEAAAKPAPGGGRDIMKDIKVRLMTDSPDDSQDLMIGAIESNLFADQISWKSDQPVWLNQWPLKQEKLQALQQLVTEQLQLGHLEESNSPWNTPVFVIKKKSGKWRLLQDLRAVNATMHDMGALQPGLPSPVAVPKGWEIIIIDLQDCFFNIKLHPEDCKRFAFSVPSPNFKRPYQRFQWKVLPQGMKNSPTLCQKFVDKAILTVRDKYQDSYIVHYMDDILLAHPSRSIVDEILTSMIQALNKHGLVVSTEKIQKYDNLKYLGTHIQGDSVSYQKLQIRTDKLRTLNDFQKLLGNINWIRPFLKLTTGELKPLFEILNGDSNPISTRKLTPEACKALQLMNERLSTARVKRLDLSQPWSLCILKTEYTPTACLWQDGVVEWIHLPHISPKVITPYDIFCTQLIIKGRHRSKELFSKDPDYIVVPYTKVQFDLLLQEKEDWPISLLGFLGEVHFHLPKDPLLTFTLQTAIIFPHMTSTTPLEKGIVIFTDGSANGRSVTYIQGREPIIKENTQNTAQQAEIVAVITAFEEVSQPFNLYTDSKYVTGLFPEIETATLSPRTKIYTELKHLQRLIHKRQEKFYIGHIRGHTGLPGPLAQGNAYADSLTRILTAGKRTADGSEFEKRTADGSEFESPKKKAKVE

SEQ ID NO: 3208 - protein, 2021 aa, synthetic construct
MPAAKRVKLDGGDKKYSIGLDIGTNSVGWAVITDEYKVPSKKFKVLGNTDRHSIKKNLIGALLFDSGETAEATRLKRTARRRYTRRKNRICYLQEIFSNEMAKVDDSFFHRLEESFLVEEDKKHERHPIFGNIVDEVAYHEKYPTIYHLRKKLVDSTDKADLRLIYLALAHMIKFRGHFLIEGDLNPDNSDVDKLFIQLVQTYNQLFEENPINASGVDAKAILSARLSKSRRLENLIAQLPGEKKNGLFGNLIALSLGLTPNFKSNFDLAEDAKLQLSKDTYDDDLDNLLAQIGDQYADLFLAAKNLSDAILLSDILRVNTEITKAPLSASMIKRYDEHHQDLTLLKALVRQQLPEKYKEIFFDQSKNGYAGYIDGGASQEEFYKFIKPILEKMDGTEELLVKLNREDLLRKQRTFDNGSIPHQIHLGELHAILRRQEDFYPFLKDNREKIEKILTFRIPYYVGPLARGNSRFAWMTRKSEETITPWNFEEVVDKGASAQSFIERMTNFDKNLPNEKVLPKHSLLYEYFTVYNELTKVKYVTEGMRKPAFLSGEQKKAIVDLLFKTNRKVTVKQLKEDYFKKIECFDSVEISGVEDRFNASLGTYHDLLKIIKDKDFLDNEENEDILEDIVLTLTLFEDREMIEERLKTYAHLFDDKVMKQLKRRRYTGWGRLSRKLINGIRDKQSGKTILDFLKSDGFANRNFMQLIHDDSLTFKEDIQKAQVSGQGDSLHEHIANLAGSPAIKKGILQTVKVVDELVKVMGRHKPENIVIEMARENQTTQKGQKNSRERMKRIEEGIKELGSQILKEHPVENTQLQNEKLYLYYLQNGRDMYVDQELDINRLSDYDVDHIVPQSFLKDDSIDNKVLTRSDKARGKSDNVPSEEVVKKMKNYWRQLLNAKLITQRKFDNLTKAERGGLSELDKAGFIKRQLVETRQITKHVAQILDSRMNTKYDENDKLIREVKVITLKSKLVSDFRKDFQFYKVREINNYHHAHDAYLNAVVGTALIKKYPKLESEFVYGDYKVYDVRKMIAKSEQEIGKATAKYFFYSNIMNFFKTEITLANGEIRKRPLIETNGETGEIVWDKGRDFATVRKVLSMPQVNIVKKTEVQTGGFSKESILPKRNSDKLIARKKDWDPKKYGGFDSPTVAYSVLVVAKVEKGKSKKLKSVKELLGITIMERSSFEKNPIDFLEAKGYKEVKKDLIIKLPKYSLFELENGRKRMLASAGELQKGNELALPSKYVNFLYLASHYEKLKGSPEDNEQKQLFVEQHKHYLDEIIEQISEFSKRVILADANLDKVLSAYNKHRDKPIREQAENIIHLFTLTNLGAPAAFKYFDTTIDRKRYTSTKEVLDATLIHQSITGLYETRIDLSQLGGDGGGGGEAAAKGGGRDIMKDIKVRLMTDSPDDSQDLMIGAIESNLFADQISWKSDQPVWLNQWPLKQEKLQALQQLVTEQLQLGHLEESNSPWNTPVFVIKKKSGKWRLLQDLRAVNATMHDMGALQPGLPSPVAVPKGWEIIIIDLQDCFFNIKLHPEDCKRFAFSVPSPNFKRPYQRFQWKVLPQGMKNSPTLCQKFVDKAILTVRDKYQDSYIVHYMDDILLAHPSRSIVDEILTSMIQALNKHGLVVSTEKIQKYDNLKYLGTHIQGDSVSYQKLQIRTDKLRTLNDFQKLLGNINWIRPFLKLTTGELKPLFEILNGDSNPISTRKLTPEACKALQLMNERLSTARVKRLDLSQPWSLCILKTEYTPTACLWQDGVVEWIHLPHISPKVITPYDIFCTQLIIKGRHRSKELFSKDPDYIVVPYTKVQFDLLLQEKEDWPISLLGFLGEVHFHLPKDPLLTFTLQTAIIFPHMTSTTPLEKGIVIFTDGSANGRSVTYIQGREPIIKENTQNTAQQAEIVAVITAFEEVSQPFNLYTDSKYVTGLFPEIETATLSPRTKIYTELKHLQRLIHKRQEKFYIGHIRGHTGLPGPLAQGNAYADSLTRILTAGKRTADGSEFEKRTADGSEFESPKKKAKVE

SEQ ID NO: 3209 - protein, 2022 aa, synthetic construct
MPAAKRVKLDGGDKKYSIGLDIGTNSVGWAVITDEYKVPSKKFKVLGNTDRHSIKKNLIGALLFDSGETAEATRLKRTARRRYTRRKNRICYLQEIFSNEMAKVDDSFFHRLEESFLVEEDKKHERHPIFGNIVDEVAYHEKYPTIYHLRKKLVDSTDKADLRLIYLALAHMIKFRGHFLIEGDLNPDNSDVDKLFIQLVQTYNQLFEENPINASGVDAKAILSARLSKSRRLENLIAQLPGEKKNGLFGNLIALSLGLTPNFKSNFDLAEDAKLQLSKDTYDDDLDNLLAQIGDQYADLFLAAKNLSDAILLSDILRVNTEITKAPLSASMIKRYDEHHQDLTLLKALVRQQLPEKYKEIFFDQSKNGYAGYIDGGASQEEFYKFIKPILEKMDGTEELLVKLNREDLLRKQRTFDNGSIPHQIHLGELHAILRRQEDFYPFLKDNREKIEKILTFRIPYYVGPLARGNSRFAWMTRKSEETITPWNFEEVVDKGASAQSFIERMTNFDKNLPNEKVLPKHSLLYEYFTVYNELTKVKYVTEGMRKPAFLSGEQKKAIVDLLFKTNRKVTVKQLKEDYFKKIECFDSVEISGVEDRFNASLGTYHDLLKIIKDKDFLDNEENEDILEDIVLTLTLFEDREMIEERLKTYAHLFDDKVMKQLKRRRYTGWGRLSRKLINGIRDKQSGKTILDFLKSDGFANRNFMQLIHDDSLTFKEDIQKAQVSGQGDSLHEHIANLAGSPAIKKGILQTVKVVDELVKVMGRHKPENIVIEMARENQTTQKGQKNSRERMKRIEEGIKELGSQILKEHPVENTQLQNEKLYLYYLQNGRDMYVDQELDINRLSDYDVDHIVPQSFLKDDSIDNKVLTRSDKARGKSDNVPSEEVVKKMKNYWRQLLNAKLITQRKFDNLTKAERGGLSELDKAGFIKRQLVETRQITKHVAQILDSRMNTKYDENDKLIREVKVITLKSKLVSDFRKDFQFYKVREINNYHHAHDAYLNAVVGTALIKKYPKLESEFVYGDYKVYDVRKMIAKSEQEIGKATAKYFFYSNIMNFFKTEITLANGEIRKRPLIETNGETGEIVWDKGRDFATVRKVLSMPQVNIVKKTEVQTGGFSKESILPKRNSDKLIARKKDWDPKKYGGFDSPTVAYSVLVVAKVEKGKSKKLKSVKELLGITIMERSSFEKNPIDFLEAKGYKEVKKDLIIKLPKYSLFELENGRKRMLASAGELQKGNELALPSKYVNFLYLASHYEKLKGSPEDNEQKQLFVEQHKHYLDEIIEQISEFSKRVILADANLDKVLSAYNKHRDKPIREQAENIIHLFTLTNLGAPAAFKYFDTTIDRKRYTSTKEVLDATLIHQSITGLYETRIDLSQLGGDGGPAPGGSGSSGGGRDIMKDIKVRLMTDSPDDSQDLMIGAIESNLFADQISWKSDQPVWLNQWPLKQEKLQALQQLVTEQLQLGHLEESNSPWNTPVFVIKKKSGKWRLLQDLRAVNATMHDMGALQPGLPSPVAVPKGWEIIIIDLQDCFFNIKLHPEDCKRFAFSVPSPNFKRPYQRFQWKVLPQGMKNSPTLCQKFVDKAILTVRDKYQDSYIVHYMDDILLAHPSRSIVDEILTSMIQALNKHGLVVSTEKIQKYDNLKYLGTHIQGDSVSYQKLQIRTDKLRTLNDFQKLLGNINWIRPFLKLTTGELKPLFEILNGDSNPISTRKLTPEACKALQLMNERLSTARVKRLDLSQPWSLCILKTEYTPTACLWQDGVVEWIHLPHISPKVITPYDIFCTQLIIKGRHRSKELFSKDPDYIVVPYTKVQFDLLLQEKEDWPISLLGFLGEVHFHLPKDPLLTFTLQTAIIFPHMTSTTPLEKGIVIFTDGSANGRSVTYIQGREPIIKENTQNTAQQAEIVAVITAFEEVSQPFNLYTDSKYVTGLFPEIETATLSPRTKIYTELKHLQRLIHKRQEKFYIGHIRGHTGLPGPLAQGNAYADSLTRILTAGKRTADGSEFEKRTADGSEFESPKKKAKVE

SEQ ID NO: 3210 - protein, 2016 aa, synthetic construct
MPAAKRVKLDGGDKKYSIGLDIGTNSVGWAVITDEYKVPSKKFKVLGNTDRHSIKKNLIGALLFDSGETAEATRLKRTARRRYTRRKNRICYLQEIFSNEMAKVDDSFFHRLEESFLVEEDKKHERHPIFGNIVDEVAYHEKYPTIYHLRKKLVDSTDKADLRLIYLALAHMIKFRGHFLIEGDLNPDNSDVDKLFIQLVQTYNQLFEENPINASGVDAKAILSARLSKSRRLENLIAQLPGEKKNGLFGNLIALSLGLTPNFKSNFDLAEDAKLQLSKDTYDDDLDNLLAQIGDQYADLFLAAKNLSDAILLSDILRVNTEITKAPLSASMIKRYDEHHQDLTLLKALVRQQLPEKYKEIFFDQSKNGYAGYIDGGASQEEFYKFIKPILEKMDGTEELLVKLNREDLLRKQRTFDNGSIPHQIHLGELHAILRRQEDFYPFLKDNREKIEKILTFRIPYYVGPLARGNSRFAWMTRKSEETITPWNFEEVVDKGASAQSFIERMTNFDKNLPNEKVLPKHSLLYEYFTVYNELTKVKYVTEGMRKPAFLSGEQKKAIVDLLFKTNRKVTVKQLKEDYFKKIECFDSVEISGVEDRFNASLGTYHDLLKIIKDKDFLDNEENEDILEDIVLTLTLFEDREMIEERLKTYAHLFDDKVMKQLKRRRYTGWGRLSRKLINGIRDKQSGKTILDFLKSDGFANRNFMQLIHDDSLTFKEDIQKAQVSGQGDSLHEHIANLAGSPAIKKGILQTVKVVDELVKVMGRHKPENIVIEMARENQTTQKGQKNSRERMKRIEEGIKELGSQILKEHPVENTQLQNEKLYLYYLQNGRDMYVDQELDINRLSDYDVDHIVPQSFLKDDSIDNKVLTRSDKARGKSDNVPSEEVVKKMKNYWRQLLNAKLITQRKFDNLTKAERGGLSELDKAGFIKRQLVETRQITKHVAQILDSRMNTKYDENDKLIREVKVITLKSKLVSDFRKDFQFYKVREINNYHHAHDAYLNAVVGTALIKKYPKLESEFVYGDYKVYDVRKMIAKSEQEIGKATAKYFFYSNIMNFFKTEITLANGEIRKRPLIETNGETGEIVWDKGRDFATVRKVLSMPQVNIVKKTEVQTGGFSKESILPKRNSDKLIARKKDWDPKKYGGFDSPTVAYSVLVVAKVEKGKSKKLKSVKELLGITIMERSSFEKNPIDFLEAKGYKEVKKDLIIKLPKYSLFELENGRKRMLASAGELQKGNELALPSKYVNFLYLASHYEKLKGSPEDNEQKQLFVEQHKHYLDEIIEQISEFSKRVILADANLDKVLSAYNKHRDKPIREQAENIIHLFTLTNLGAPAAFKYFDTTIDRKRYTSTKEVLDATLIHQSITGLYETRIDLSQLGGDGGGGGGGGRDIMKDIKVRLMTDSPDDSQDLMIGAIESNLFADQISWKSDQPVWLNQWPLKQEKLQALQQLVTEQLQLGHLEESNSPWNTPVFVIKKKSGKWRLLQDLRAVNATMHDMGALQPGLPSPVAVPKGWEIIIIDLQDCFFNIKLHPEDCKRFAFSVPSPNFKRPYQRFQWKVLPQGMKNSPTLCQKFVDKAILTVRDKYQDSYIVHYMDDILLAHPSRSIVDEILTSMIQALNKHGLVVSTEKIQKYDNLKYLGTHIQGDSVSYQKLQIRTDKLRTLNDFQKLLGNINWIRPFLKLTTGELKPLFEILNGDSNPISTRKLTPEACKALQLMNERLSTARVKRLDLSQPWSLCILKTEYTPTACLWQDGVVEWIHLPHISPKVITPYDIFCTQLIIKGRHRSKELFSKDPDYIVVPYTKVQFDLLLQEKEDWPISLLGFLGEVHFHLPKDPLLTFTLQTAIIFPHMTSTTPLEKGIVIFTDGSANGRSVTYIQGREPIIKENTQNTAQQAEIVAVITAFEEVSQPFNLYTDSKYVTGLFPEIETATLSPRTKIYTELKHLQRLIHKRQEKFYIGHIRGHTGLPGPLAQGNAYADSLTRILTAGKRTADGSEFEKRTADGSEFESPKKKAKVE

SEQ ID NO: 3211 - protein, 2019 aa, synthetic construct
MPAAKRVKLDGGDKKYSIGLDIGTNSVGWAVITDEYKVPSKKFKVLGNTDRHSIKKNLIGALLFDSGETAEATRLKRTARRRYTRRKNRICYLQEIFSNEMAKVDDSFFHRLEESFLVEEDKKHERHPIFGNIVDEVAYHEKYPTIYHLRKKLVDSTDKADLRLIYLALAHMIKFRGHFLIEGDLNPDNSDVDKLFIQLVQTYNQLFEENPINASGVDAKAILSARLSKSRRLENLIAQLPGEKKNGLFGNLIALSLGLTPNFKSNFDLAEDAKLQLSKDTYDDDLDNLLAQIGDQYADLFLAAKNLSDAILLSDILRVNTEITKAPLSASMIKRYDEHHQDLTLLKALVRQQLPEKYKEIFFDQSKNGYAGYIDGGASQEEFYKFIKPILEKMDGTEELLVKLNREDLLRKQRTFDNGSIPHQIHLGELHAILRRQEDFYPFLKDNREKIEKILTFRIPYYVGPLARGNSRFAWMTRKSEETITPWNFEEVVDKGASAQSFIERMTNFDKNLPNEKVLPKHSLLYEYFTVYNELTKVKYVTEGMRKPAFLSGEQKKAIVDLLFKTNRKVTVKQLKEDYFKKIECFDSVEISGVEDRFNASLGTYHDLLKIIKDKDFLDNEENEDILEDIVLTLTLFEDREMIEERLKTYAHLFDDKVMKQLKRRRYTGWGRLSRKLINGIRDKQSGKTILDFLKSDGFANRNFMQLIHDDSLTFKEDIQKAQVSGQGDSLHEHIANLAGSPAIKKGILQTVKVVDELVKVMGRHKPENIVIEMARENQTTQKGQKNSRERMKRIEEGIKELGSQILKEHPVENTQLQNEKLYLYYLQNGRDMYVDQELDINRLSDYDVDHIVPQSFLKDDSIDNKVLTRSDKARGKSDNVPSEEVVKKMKNYWRQLLNAKLITQRKFDNLTKAERGGLSELDKAGFIKRQLVETRQITKHVAQILDSRMNTKYDENDKLIREVKVITLKSKLVSDFRKDFQFYKVREINNYHHAHDAYLNAVVGTALIKKYPKLESEFVYGDYKVYDVRKMIAKSEQEIGKATAKYFFYSNIMNFFKTEITLANGEIRKRPLIETNGETGEIVWDKGRDFATVRKVLSMPQVNIVKKTEVQTGGFSKESILPKRNSDKLIARKKDWDPKKYGGFDSPTVAYSVLVVAKVEKGKSKKLKSVKELLGITIMERSSFEKNPIDFLEAKGYKEVKKDLIIKLPKYSLFELENGRKRMLASAGELQKGNELALPSKYVNFLYLASHYEKLKGSPEDNEQKQLFVEQHKHYLDEIIEQISEFSKRVILADANLDKVLSAYNKHRDKPIREQAENIIHLFTLTNLGAPAAFKYFDTTIDRKRYTSTKEVLDATLIHQSITGLYETRIDLSQLGGDGGGSSGGGGGGRDIMKDIKVRLMTDSPDDSQDLMIGAIESNLFADQISWKSDQPVWLNQWPLKQEKLQALQQLVTEQLQLGHLEESNSPWNTPVFVIKKKSGKWRLLQDLRAVNATMHDMGALQPGLPSPVAVPKGWEIIIIDLQDCFFNIKLHPEDCKRFAFSVPSPNFKRPYQRFQWKVLPQGMKNSPTLCQKFVDKAILTVRDKYQDSYIVHYMDDILLAHPSRSIVDEILTSMIQALNKHGLVVSTEKIQKYDNLKYLGTHIQGDSVSYQKLQIRTDKLRTLNDFQKLLGNINWIRPFLKLTTGELKPLFEILNGDSNPISTRKLTPEACKALQLMNERLSTARVKRLDLSQPWSLCILKTEYTPTACLWQDGVVEWIHLPHISPKVITPYDIFCTQLIIKGRHRSKELFSKDPDYIVVPYTKVQFDLLLQEKEDWPISLLGFLGEVHFHLPKDPLLTFTLQTAIIFPHMTSTTPLEKGIVIFTDGSANGRSVTYIQGREPIIKENTQNTAQQAEIVAVITAFEEVSQPFNLYTDSKYVTGLFPEIETATLSPRTKIYTELKHLQRLIHKRQEKFYIGHIRGHTGLPGPLAQGNAYADSLTRILTAGKRTADGSEFEKRTADGSEFESPKKKAKVE

SEQ ID NO: 3212 - protein, 2020 aa, synthetic construct
MPAAKRVKLDGGDKKYSIGLDIGTNSVGWAVITDEYKVPSKKFKVLGNTDRHSIKKNLIGALLFDSGETAEATRLKRTARRRYTRRKNRICYLQEIFSNEMAKVDDSFFHRLEESFLVEEDKKHERHPIFGNIVDEVAYHEKYPTIYHLRKKLVDSTDKADLRLIYLALAHMIKFRGHFLIEGDLNPDNSDVDKLFIQLVQTYNQLFEENPINASGVDAKAILSARLSKSRRLENLIAQLPGEKKNGLFGNLIALSLGLTPNFKSNFDLAEDAKLQLSKDTYDDDLDNLLAQIGDQYADLFLAAKNLSDAILLSDILRVNTEITKAPLSASMIKRYDEHHQDLTLLKALVRQQLPEKYKEIFFDQSKNGYAGYIDGGASQEEFYKFIKPILEKMDGTEELLVKLNREDLLRKQRTFDNGSIPHQIHLGELHAILRRQEDFYPFLKDNREKIEKILTFRIPYYVGPLARGNSRFAWMTRKSEETITPWNFEEVVDKGASAQSFIERMTNFDKNLPNEKVLPKHSLLYEYFTVYNELTKVKYVTEGMRKPAFLSGEQKKAIVDLLFKTNRKVTVKQLKEDYFKKIECFDSVEISGVEDRFNASLGTYHDLLKIIKDKDFLDNEENEDILEDIVLTLTLFEDREMIEERLKTYAHLFDDKVMKQLKRRRYTGWGRLSRKLINGIRDKQSGKTILDFLKSDGFANRNFMQLIHDDSLTFKEDIQKAQVSGQGDSLHEHIANLAGSPAIKKGILQTVKVVDELVKVMGRHKPENIVIEMARENQTTQKGQKNSRERMKRIEEGIKELGSQILKEHPVENTQLQNEKLYLYYLQNGRDMYVDQELDINRLSDYDVDHIVPQSFLKDDSIDNKVLTRSDKARGKSDNVPSEEVVKKMKNYWRQLLNAKLITQRKFDNLTKAERGGLSELDKAGFIKRQLVETRQITKHVAQILDSRMNTKYDENDKLIREVKVITLKSKLVSDFRKDFQFYKVREINNYHHAHDAYLNAVVGTALIKKYPKLESEFVYGDYKVYDVRKMIAKSEQEIGKATAKYFFYSNIMNFFKTEITLANGEIRKRPLIETNGETGEIVWDKGRDFATVRKVLSMPQVNIVKKTEVQTGGFSKESILPKRNSDKLIARKKDWDPKKYGGFDSPTVAYSVLVVAKVEKGKSKKLKSVKELLGITIMERSSFEKNPIDFLEAKGYKEVKKDLIIKLPKYSLFELENGRKRMLASAGELQKGNELALPSKYVNFLYLASHYEKLKGSPEDNEQKQLFVEQHKHYLDEIIEQISEFSKRVILADANLDKVLSAYNKHRDKPIREQAENIIHLFTLTNLGAPAAFKYFDTTIDRKRYTSTKEVLDATLIHQSITGLYETRIDLSQLGGDGGGGGGGGGGGGRDIMKDIKVRLMTDSPDDSQDLMIGAIESNLFADQISWKSDQPVWLNQWPLKQEKLQALQQLVTEQLQLGHLEESNSPWNTPVFVIKKKSGKWRLLQDLRAVNATMHDMGALQPGLPSPVAVPKGWEIIIIDLQDCFFNIKLHPEDCKRFAFSVPSPNFKRPYQRFQWKVLPQGMKNSPTLCQKFVDKAILTVRDKYQDSYIVHYMDDILLAHPSRSIVDEILTSMIQALNKHGLVVSTEKIQKYDNLKYLGTHIQGDSVSYQKLQIRTDKLRTLNDFQKLLGNINWIRPFLKLTTGELKPLFEILNGDSNPISTRKLTPEACKALQLMNERLSTARVKRLDLSQPWSLCILKTEYTPTACLWQDGVVEWIHLPHISPKVITPYDIFCTQLIIKGRHRSKELFSKDPDYIVVPYTKVQFDLLLQEKEDWPISLLGFLGEVHFHLPKDPLLTFTLQTAIIFPHMTSTTPLEKGIVIFTDGSANGRSVTYIQGREPIIKENTQNTAQQAEIVAVITAFEEVSQPFNLYTDSKYVTGLFPEIETATLSPRTKIYTELKHLQRLIHKRQEKFYIGHIRGHTGLPGPLAQGNAYADSLTRILTAGKRTADGSEFEKRTADGSEFESPKKKAKVE

SEQ ID NO: 3213 - protein, 2024 aa, synthetic construct
MPAAKRVKLDGGDKKYSIGLDIGTNSVGWAVITDEYKVPSKKFKVLGNTDRHSIKKNLIGALLFDSGETAEATRLKRTARRRYTRRKNRICYLQEIFSNEMAKVDDSFFHRLEESFLVEEDKKHERHPIFGNIVDEVAYHEKYPTIYHLRKKLVDSTDKADLRLIYLALAHMIKFRGHFLIEGDLNPDNSDVDKLFIQLVQTYNQLFEENPINASGVDAKAILSARLSKSRRLENLIAQLPGEKKNGLFGNLIALSLGLTPNFKSNFDLAEDAKLQLSKDTYDDDLDNLLAQIGDQYADLFLAAKNLSDAILLSDILRVNTEITKAPLSASMIKRYDEHHQDLTLLKALVRQQLPEKYKEIFFDQSKNGYAGYIDGGASQEEFYKFIKPILEKMDGTEELLVKLNREDLLRKQRTFDNGSIPHQIHLGELHAILRRQEDFYPFLKDNREKIEKILTFRIPYYVGPLARGNSRFAWMTRKSEETITPWNFEEVVDKGASAQSFIERMTNFDKNLPNEKVLPKHSLLYEYFTVYNELTKVKYVTEGMRKPAFLSGEQKKAIVDLLFKTNRKVTVKQLKEDYFKKIECFDSVEISGVEDRFNASLGTYHDLLKIIKDKDFLDNEENEDILEDIVLTLTLFEDREMIEERLKTYAHLFDDKVMKQLKRRRYTGWGRLSRKLINGIRDKQSGKTILDFLKSDGFANRNFMQLIHDDSLTFKEDIQKAQVSGQGDSLHEHIANLAGSPAIKKGILQTVKVVDELVKVMGRHKPENIVIEMARENQTTQKGQKNSRERMKRIEEGIKELGSQILKEHPVENTQLQNEKLYLYYLQNGRDMYVDQELDINRLSDYDVDHIVPQSFLKDDSIDNKVLTRSDKARGKSDNVPSEEVVKKMKNYWRQLLNAKLITQRKFDNLTKAERGGLSELDKAGFIKRQLVETRQITKHVAQILDSRMNTKYDENDKLIREVKVITLKSKLVSDFRKDFQFYKVREINNYHHAHDAYLNAVVGTALIKKYPKLESEFVYGDYKVYDVRKMIAKSEQEIGKATAKYFFYSNIMNFFKTEITLANGEIRKRPLIETNGETGEIVWDKGRDFATVRKVLSMPQVNIVKKTEVQTGGFSKESILPKRNSDKLIARKKDWDPKKYGGFDSPTVAYSVLVVAKVEKGKSKKLKSVKELLGITIMERSSFEKNPIDFLEAKGYKEVKKDLIIKLPKYSLFELENGRKRMLASAGELQKGNELALPSKYVNFLYLASHYEKLKGSPEDNEQKQLFVEQHKHYLDEIIEQISEFSKRVILADANLDKVLSAYNKHRDKPIREQAENIIHLFTLTNLGAPAAFKYFDTTIDRKRYTSTKEVLDATLIHQSITGLYETRIDLSQLGGDGGGGGEAAAKPAPGGGRDIMKDIKVRLMTDSPDDSQDLMIGAIESNLFADQISWKSDQPVWLNQWPLKQEKLQALQQLVTEQLQLGHLEESNSPWNTPVFVIKKKSGKWRLLQDLRAVNATMHDMGALQPGLPSPVAVPKGWEIIIIDLQDCFFNIKLHPEDCKRFAFSVPSPNFKRPYQRFQWKVLPQGMKNSPTLCQKFVDKAILTVRDKYQDSYIVHYMDDILLAHPSRSIVDEILTSMIQALNKHGLVVSTEKIQKYDNLKYLGTHIQGDSVSYQKLQIRTDKLRTLNDFQKLLGNINWIRPFLKLTTGELKPLFEILNGDSNPISTRKLTPEACKALQLMNERLSTARVKRLDLSQPWSLCILKTEYTPTACLWQDGVVEWIHLPHISPKVITPYDIFCTQLIIKGRHRSKELFSKDPDYIVVPYTKVQFDLLLQEKEDWPISLLGFLGEVHFHLPKDPLLTFTLQTAIIFPHMTSTTPLEKGIVIFTDGSANGRSVTYIQGREPIIKENTQNTAQQAEIVAVITAFEEVSQPFNLYTDSKYVTGLFPEIETATLSPRTKIYTELKHLQRLIHKRQEKFYIGHIRGHTGLPGPLAQGNAYADSLTRILTAGKRTADGSEFEKRTADGSEFESPKKKAKVE

SEQ ID NO: 3214 - protein, 2024 aa, synthetic construct
MPAAKRVKLDGGDKKYSIGLDIGTNSVGWAVITDEYKVPSKKFKVLGNTDRHSIKKNLIGALLFDSGETAEATRLKRTARRRYTRRKNRICYLQEIFSNEMAKVDDSFFHRLEESFLVEEDKKHERHPIFGNIVDEVAYHEKYPTIYHLRKKLVDSTDKADLRLIYLALAHMIKFRGHFLIEGDLNPDNSDVDKLFIQLVQTYNQLFEENPINASGVDAKAILSARLSKSRRLENLIAQLPGEKKNGLFGNLIALSLGLTPNFKSNFDLAEDAKLQLSKDTYDDDLDNLLAQIGDQYADLFLAAKNLSDAILLSDILRVNTEITKAPLSASMIKRYDEHHQDLTLLKALVRQQLPEKYKEIFFDQSKNGYAGYIDGGASQEEFYKFIKPILEKMDGTEELLVKLNREDLLRKQRTFDNGSIPHQIHLGELHAILRRQEDFYPFLKDNREKIEKILTFRIPYYVGPLARGNSRFAWMTRKSEETITPWNFEEVVDKGASAQSFIERMTNFDKNLPNEKVLPKHSLLYEYFTVYNELTKVKYVTEGMRKPAFLSGEQKKAIVDLLFKTNRKVTVKQLKEDYFKKIECFDSVEISGVEDRFNASLGTYHDLLKIIKDKDFLDNEENEDILEDIVLTLTLFEDREMIEERLKTYAHLFDDKVMKQLKRRRYTGWGRLSRKLINGIRDKQSGKTILDFLKSDGFANRNFMQLIHDDSLTFKEDIQKAQVSGQGDSLHEHIANLAGSPAIKKGILQTVKVVDELVKVMGRHKPENIVIEMARENQTTQKGQKNSRERMKRIEEGIKELGSQILKEHPVENTQLQNEKLYLYYLQNGRDMYVDQELDINRLSDYDVDHIVPQSFLKDDSIDNKVLTRSDKARGKSDNVPSEEVVKKMKNYWRQLLNAKLITQRKFDNLTKAERGGLSELDKAGFIKRQLVETRQITKHVAQILDSRMNTKYDENDKLIREVKVITLKSKLVSDFRKDFQFYKVREINNYHHAHDAYLNAVVGTALIKKYPKLESEFVYGDYKVYDVRKMIAKSEQEIGKATAKYFFYSNIMNFFKTEITLANGEIRKRPLIETNGETGEIVWDKGRDFATVRKVLSMPQVNIVKKTEVQTGGFSKESILPKRNSDKLIARKKDWDPKKYGGFDSPTVAYSVLVVAKVEKGKSKKLKSVKELLGITIMERSSFEKNPIDFLEAKGYKEVKKDLIIKLPKYSLFELENGRKRMLASAGELQKGNELALPSKYVNFLYLASHYEKLKGSPEDNEQKQLFVEQHKHYLDEIIEQISEFSKRVILADANLDKVLSAYNKHRDKPIREQAENIIHLFTLTNLGAPAAFKYFDTTIDRKRYTSTKEVLDATLIHQSITGLYETRIDLSQLGGDGGGGGEAAAKGGSGGGRDIMKDIKVRLMTDSPDDSQDLMIGAIESNLFADQISWKSDQPVWLNQWPLKQEKLQALQQLVTEQLQLGHLEESNSPWNTPVFVIKKKSGKWRLLQDLRAVNATMHDMGALQPGLPSPVAVPKGWEIIIIDLQDCFFNIKLHPEDCKRFAFSVPSPNFKRPYQRFQWKVLPQGMKNSPTLCQKFVDKAILTVRDKYQDSYIVHYMDDILLAHPSRSIVDEILTSMIQALNKHGLVVSTEKIQKYDNLKYLGTHIQGDSVSYQKLQIRTDKLRTLNDFQKLLGNINWIRPFLKLTTGELKPLFEILNGDSNPISTRKLTPEACKALQLMNERLSTARVKRLDLSQPWSLCILKTEYTPTACLWQDGVVEWIHLPHISPKVITPYDIFCTQLIIKGRHRSKELFSKDPDYIVVPYTKVQFDLLLQEKEDWPISLLGFLGEVHFHLPKDPLLTFTLQTAIIFPHMTSTTPLEKGIVIFTDGSANGRSVTYIQGREPIIKENTQNTAQQAEIVAVITAFEEVSQPFNLYTDSKYVTGLFPEIETATLSPRTKIYTELKHLQRLIHKRQEKFYIGHIRGHTGLPGPLAQGNAYADSLTRILTAGKRTADGSEFEKRTADGSEFESPKKKAKVE

SEQ ID NO: 3215 - protein, 2022 aa, synthetic construct
MPAAKRVKLDGGDKKYSIGLDIGTNSVGWAVITDEYKVPSKKFKVLGNTDRHSIKKNLIGALLFDSGETAEATRLKRTARRRYTRRKNRICYLQEIFSNEMAKVDDSFFHRLEESFLVEEDKKHERHPIFGNIVDEVAYHEKYPTIYHLRKKLVDSTDKADLRLIYLALAHMIKFRGHFLIEGDLNPDNSDVDKLFIQLVQTYNQLFEENPINASGVDAKAILSARLSKSRRLENLIAQLPGEKKNGLFGNLIALSLGLTPNFKSNFDLAEDAKLQLSKDTYDDDLDNLLAQIGDQYADLFLAAKNLSDAILLSDILRVNTEITKAPLSASMIKRYDEHHQDLTLLKALVRQQLPEKYKEIFFDQSKNGYAGYIDGGASQEEFYKFIKPILEKMDGTEELLVKLNREDLLRKQRTFDNGSIPHQIHLGELHAILRRQEDFYPFLKDNREKIEKILTFRIPYYVGPLARGNSRFAWMTRKSEETITPWNFEEVVDKGASAQSFIERMTNFDKNLPNEKVLPKHSLLYEYFTVYNELTKVKYVTEGMRKPAFLSGEQKKAIVDLLFKTNRKVTVKQLKEDYFKKIECFDSVEISGVEDRFNASLGTYHDLLKIIKDKDFLDNEENEDILEDIVLTLTLFEDREMIEERLKTYAHLFDDKVMKQLKRRRYTGWGRLSRKLINGIRDKQSGKTILDFLKSDGFANRNFMQLIHDDSLTFKEDIQKAQVSGQGDSLHEHIANLAGSPAIKKGILQTVKVVDELVKVMGRHKPENIVIEMARENQTTQKGQKNSRERMKRIEEGIKELGSQILKEHPVENTQLQNEKLYLYYLQNGRDMYVDQELDINRLSDYDVDHIVPQSFLKDDSIDNKVLTRSDKARGKSDNVPSEEVVKKMKNYWRQLLNAKLITQRKFDNLTKAERGGLSELDKAGFIKRQLVETRQITKHVAQILDSRMNTKYDENDKLIREVKVITLKSKLVSDFRKDFQFYKVREINNYHHAHDAYLNAVVGTALIKKYPKLESEFVYGDYKVYDVRKMIAKSEQEIGKATAKYFFYSNIMNFFKTEITLANGEIRKRPLIETNGETGEIVWDKGRDFATVRKVLSMPQVNIVKKTEVQTGGFSKESILPKRNSDKLIARKKDWDPKKYGGFDSPTVAYSVLVVAKVEKGKSKKLKSVKELLGITIMERSSFEKNPIDFLEAKGYKEVKKDLIIKLPKYSLFELENGRKRMLASAGELQKGNELALPSKYVNFLYLASHYEKLKGSPEDNEQKQLFVEQHKHYLDEIIEQISEFSKRVILADANLDKVLSAYNKHRDKPIREQAENIIHLFTLTNLGAPAAFKYFDTTIDRKRYTSTKEVLDATLIHQSITGLYETRIDLSQLGGDGGPAPGSSGGSGGGRDIMKDIKVRLMTDSPDDSQDLMIGAIESNLFADQISWKSDQPVWLNQWPLKQEKLQALQQLVTEQLQLGHLEESNSPWNTPVFVIKKKSGKWRLLQDLRAVNATMHDMGALQPGLPSPVAVPKGWEIIIIDLQDCFFNIKLHPEDCKRFAFSVPSPNFKRPYQRFQWKVLPQGMKNSPTLCQKFVDKAILTVRDKYQDSYIVHYMDDILLAHPSRSIVDEILTSMIQALNKHGLVVSTEKIQKYDNLKYLGTHIQGDSVSYQKLQIRTDKLRTLNDFQKLLGNINWIRPFLKLTTGELKPLFEILNGDSNPISTRKLTPEACKALQLMNERLSTARVKRLDLSQPWSLCILKTEYTPTACLWQDGVVEWIHLPHISPKVITPYDIFCTQLIIKGRHRSKELFSKDPDYIVVPYTKVQFDLLLQEKEDWPISLLGFLGEVHFHLPKDPLLTFTLQTAIIFPHMTSTTPLEKGIVIFTDGSANGRSVTYIQGREPIIKENTQNTAQQAEIVAVITAFEEVSQPFNLYTDSKYVTGLFPEIETATLSPRTKIYTELKHLQRLIHKRQEKFYIGHIRGHTGLPGPLAQGNAYADSLTRILTAGKRTADGSEFEKRTADGSEFESPKKKAKVE

SEQ ID NO: 3216 - protein, 2043 aa, synthetic construct
MPAAKRVKLDGGDKKYSIGLDIGTNSVGWAVITDEYKVPSKKFKVLGNTDRHSIKKNLIGALLFDSGETAEATRLKRTARRRYTRRKNRICYLQEIFSNEMAKVDDSFFHRLEESFLVEEDKKHERHPIFGNIVDEVAYHEKYPTIYHLRKKLVDSTDKADLRLIYLALAHMIKFRGHFLIEGDLNPDNSDVDKLFIQLVQTYNQLFEENPINASGVDAKAILSARLSKSRRLENLIAQLPGEKKNGLFGNLIALSLGLTPNFKSNFDLAEDAKLQLSKDTYDDDLDNLLAQIGDQYADLFLAAKNLSDAILLSDILRVNTEITKAPLSASMIKRYDEHHQDLTLLKALVRQQLPEKYKEIFFDQSKNGYAGYIDGGASQEEFYKFIKPILEKMDGTEELLVKLNREDLLRKQRTFDNGSIPHQIHLGELHAILRRQEDFYPFLKDNREKIEKILTFRIPYYVGPLARGNSRFAWMTRKSEETITPWNFEEVVDKGASAQSFIERMTNFDKNLPNEKVLPKHSLLYEYFTVYNELTKVKYVTEGMRKPAFLSGEQKKAIVDLLFKTNRKVTVKQLKEDYFKKIECFDSVEISGVEDRFNASLGTYHDLLKIIKDKDFLDNEENEDILEDIVLTLTLFEDREMIEERLKTYAHLFDDKVMKQLKRRRYTGWGRLSRKLINGIRDKQSGKTILDFLKSDGFANRNFMQLIHDDSLTFKEDIQKAQVSGQGDSLHEHIANLAGSPAIKKGILQTVKVVDELVKVMGRHKPENIVIEMARENQTTQKGQKNSRERMKRIEEGIKELGSQILKEHPVENTQLQNEKLYLYYLQNGRDMYVDQELDINRLSDYDVDHIVPQSFLKDDSIDNKVLTRSDKARGKSDNVPSEEVVKKMKNYWRQLLNAKLITQRKFDNLTKAERGGLSELDKAGFIKRQLVETRQITKHVAQILDSRMNTKYDENDKLIREVKVITLKSKLVSDFRKDFQFYKVREINNYHHAHDAYLNAVVGTALIKKYPKLESEFVYGDYKVYDVRKMIAKSEQEIGKATAKYFFYSNIMNFFKTEITLANGEIRKRPLIETNGETGEIVWDKGRDFATVRKVLSMPQVNIVKKTEVQTGGFSKESILPKRNSDKLIARKKDWDPKKYGGFDSPTVAYSVLVVAKVEKGKSKKLKSVKELLGITIMERSSFEKNPIDFLEAKGYKEVKKDLIIKLPKYSLFELENGRKRMLASAGELQKGNELALPSKYVNFLYLASHYEKLKGSPEDNEQKQLFVEQHKHYLDEIIEQISEFSKRVILADANLDKVLSAYNKHRDKPIREQAENIIHLFTLTNLGAPAAFKYFDTTIDRKRYTSTKEVLDATLIHQSITGLYETRIDLSQLGGDGGGGGGSGGGGSGGGGSGGGGSGGGGSGGGGSGGGRDIMKDIKVRLMTDSPDDSQDLMIGAIESNLFADQISWKSDQPVWLNQWPLKQEKLQALQQLVTEQLQLGHLEESNSPWNTPVFVIKKKSGKWRLLQDLRAVNATMHDMGALQPGLPSPVAVPKGWEIIIIDLQDCFFNIKLHPEDCKRFAFSVPSPNFKRPYQRFQWKVLPQGMKNSPTLCQKFVDKAILTVRDKYQDSYIVHYMDDILLAHPSRSIVDEILTSMIQALNKHGLVVSTEKIQKYDNLKYLGTHIQGDSVSYQKLQIRTDKLRTLNDFQKLLGNINWIRPFLKLTTGELKPLFEILNGDSNPISTRKLTPEACKALQLMNERLSTARVKRLDLSQPWSLCILKTEYTPTACLWQDGVVEWIHLPHISPKVITPYDIFCTQLIIKGRHRSKELFSKDPDYIVVPYTKVQFDLLLQEKEDWPISLLGFLGEVHFHLPKDPLLTFTLQTAIIFPHMTSTTPLEKGIVIFTDGSANGRSVTYIQGREPIIKENTQNTAQQAEIVAVITAFEEVSQPFNLYTDSKYVTGLFPEIETATLSPRTKIYTELKHLQRLIHKRQEKFYIGHIRGHTGLPGPLAQGNAYADSLTRILTAGKRTADGSEFEKRTADGSEFESPKKKAKVE
